United States Patent Application Publication US 2015/0315605 A1 - sequence listing, part 19

SEQ ID NO: 29413 - DNA, 2641 bp, Zea Mays
gccgagttgccgacgcaccgaaaaaagacagctgacgcgaatgcccaaacgttcggggggcgagcgggatttggaagctgcgcaacgcgcttcccaaatcccccaatcccgacgcccacccgaccccgtcgccagatctcgcgcctcgtccccggggctcgatcggataagcggcggtcggcgattcggggacggggtcatctcgcctaggcttgggcggggctgggctggtgggagccgccgagccggggagccatggcgtcggcgcaggcgccgtcctccgccgctgcgccgtcgcgcaaggaccatctcgaggccgggaagaagcggctcgagcagttccgcaagaagaaagcggcgaagaaggccactgcagctagtgcagagcaggcaaaagcgcctgcgcctgatgtagtggagaacccacctccaattgtcaatgctggtagcttgggagatggactggtgtctgatgtagacccaaaccaagcgagcacgtcttcggtaccattgtccgtatatgagaatggcccagccagtgcatccaggggtgcagaattcatgtcaaatggtcatcagcaagatgctgttagtgatggaggacgtaagttctatgggaacttgagcttctctgaccttgttaatggtcatcatgagaattggagaggcgacggagcccgtaaaaaggacgagcacagcccttacaaggatgtggaatcaaaatcaaaattaagtgcctttgggaatggcagcagtttaaatttaccttctactgaaaacatgccgagttggggaagaaattctttatcaagtcaagtacatgatactgaacaatctagttcatattcatccagcaccctttttggaaagtccaaaaatgcctatgctcaggattactccacaaacagtgatatctttggtcgtttgagagctacctccgaagactcttccaaagtggagcaatctatgtatgccagcactcgagattatggcaatgccttcaatagttcaatgattgccggtactgtagatcatgatacaaatgttggaataactcggacatctgcagattccacacctgttaattctgaaagacaggatccttttctgtcatctggttatccaactacatacactcgatcaaggccatcatttcttgatatgattggagtgcaaagagcccccctaacaactgaagcctcatatagggagcctgcaaaggctaatcaactatccagctattcaaattatcagagttcatttttgcagcaatcaaatcaacaatccactggaagtaatgctgcagatattccttttgcatcagaaagtcaggaatatagtcatgaaaaggggtcatatggcagctccactcctcctgatttcttacttcccaaagaagaaagaagtaaacaccatggtaatcaaacattccaaaacttcacaactcatgggaaggatgatgattttgcagcactagagcagctcattgaagatttgacaaaagagaagttttctttgcaacaaagtcttcagaaatctcaagaactagccgaaactttggcgacagataactctgcattaactgataagttcaaccaacaggcacatgtaatcagccagttgacatctgacatggagagattgcaggaagagattcaagctcaactgctggcgctggagtctatcaggaccgaatatgctaatgcacaactagaatgcagtgctgcagatgagagggcaaaagtacttgcagctgaagtcattctactagaagataagggtttgaggctgaggtcaagtgagctaaaacttgaaaaggaagttgaaggtttacattctgagatttcttcttacaggcgcaaagtttctagtctagaaaaggagcgtcagcatcttcaatctactgtcaaagctcttcaagaagaaaagaagctattgaggaacattcccgtgaatgagaaggcaacaactactgtagagaaaccttgggttgataaaagagacgcatcaactgcgacagaagatttagatattggggaaaacagctcttcagaaacgctaaccagcactgttgacacattggaagatgctggaatatctgttttgcgttccaacattatgtctgatttttcttccttagaagaggtctcatctagcattccagatgatcagcttagaatgattgacaacatcaattctttgatgtcagagttagtagtggagagagaagcgctgctgcgagcactgagaattgagtcatccaactgctccaagctgaaggagttgaataaggacctaacacaaaagctggagattcagacacagaggcttgaactattgacttctcaaaggatggctaacgagaatgccctggcaaaaccaattgacacacgctccatcaatgatgcaacaatgtatgcagatgaaggagatgaggttgttgaacgggtgcttggctggataatgaagctcttcccaggagggccaaagcggcgaaccagcaaacttctaagataatgtaattccctggagtatggtgcgggcggcagcctgttttggcaaggaaaagaatagtcgcaaagaatagacccttttgtatccattgaagtatggaacaatttctttcattatacgagtcgaa

SEQ ID NO: 29414 - DNA, 1796 bp, Zea Mays
agtgtcgccaaatgcggtgaactcgctaccgttcactattgtctcttacctcccgcgccgccgccttctgattcactcccacgctgctcggaagtcagaaccctcttgtgttgtcgcgtcgaccgagcatcaccgctccggcaattgttcctcgaggtatgatgtggggttcgatggtggcagcgactctgattagacggcgagggtgcggtcggaagcggtgagagggcgaggggcacaggatgggacgacttcgtgatgaatcgggcaagggtttcagcggtcgttgacctgcccccaggtttcttcaagctaatccagccaccagcccaccatcgctgccggtgccgttatcagcttatgcgacgaagcaattctggaaggccgagactacaacggaaagccgctctttgatggggtggctagcagacacgtactgatacgaaaacccttctccattctctttctgtttcagtaatatatttttattgaagaattagatggtaatttagttctttaatttggaaacttatgcaatttgttgtggtcaatttatctgcatccatttttgctttcttatctggcttctgaaaatatttcttaaaaaacttatgctggttcttgtggctactaatttatctaatattgaatttacacgttgaaatgaaatgcaatactctctctgatccaaattatattccaaatattgcctcacaaatgagtcatccaacaatgaacactgtaattggccaggagactgagaatgttatgaaaccatgttgcagttcatcacaactacctaagtcctttggttcatgtgacttgcggattaaacagacttatatatcttcaaggcaacataattcttcagttcacttgaataatatggcaatgtaattcattgagtttgcattgttaggtgaataaacgttttgctcaatctactccatgtcccaggctgttgcaagagcagcatcagaaaaaaagctttgccgctacttttgtccaacgaaatactccctccgttcttttttatttgtcgcgatttagttcaaaaataaactaacggacgacaaatattcgagaacagagatagtaacttctacgacttcggtacaattaccgacaaccaataaccacttgcacttggtcgaaaaatgacccaactagcaactccactgcacctagacatggctaacaactaaaacagctcagggcaccacactaccacagccctaaaaccaactagcaaaacaggtaaactctggcaacctatgtagcggaacttgaatttcatcatccttctgtaaagacgtttgaccattgaaatgaagcaatgttcagttacacttggatggaactaaatgacttgctaaactaaaaaacctccactgctaattaagtcatctgagtaaccatgtaactgactcgttaccatttgctaccatgtttccaaatggaaacctattagataaacaactagagtgctatcagctggagttgaaggaccttgggagatacattcaccgaagtaaatttgcatgctcaaaatcgtgaaagcttttttactagatattatcgttgggccatgtaatccaagtctaagatataacccctccacacaatttaacgtactctatgaatttgctatacacgtttataacatcataagaaaagcagtcgtcatacctgaaattcaatcagatagtataaccactaaagatattgacagatcagacttatacaaagttcccgctgtgcgacactagcaaatggggaagcctaatcatcagcct

SEQ ID NO: 29415 - DNA, 715 bp, Zea Mays
ccacaactggtaggccaatctcccccatgcaggcgcgcacaggagagggaaggctctcacgcgtgagaaactgagaatcgcctgcgggccgcgaatggcgagcgagcacggcttgagaatctgacgatggaggaagcttggatagtggaagggtatttttggagatcaatttgtagatgctggtggaagcgttttctttcctatactggccttctcgaaacctgtaggagttgctctaacaggctacttctgaatcggaggctgggttcgcagcggagcatgacaatttctggtccaaatgaagctgaacaagttaatacgactatagctacgaatggtttcagtgaggagcatagcacaagacaacactggtacaagagactataagcatgaatacgaagatggctacgtacggcaatggtggtgaaggctacgacgaaaggattgcggcgatattacggttgatgaatggcatgatgtataattttcttgatggacaaaaggatatatacacctccgatctgttttgtccattgagcagcaatctatgtaatcttatgcctaatgaacaggctaaggatgttttagacacaactactctagttggcacaatgttggattcggaagggaaacattgtaaaacgttggttgcttccttgtgtacatgttgcgcgcagcattatattatatgtctattgtttgtcatggtggcata

SEQ ID NO: 29416 - DNA, 260 bp, Zea Mays
gtgcgtctcacatgtttgccaaagaagaacatcacatataatgacaaagtgtatagagataaatgtcacaaacatcattattacatagcggaagtcttacaaaaataaatgagaacaataaagcgaactaagtattattccttggcgccataaagctgactgggagaggccacctagataagctcatactcctcattgtaggcctcctcctcctgggctacctgctcttcacctgtggggggtttatatatcgcaagagt

SEQ ID NO: 29417 - DNA, 2039 bp, Zea Mays
cgtgtctcgtgcccgtgcctgtgaacctctcacgtgccgtgccggaatctcgcagccatcgatcgatccagcagatgtgccagccgccgcggccgcgccaagcccaagccgagctgacgatcctgatgcggttgaaaatttccacgaacatatagatcctcatcgtcgaccccatccgtggtgctcccggtgcgccaggctaccagagtccgacgcagacgtagctcccggccacagcagagcccacgccttgagcccttgacgcgctccgtgtgagtggagcgtacgggcgccggccggcggccagagaggaaacggatctaggaggctcagctgagtcgaggagatggaccgcaaagatgtcgggatcctcgccatggacatctacttcccgccctcctgcgtgcagcaggaggcacttgaggcccatgatggggcgagcaaagggaagtacaccattgggcttgggcaagattgcatggccttttgcagcgaggtggaggatgtcatctcaatgagtttgacggttgtcaattctctgctgaaaaaatacaagattgatcccaagttaatcggtcgcttggaggttggaagtgaaacagttatagacaaaagtaaatccatcaaaacttggctgatgcagatctttgaggaaagtggtaacagtgacattgaaggtgttgactccagcaatgcatgttatggcgggacagcagccctactgaattgtgtgaattgggtcgaaagtaattcctgggatggccgttatggtcttgtcgtttgcacggatagcgcggtttatgccgaagggccagctcgtccaacaggaggtgctgctgctatagcaatgctcattggtcctaatgctccaatttccttcgagagcaaatatagagcttctcacatggctcatgtctatgatttctacaaacctgatcttgcaagtgaatatccggttgttgatggtaaactatcccaaacatgctacctaatggctctagactcatgctacagacagttctgcaacaagtatgagaagattgcgggtaaacaattctcaatttgtgatgcagaatattttgtgttccattctccatacaacaagctcgtgcagaagagtttcgctcgactttattacaatgactttttgcgcaactgcagctgttgatgatgatgctaaagagaagctccagtctttttcaaatttgactggtgaagagagctaccagagtcgcgacttggaaaaggcctcacaacaggtcgcgaagcacctccatgacatcaaagttcagccatcgactctgcttccgaaacaaattggtaacatgtatactgcatccctttatgctgcattagcatctgtgctatataacaagcatgatagtctgaatgggcaaagaattgtgatgttctcttacggcagtggtttgacatccactatgttttcattgaggctaaacaatggccagcatcccttcagcctatcaaacattgcttcagttcttgatgtcaccgagaagcttcagtcaagacatgagactttgcctgagaaattcgttgagacactgaagctgatggaacaccgatacggcgcaaaggacttcgagacgagcagagacacgagcctactgcagccgggcacattctacctcaccaaggtcgactccatgtaccggaggttctattcccagaagctgtccgaggaaacaggcggcgggaaaaccaagtgctgcaacggcctcgcaaatggccactagtggtcgcccagcactgttgctcatcattctcagtattttgataatgctcatggttagcgtttagtctagcgtgtttctgaaataatataattgttctttgaagctgtcccaccccacctagatcagctagttttttattttaatattttattcttctgaacattgaaattcatcagtctctacattgtttctctttgtttcttcttttagtactctcttcgttccaaattctaaattacgtacataatgtttgctatgtctaatagtaaaaaaaaagtcaac

SEQ ID NO: 29418 - DNA, 2874 bp, Zea Mays
cccgtcgtcctcgccagatgaccaccagagccaccgctcaatttcttgctttgctccatttaaacacttatatatattaaaaaaacgctagttgtggtctctgtgccacagtccagtccggagaagaggagaggagcctcgctctcgcaagagagactcgtggaagaccaccttgctgctggcgtaccagagcctgggggtggtctacggcgacctcagcatctctccgctgtacgtgtacaagagcaccttcgccgaggacatccagcattcggagacgaacgaggagatcttcggcgtgctctccttcgtcttctggacgctcaccctcatccctctcgtcaagtatgtctccgttgtcctgcgagctgacgacaatggcgagggaggaacgtttgccctctactctctgatttgcaggcacgccaatgtgagcctcctcccgaaccggcagatcgccgatgaggagctttccacctacaagctggaatgccctcctgaaatcaccgacaagtcccgcatcaaggtgtggcttgagcggcacaggaagctgcgcgtcgctctgctggtcatggttatgatcgggacatgcatggttatcggggacggtgttctcacgccagctatatccgtgttctcggcagtttcaggcctggagttctcgctgtccaaggatcaccgtgaatatgctgtcattccaataacctgtgtcatattagcattcctatttgccctccagcactatggtacgcaccgggttggatttctgttcgccccgatagttctagcctggctgttctgcatgagtgctcttggcctttataatatcatccactggaatcctcagatctaccaagctctaaatccgtcttacatgttcaagttcttaaaaaagactagaaaatatggatggatgtcacttggtggaatcttgctctgcatgacaggatcagaagcaatgtttgcagatcttggacatttctcatacagtgcaatccaggtaacttcttgacctgcatgagagttcgtataatatttctctgtcaaattattgtgcagatcacctaggtctacacttctggtgcagcttgctttcacttgtctagtttaccccgcactgattttggcatacatgggtcaagctgcttacttatcaaaacatcatgacttttactctagctcacaagttggattttacatcgcagttccagataagatcagatggccagtgcttatattggcaattttggcttcggtggtcggaagccaagcaatcatcagcggaacattctcaatcatcaaccagagcctgtccctgagctgcttccctcgagtgaaagttgtacacacatctgagaaaattcatggccaaatatacatccccgagatcaattggttgcttatgatcctctgcattgctgtgaccgttgggtttagagatacaaaacacatgggaaatgcatctggtttggctgtgatcacagtgatgctggtgaccacgttcctgacatccttggtcatcgttctctgctggcacaggccaccgctgctggcgttggctttcctcctgttctttggatccatcgaggcgctttacttctccgcgtccctgatcaagttcctggaaggcgcgtggctccccatcctcctggcgctcatcctgatggccgtcatgctcatctggcactacacgaccatcaagaagtacgagttcgacctgcacaacaaggtgaccctggagtggctcctcgccctcggggacaggctgggcatggtccgcgtccccggcatcggcctcgtgtacacagacctgacgtcgggcgtcccggccaacttctcccggttcgtgaccaacctcccggcgttccaccaggtgctggtgttcgtgtgcgtcaagtcggtgccagtgccgtacgtattcccggcggagcggtacctcatcgggcgtgtcggcccgccgggccaccgctcgtaccggtgcatcgtgcgctacggctaccgcgacgtgcaccaggacgtggactcgttcgagacggagctcgtggagaccctggccacgttcataacgctggacgcctcgtaccgctgcagcgaggccagcgagcgggagctggagctggatcccggggagcaggagcggcggctgaccgtgatcgcgagcaacccgctgcggcgccgcgccagctacgacctccaggacagcgtgcagcattcggcagcgtccaccgtggaggtgcgcgccacggccgccgacagccttagccccagggacgcggagatcagctcggcggcggggccgaagcaggtgcggttcttcatcgacagccacgtggtgagcccggaggccgcggagaacaagcaggttgcggatgagctggaggcgctggcggcggcccgggaggccggcactgcgttcatcctggggcactcgcacgtgcagtgcaagcccgggtcgtcggtgctcaagcggttggcggtggacgtcgggtacaacttcctgcggcgcaactgccgcggcccggacgtcgcgctgcgcgtgccgccggcgtcactgctggaggtcggcatggtgtacgtgctttgattgaggctgagacgatgcgactttttcttatgaacatctgatatagtaatcacgactgttgtcagttttcccagtaacataatgaggccgttctgtatagcttagcttgttcgtacttctacagctgcaatatatagagtcaaaatactgtagaattagtaggagtcggtaacgaactctgtgtgcacgtctgtgcgtgagcgtgtgcgtttcaggcccagtttggttttgcttttggacagcatcagtctgtgcgttttaggcccagtttggttttgcttttggacagc

SEQ ID NO: 29419 - DNA, 4104 bp, Zea Mays
atgtggcagcgtgatgcgccgcaagaagcttccacgaagcttcatggccgctaccgcctcgagaacaagtccccattcccgaccgcaaaagcgggccgagccgaggaagaagagaacaaaacgaaacccgaagctttttcccccattcttcgctggatatacaggaggattttcagagtcagggaggtgagggagagagggcgaggcaactgtgtgtgtgtgtgtgtgtgtgagcaggcccgccgagaagaaccttcgcgacgccgaggtgagccgcgactgggttcccgccggccccacctggcgtccccagcgatctcgtggtgacgtctgtgtggcgcgcaggggtcggtcgcgcgcgggcgctcgtcggtcggtcggtcggtcggtgtcgtctctcctgcgaaggtgcccctggctgctgctgccggggtggtctgatcgggcatggcgcaggggagttcgccgccgccgccggagatccgctcgccggacgagcgggccgcggcggaggaccccgccgaggcggaggcgggggaggtggtcttcgacgacgcgttcgacataccccataagaacgctccgcacgaccggttgcgccggtggaggcaagctgctcttgttcttaatgcttcacgacgttttagatatactcttgaccttaaaaaggaggaagagaaagagattataaggaggaagatccggtcccatgcgcaagttatacgggcagcatttcttttcaaagaagctgggcaaaaagatatcagagttttccaattgaactggaaaagcttaacacattaaacagggaccatgacagtgttcttcttcaagaaattggaggagttaagggattgtcagatttgttgaagagtaatttagagaagggagttagtccaaatgaggatgaattattacaaaggaagaatgtatatggatcaaatacatatccacgcaagaagagaaaaaacatactgcgttttgtatttgaagcttgccaagatttaactcttgtcattctgatgatagctgctgccatatcactaacattgggtatgactacagagggtgttgatgaaggatggtatgatggcggaagtatctttttagccgtttttcttgtgatacttgttactgcaacaagtgattataggcaatctctacagtttcgacatctgaatgaggagaaacagaacatacaagtggaggttgttagaggtggtaaaagatttggagcttcaatctttgaccttgttgttggtgatgtagttcctctcaaaattggtgatcaagttcctgctgatggtgtcctgatatctggccattctcttgcaatagatgaatcaagtatgactggagagtcaaaagttgtccacaaggatcaaaaggcaccattcttgatgtctggttgcaaggttgcagatggctatggttctatgttggggtgggtacaaatactgaatggggtcagttgatggctaacctttcagaagataatggtgaagaaacaccattacaggttcgcttgaatggtgttgcaacttttattggtttggtgggcttgtctgttgctggtgcagtacttgttgtgctttggataaggtattttactggacataccgaaaatcctgatgggacacctcaatttgttgctggaactactggtgtgaagcaaggatttatgggggcaattagaattttgactatcgctgtgaccattgtagttgttgctgtgcctgagggactcccattggcagtaacactgacgcttgcatattccatgaaaaagatgatgcgagacaaagctctggtgaggcggctctcgtcatgtgaaacaatgggatcagctactacaatatgcagtgataagacaggaacccttacattgaataagatgacagtcgtggaagcatattttgctggaacaaagttggatccatgtgatgatgttagccagatgtcagacagtgcagcgtcacttattattgaaggaattgcgcagaacacaacaggaactgtatttctgccagaggatgggggagcagctgaacttactggttcgcctactgaaaaggccattctttcttggggccttaagatagggatggatttcgacgatgtgaggacaaaatcttcagttattcatgtttttccatttaactcggagaagaaacgtggcgctgttgcagtacagttagatgatggtgttcacatccactggaaaggtgcagctgaaatagtgttatcatcttgcaaaagctggctttccgtcgatggctctgttcagtcaatgagtgctgagaagcacgatgaattcaagagatcaatcgaagacatgggagcgaattcattacgctgtgttgcttttgcatactgttcctttgacattgaaaagatcccaatggaagacataacaagctgggagttgcctgaggatgacctgactctgcttggcatcataggaataaaggacccctgtcgcccaggtgtaagggatgctgtacgcctgtgcactactgctggtgttaaggtgcgcatggttacaggagataatattgaaacagctaaagctatagctctggagtgtggaatactagatgcaaatagtgttatttcagagccagttgtaatcgagggaaaagtgttccgtgagatgtctgaaagtgcaagaggagaggccgccgacaagataattgtgatggggagatcctcgccaaatgataaacttttgcttgtccaagctttaaaacgaaaaggccatgttgtagctgttactggtgatggcacaaatgatgcccctgcattgcacgaggccgatataggtctttcaatgggcatttccgggacagaagttgctaaagaaagctctgacattataatcttggatgatgacttcacgtcagttgtcaaggttgttcgttggggacgatctgtctacgctaatatccagaaattcattcagttccagctcaccgtcaatgttgctgcacttgtcattaatgtggttgctgctgtgtcctctggtgatgtgcccctaaatgctgttgagcttctgtgggtgaacctcataatggacacacttggagctcttgcattagcaaccgagcctccaacagacaaccttatgaagagaaatcctgttggtcgaagggaacctcttgttacaaatatcatgtggagaaacttgtttgttcaggccctttaccaagtagcaattcttctgattttcgattttgatggagtaaggattctgcgtctgcagaatgaaagccgatctgatgctgagaagataacaaatactttcatcttcaacacatttgtattttgccagatcttcaatgagttcaatgcacgaaaacccgaggaaaagaatgtcttcaaaggggtcacgaagaatcacctgttcatgggaataatcggtataacgacagtatttcagatactgataattcagttcctggggaagttcttcaaaatagtgaggcttggttggagactatggttggtttcagttgctatcggccttgtgagttggcccctggcttatgtgggtaaatttattcctgtgcccgtaagacctcttccggactatttcaaaccccgctgttgttggaaaccgccgcgccgagacgaggaggaaggtgggcagagctaaagcgcaacgagtgggcagtgtaaataggcacgtgataaaaaaatggagataaattgcactggttgattccatggtagcagcatcctggggatgtacgcataagatggcaggtagtcggcctcgtcgttttcttctaggagaagcagtcggaagaaaagaagtactatacagaagccaaacttgtctacccctatccagctggtgtgtctgctatgcggcagcgaaacttgagtcattagattgtagcctgaatgaaagcagcgctagcttgcgatgtagcagtacctttttttccctggcgatatcatctgactgtaaatttgtaaatgctttcggactacgagttgttcttatttttcatccacctcttctctacggaacgtttttttctatataagaaaataaagtcaacagagcagttctaaaacgactgttttttttttcctgaa

SEQ ID NO: 29420 - DNA, 890 bp, Zea Mays
taccagcttctctggtctcttcagggcagtgatattcatccatacatttgttcacacactgaagatcctttttttaaaatgaaacatccgaatttcgcatgaattgaactttgttagtcgttaggagaggactgttgggaggaaaaaatacttacggtttacgccactttacggaaaagtaaatctatcgtactggaaaaagaacatgtaaatacacgatactgaggcttcttaaatttcaagaaaatctaggtagccaggtccactgcccaatcagatcccttctcctgtacaaaaacaggaacatgatttacttttagtttatgcgcgtatgcatctgaagctttgcccttctttagctggccttctgacaactgaagattctggtgagaaataaagagagattttcttcgatgcccttccaggtgtagaataaacaaaccaactgattccctgaccaatctgggtccagaactgtttcgttgatcagcaatatcaattttttttcttctgttggatggccatgtcaccaggaatgaattgaccatgttgtcaagaacttttatatgcaatgttaatcttgtgctatctgtgattaggcggcaaatggactgcctgcttaaggttctgatcgacacaatgatctgaaactgatcacaaacaaagcccgactctgacagaaatatcggcagacaaaaaaaaacggattggtaccatttctgaccttccaatgacctgttctctggggctattttaatgcctgaaatgcgtctcttctggttgatgctgtgtggggttcctgccacgaaaacattttagtagaatagaatgttaagctgaccttttggaacatcttaaaattgcagtcaaggctcagaagtagaatggca

SEQ ID NO: 29421 - DNA, 351 bp, Zea Mays
caccccctttttctcccccttggctggacgccccctccccctatggcagccatcctccattgcttcctcccccaagatctccccctacgcagcaaggatcgagaaaaggaggggcacgttgaattgaagaggaagagaggatcaaggagatgttcttccccatctcctcttgaagatttattggggaaaccctaggtatggatgagatccttgttcctccctgtaattataggcttttggaggttgtggatcatgggaattaaaggattagaggttggatttgatgtggggttaggttttgatctcgaatttagttttctgcagaatggcagattcgatagtttctgttca

SEQ ID NO: 29422 - DNA, 648 bp, Zea Mays
tagcgcccattaccgggcaccagggaggtgggatgagagtgaaagagtcgtcgcatggatccggccgccgaccccctacgttctttcgccgtcctcgggctggcggcaaccactgccgcagccaactccggcttcgcggactccaacccgatccgtcctgtcaccgtccgcgcggcctctgcgctcttccaccgtcttcgtcgcgctcggccgcacccgcgacgcgcttcgattcgccatcctcgatacacctggtgcaggcctgggtgttgcgacttgccgctggggggttctcgtggattcactagcaaggttaccctcggatgctcgcccaatttctcatcagagcttcaactccgtcgtgtgccgcaccgtgccgtatgaggctctttggacttgtgtctgcatctgggtcatgcaggcgtctcgatcggtgatgctccgccgtggggaagtcatcagcgccgccgtacttgctgccgagaagaaggtgggatggggggaattatcttgggccattggatccgtgttgtgcgcaccggattagatctagggataaccaaagcatgagccgttggatcgagatcgcacgcgttagaacggatcgcggcacatcaaaatctggaccgtccggatcagatcaagcgg

SEQ ID NO: 29423 - DNA, 2319 bp, Zea Mays
aatgtgttttccacgtctccagatcgacaatctgagcctagaaaattctagatcggtgggggaaggaaactatccccacgcgcagactcatcaaacaggccaatgacatcataaaagttatgagcctcgaacacaaaaaaaaaatagcgcgtccgtgaagccccagcgcctagccatctcatcggaccccaaaataggcgccgcccgcccaggccatgggaccccaccgcccccgtctctcaattcaatcaatcccgggccgcccgtccgccgcggctaccactcgcccctcctcgtcaccagcggcggcaccatctgctccgccaccgcgttcacgcgctcccgtcgctgtcggccccgctcctctatttatataccgccccatcccagctccacgctttccctaggcaggcgcgcatccagctcctgccttgcttcctctcctcccggttcccgaataaaatttcctggacccggagcgcgcagcgcgctcccccgcctcccaaggaaacttatctaagcattccggcggtcgatccatcttcccgtccagggagagcaaggaataatcaatcaaccggccagtgaaacgttaggaggaggaggagagccggagtccgtccagcgcggcgcgggttgatcccttgcgtctccgcccctgccccgcgccggcgacacctttttgcggtgctagcgttgcgtcgaggagggacaggcgctctgcgtccttcgcacggcaacggcaagacggcggcgttgaagatgcgggtgttggaggaggacctcttcccctccaccccaggcaaggtgaagatcgagcgggcgggcgccatgaaccggcagctccaccgctgcttcgcgtccaccagcaccatgttcctgtgggcgctgttcctcgtcgccatgacggcgtcctacctcagcttccagtccttcgtcggcacccactgctccctcgcgctccgcaagcgcggcgacggcgtcgtcggcgtcgacaacttcaacgcctactacgacccgtcgctcaagaaggcgcgcagggcgctgctggcctcccacggggtgttcatcgtcgagggcgacatcaacgacggccgcctcctggccaagctcttcgacgtcgtgccattcacccacgtgctccacctcgctgcgcaggccggcgtgcgctacgccatgcagaacccggcgtcgtacgtgcactccaacatcgcggggctcgtcacgctcctcgaggcctgcaaggacgccgacccgcaaccggccatcgtctgggcctcctcctcctccgtctacggcctcaacgacaaggtccccttctccgagcgcgaccgcaccgaccagccggcctcgctctacgcggccaccaagaaggccggcgaggagatcacgcacacgggaaacccatcacggtgtaccgcggcaaggaccgcgtcgacctggcccgcgacttcacctacatcgacgacattgtcaagggctgcctcggctccctggacacggccggcaagagcaccggcaccggcggcaagaagcgcgggccggcgccctacaggatcttcaacctcggcaacaccgcgcccgtcacggtgcctaacctggtgtccatcctggagaagcacctccgcgtcaaggccaagaagaacgtggtcgagatgcccggcaatggcgacgtgcccttcacccacgccaacatcaccctcgccaggcagcagctcgggtacaagcccaccaccaacctcgatgtcggcctcaagaagttcgtcaagtggtaccagtcctactacggctacaccaggggatccaagaactcgcgacaatgatccatgctaattcttccttcttcctttctcgctttggcccggccgcggccacccactctcggatcaaacattgacattcttatcaggatttttttggtggaaatatgttatgttagggtgttcctttattaagtagagaaataccggggacaaattctttgcttggtgaggagatgggaggagagtgctggaggaagaaaagcaatcgagggctggaggaagaaaagcaatggggagcaacctttactttttctcttttctcctcctgtatctttcttctctctgtgtaaattggtcggcgctctacaggatcttaatccttttccgctccgttaatccttttccggattccgatgtgctgaccctaatcaaactgtggtagtcaagtcagattatccccagttcaaattgaattccagagtaacagccggactgccggagacgagagagaagaaatcggctggccggtcgtggcagtcctgtaaatagaccgcgg

SEQ ID NO: 29424 - DNA, 2133 bp, Zea Mays
ttttgtttgctgacagttccgtacgagttcaaaccaattttctaggtgccaaatggaaagcgtagtccaaccaaagtggaaagtgtgaccgggatccccatccgttccagcccccccagaacccagagctccaaacctaggccggagccgcggtgcaagcagctacgtggattggacttggacgtctggctctggaggtcccaagttcccaacgcttgctggagttgagatctggtgggcttccggaggagacgccgacggtttgcgaggtttgctggctccgtggcgtcgcggaaggtcatggagcaccgcgccttcgactgcagcgggagtgatgatgatctccctccaacatatcaaattagagtaccgagaatgcatttcagtgggaacagaaggcaattagcaggcccattttctcagccaagaccacacaacaagttggatagcgatatacatcagattgagcaacaggcatatactggtgttcttagagcattcaaaatgcaatcggatgccctgacatgggaaaaagaaagtctaattactgaactaagaagagagttgaaagtctctgatgtggaacacaggatgctattaaacatggtcaatgaagaggaggctatccatagaataaggcagtcaaggcagggatgtggaatgcaatctagcttgccttataatagcgtagttgatcacaaccttggacctatcaagcggcagaagaaatcacatcccatctattcactccctgtggatccccattcacccagcatgcctttgaaagcattggtggacaacaagatatatacagtaggtttggagtattcctgatcctgctttttgttcaccatcaagagtgtgcttatagttcttaatagttgacctcctgtcaagcgcgaaaaacatgccagttgcaaacaaattatgttcaagtggcacacgcacatacacaaattgaaccaagatgaaaaattaatcttttgaaaaataggcaagccaggaaaggtaatatgaaagcatgttgtggcatcctttttcattggcgatgttttgttgacgaggagccagaattctctagcgtctgatattttgcttgatcaattacatttttagtgaatgcttgatcaagcattgccctaacctagcgtctgatattttgcttaatgagttgggttcaacgcccattttattgtttcaaaatcttaatcatcattgaacactcatgtgtagttagtgtagcatgctttgtgtcgcactggcagttaaaaagttccccaccccccaccgcaccccgacagctggcacctgaaaacataagacggggatctgcctatcaaacccttccacatcagggtggttggctggcatctgatggtgctacgaaaggtatggatgggagaagcggaaggtatcacacgaacgagtattatgcttcacataatgacatggggcttttgaacttcaatcgtactgacatacctgatactgaaactcttgtgaaaaaggtggagagggtattatcccggccagatgtgtatgcaattgaaagggcaaaggaactgcttataggccaagagcagtcattgcttgatgcaattgccaaacttgatgaagcatctgaccatgaaagcgatgatacactcgttgggagctggatacacgccgccattgggtgacgcgggcagcacgcctctgacagggggcgatgctttggagttcagacctctggcagcaggcggagaggcaacgatatgtgaaatagtgctgtgtaagtaaaacgctacctgttgttagtccggtaggttaggttcttttggcagccaggcaaatctgtgtatgcaccatgcagtgtgatgggaatatatgtcttgagcaccatcacatgtgatgtgatgctgtctcgtttcatcttcaacgtgagtaagcccgactcctggaaatatgggtcgggtcactagttgtagtattgtagattcattgcccttccccaagttgcacaacttggaaatatgggtcggtttcactagttgtagtcttgtagattcattgcccttctccaagttgcacaactgctaatatcttaggatgtcccttgaaatggtatgctatttaaactttaccagagttcac

SEQ ID NO: 29425 - DNA, 1068 bp, Zea Mays
gtaattcctttctggttatacgtggcctgttgaagttgaacaatcaattcttgaggacctacgaaaccgtgcacaactgaatagtgtggcattgccatctgttagcttctacacattccttaatacacataatggattaaactgttcctcaatatcacatgatggatcactggttgttggtgggttttctgattcgtcagtgaaggtctgggatatgtcaaagatgggccagccagcaaaaatatcaagatcacagggtgagaatgggccttcccagggtgagcgcatatcaacattagatgaggggaaacgaacctatacactatttcaaggccattctggaccagtttattctgcggcctttagcccgtttggggatttcctcttgtcatcatcttcagactcgacaattagactatggagcaccaagctgaatgctaatcttgtctgttacaaaggacacaactacccggtttgggatgtccaattcagtccagttggccattactttgctagtgcttcgcacgacaggactgctagaatttggtcaatggataaaatccagcctttgcgaataatggctgggcatctttctgatgttgattgtgtccagtggcatgtaaactgtaactacattgccactggctctagcgacaaaactgtaaggctatgggatgttcagacgggtgaatgcatacggatgtttattggtcataggagtatggttttatcactggcaatgtcacctgatggacgatacatggcctccggagatgaagatggaacaatcatgatatgggatctctcgactggccgttgtgtttcaccactactaggacacagctcttgtgtgtggacacttgctttcagatttgaagatcatgtaatttgatctcatgaaatgatgtcttaaaactggtggtatcacagattctgatgtgtactagaatacatgagtctgagcattaggtaaaagggcaacgttgctatgtccttgcgtgctttatttttttagttgatcaaagttgatgcttttcctatgagctcttttaaagtttaaattaaaca

SEQ ID NO: 29426 - DNA, 2859 bp, Zea Mays
ctgaaatgaaaatgaactatatatgttagtgtcaatacaatgtttacagctcccatttctgagtcgtaattcaacatgcaggagtagtgaaagatttgaaacttaccagtataccgacaatatgatcaattttgaccaagagactaccaacattgtggtattaataattgtcactatactagatatgaacaaatttacaacaataatatgcaatatccatacaccataacaaaagaatatgacaaaactaaattgctgcaaatatttccaacttctctgagaaactgatgaaactatttgatgccaagatgccaacttgccttcagatcataggaagggcttctacagttcagatcataggaatggcttctactgacattgccgagagctcagttgacacttgacacagtgcgtcgggtgtacataaagacagccaatgaccacatggtgaagccggagcaccaggacgaggcggtgattcgactgtggctgccgagcaaggtggtggtaatggacacttgaccacagccctttctcctccacgccggagcgagctgatcctcaagtcattgtgatctgtaagcgatggtgtatcgtagtcccgttggaggttccacctgttctgttctttcagtggtgctatatgtaagccaatcaagttatcattcatctatcaatataaaaaaaaggaggaaaaaccatgaggtgagaaggctaaatatataccactctcagtcacacacaaggaaagaaaggaggaaaactagctggtccacacactatatcccgatcatctaccatattaggcaactctgcatgccagaaatgcaggctcctccagtcctgagaccctctatttacaataggaatcaccggaagccttgtcggtttgacataatttggattgtccacgaaaatgcagctcccctgcctcatgcccatcaaatcgttaaacttgttagatcggtaggcagagagaggccagactgatgggaatggcagcgaaggagcactttgtgcttgttcatggtgaagggcatggagcctggtgctggttcaagctccgctggctccttgagggtgctggctaccatgttacatgcattgacctagccggaggcggcgtcgatcctactgaccccaacacaatccggtcgttccagcagtacgacaagccactcatagacctcatttcaaccttgccggagggggagaaggtacgtgtattcttccttttttgccaacacatttaatataagtggtaattaggtaatatgttggcataatctataatatcattactacgggttgcaatgtaaatgaccagaagccaaatgtttcatgccattttgaataaaaggtgtattagattgcacaaaagtaggtgcaacctattttaaataaatcttaaaacatgtgcttaagtctgctagatgtatctatcttcttgtatttccccattgtataattggtttactgtatattttccctcctgtaccggtgtatatatatatcggccttagtgtctcataatgaatgcaaatgctattcataacaaagtcatgatccttgacattttatctaggataacacctgaaaaataccttatacctgtgttctacaagaaaaagttggaaattatgtgaccccagcaaacgtacataaggaagtcaaggatctatttaagaataatgttgaaaattgatgaccatgcatgctaacccatttcagtcctattctaggtgattctaatcggacatggtgctggagggctgagtgtgattcatgcaatgcacgaatttgttgacagaatcagccaagcattttttgtggcagctacaatgctaccatttggatttcaagctgatgaagataagaaagatgggttaccaactttgcctgagaacgagattgagttgacacttggtgcgggagcagatgatcctccaacaaccatttccttgaggccagaattccagcgtgatcgactatcacaacaaagccctgaagagctatcagtacagcaagcttcgaaggagatgatgaaagattgaaccgaatcaaacgaattttcataaagatgcagcgtgaccacatgctggatcctcaacagcaagattccatgatcaagaagtggccacccagcgaggttttggccatagatacagatcacagtcccttcttctctgcaccagaacagctgtttaatttaatagtcaaatctctatgatgcataaatgcagaaagctacagactggggttgcccggattcttgtaacactacccacaaacaataatcaccacaagatttacgacctcagatttgtcaaacatgcttctcagtgattcttcaagtcatatctgcaaatgtggtttaatgatgcaagactgcaagtaaaacatcgcttagcgcaaacacttaccttcagttttttgaacaattcactaaagtcagagccttataatttccattccaaaagttcttacatgtctggataaaaatatgtaaaatatagatgctactttggaagcacttttaactgcaccggtgatggataagaatatgtagttttggccactcgttgttaatctaactgatacgtttaaagagttattatttttctcttttgagtaattcaagagttcttgttttcatcaaatataaaggaagcaaacttctgacaccctaaaagttctcagataatgaacaatagaattttcacttcaaatagtttcataatatacaatcgcctcatgacgtgtaaaggatcatacaccgtttatacgtgacaaagaaattattacttcatttgtataaggatattgttggaatgcaattcggtaagggcatggcagagg

SEQ ID NO: 29427 - DNA, 3006 bp, Zea Mays
cagaaggtcacaagtgttgtagtgatcctcgcccgcgcgcttcgcacgtccccgccgtcgcgctcgcctccctcctctttgttgcctccgcgtcgacctccaccccgctctccgacgcgcttaccgtcgtctcggatttctggtgcactctcttctctacgacgcgagcaagggcggcgcttgccatggcatcgacgggaaccaggaggggagctgtttgagcggatgcccaccaggaacaatgtttcctagatcacgatgtttgggccacttttggaagaggtcagggatgacatgttttcaagcttggaggacatcaccaacgcaccatatgcagatctgctctctattaattcaatgaggaaaggaaaggggtcatagaaattagtcttggcagatggaggggaacgtctcaatgactgaggcacattttttcttgttagttagctcatggatttttatggtccaagaggagttgctgctatatgaatatgacaacacccattaatcaacataactatatgaatacaatctgaaaggaaggtcggtttggtcagaaacacatggaggtactgatggaggctatgaaacatataagagacatgccagtgaggagcaggagtagtttagtcggttcttgctttatgaagtggatgcaattagaaagacgtacgagcaggccaacatctcgcggtggctcgccctgggcaaccggacctgcccgaccacgatgcaggagctctgggacgacgccctcacccccaacgccactctctgacagctcatcgtcacctggttctcccgcctggttctgcattttgttttcttatctgtcaatcatgtttttccatattactgcaggcgggtctgattaattatttaaatgtagtttatcttagatactgtttgaacgtatgggatgttggaggacagaagacaatcatgtcttactggagaaaattctttgagcagactaatgggttagtttggtttgctgatagttcacacataaggaggcttgatgattgccgtgctgaactccacaatctcttgaaagaagagagactagttggagcttcattgttgatttttgcaaataagcaagacatgcaaggagctctaaaaccaactggaatcgcgaagagtcactctccgacagctcatcgccgcttggttctcccgccggtacacaaggtttaagaagcgctccgcggacttccacggccgcgctgccgatctcgtccacagcctccggggcacggcgatgcccaggagacaggccctcgaggaagagcaatgtagagaagagaaaggtatctcgactgttccaaagcacaagtatgcatccaaagcctgttccccaaaaggtgcgtgaactttgttcttgattttgtcagactaaatgtgggtgaactttgtactgcagtttttgtttaaataaactttggactgtttaaattactgatgcatccaaccactgtttttctttactgtttgttgatacacgaccagatgcccagttgagttcacccaaaaggtttattacaccacgaaaaaatctgagatgaaatgatttttatttaaatgaactttgtactgcagtatttacagacatattttggcacccgatcgattactgtttttgttttactaatagctgctgctattactatcttttgggtgaagtgaatcagatttttgtttaaatgaactttgtactgtttaaattattgatgcatagttttgaagacttaaacaatatgctgcatgaaaatctttactttattcacaacacacctgagatggactgggcttgggcagctaaccggttaattgagaaggatgaggcataaactccagacgatgctcctttaaattatttgccgcagaagaggctaattttgacaagccagttgatccagcaacttctccctgctataccagcgaccattttgagaggacaagctgtgtctacttacggaagtgcgacatacactctatcaatgttgacactaagggatgcatgcagcatggtagcatcattatcatcatcatataactcttgctcacctgtggaggatgaaaataacccatctgaacaaacaagtgctaagaaaatggaagacagagtatcaaaggttgtggaagtcttcgctggaagaatccagaagatggaaaatgactttataagtttgaacaagagggcctcgactaatcggacgactggacgattagtcgacctaatcgggtcggatgccctggtcgttccactaaaaccgactagaccgactaatcgcgattaatcgcgattagtcggacgacttgaaatcattgatcagtgattccctcacggttgtgtccttcacaaaggaaggatgtgaagccacactattatcaagcaacaaagccaaagttgtgtgacacaattataacaaaggaatcatcacccattagcacactaaaattggcgcatacagataacgcacctgcaaagtgggatcatttgaacatagttcagcaaagggccgacgcacttgagtcactcctcaagctctacgcaaagcttctggaggagaggctcgatgagctcgccgacgtttttcgaccatttggtgagagagctgtgtcatccggagagatgagcatacaatgatgtctgaccataagcctgatgactccaccgaagttttgagagtccccaacaatgcttttgtagcagcgattcgtttcaacatttttttgtttttcaaataccatttcgagagtgtaaataacttcaacggaattcaaaattgatgtacttaggtaggcctgagccctgtttatttttgatgtatatggtttgcatgtcaccaactgttgtgagcgatgattgattatttatcgtcttgttttatctgtctgtactcctttaatgcagcaccttcgtttgtcatgtgtcgtctcccctgtaagatgttgattaatattcattatatcattgtttattttttagcaatgaaaaag

SEQ ID NO: 29428 - DNA, 2926 bp, Zea Mays
gcgtatgtgttggaaatgctcagctgctagtttttcctggtagatcatcaagtcttgagagcagttaaaacaaaccaatttttcctgcaagagctctacgtgctatggagacagcaaatacattttcctttggttcacttcaattttgacggagtgcttgaagatggctttgttgccgtcaagaagttatactcgtatattgcaattgaagacgaaccatttcatcgtgaggttgattgtctaatgaatattaggcaccacaacatagtcttgtttgttggttactgtgctgaaacacaggaagtggttgtgcgtcaagaagggaaacatatttttgcggaaaaacgagaaagattactttgcttcgagtatttgcataatggaagccttcacaagcatctgacagccgaaccatgtgggcttccatggcacatttgttaccaaataataaaagggatttgcctgggcttgcactacctacatgacaagaacataattcatctagatctgaaaccggacaatatattgcttgatgatgacatggtgcccaaaatcacggacttcggtttgtcaagactcttgggtaatggaaaaagccacaccattacacaaacaagaataggaacatggggttacatggcacccgagtacttggatgatggagtgatcacaatgaagacagacatctatagcttgggtgtgataatcagacacatggtgaagggacgtaactcggcagacaccactgatgaagaagtactggcaaactggttgattaggctggaaaaggatccatcacagatgatgaggcagcagacgacccgattattatttgaaacagagtacaaagagcaaataaaagcgtgcatggatatatcatggaggtgcacgctgcgtaaaccaatggacaggccaacgacgcagcacatcctacttacactggaggaaacagaagcaaagatcaaatcggtcgttgggcctactccaccaaatgccgggcagcttcagattgccaaatttgggccgtggggtggagatggagggaagacgcgagacataagaatgacgccttgccatttgcatagcgtaacaattagcagtggaactattatcgattctatcgggttttcattcactgatcactatggtcagcaccacacaacagggccttggggcggtaaggagggtacgaataagattgaactaggcccttcggagtttcttacaggagtatctggaacaagcggcccattcaaaaatctaacaaatgttgtaacgtcacttacgtttgtcaccaatactcgtagttacggaccctttggaaaagggcgaggaacaccgttccacatccaaacgcagaacaacggcaggatcgttggcttctttggccgttctggccagtatctctatgcgattggggtctacacgaaccaagatgctagggtcgcaaggatcgggcgacctttgggtggagatgaaggggttcttcatggcatcacagacctcagtgggcagcagcgcagcagaggtggaggtccatcgggagaatgtggagacagcgacgacgagcccaacggtgatttcgccaaattcggcccgtggggcggcgacggaggacagccgcaggacatcggaacactaccctgccgtctagacaggatcaagatcagcagtgggcttatcatcgactcgatcgagttctcgtacgctggccctgacagccagtaccgcaccgcaggcccttggggtggtcatggaggagacaacagctcttttcagctagctggttcagagttccttacaggtgtgtctgggtcaatcggcacattcaacggccatgcaaacgtcataacgtctctgacgttcgtcaccaacgctcgtagctacgggccgtttggaagagggcgaggcacatccttccacatcccagtgcagggcaatggctgcatcgtcggtttctttgggcgctccggacggtacctcaacgcgatcggtgtctacacggcgccgaaacccgaaccaaaagcaggtggtgatgaggccgtcgtcgccaggattgggccttggggcggggttggaaatgctctccatgacatcgcagagaggccgcatcgcctgcacagagtgacgatcttcagcgggacgatcgtaaactcgctggagtatctgtacagcgatggcgacgggcagcagcacaccaccggtccgtggggcggctgcggaggaactggtcgaaagattcatcttgcccctgaagagttcatagtggaagttactgggacattccatccatgcgcgtgggacagaacaatacccagtgtcgtgtcctctctgacgctcgtgaccagcacgggcaaaacacacgggcctttcggaacgcagctgggagccgcgttccaggttccggtgcagagcgacagcaggatcgttggcttcttcgcccacggagacaattacatcgaagcaattggcgcctacgtgaagaaattgacagaatccagcaaccgttaactcttggaacaacttgcagctgttcacactgtttcttgggccattgctccttaaatttagtccagatggccaaggagcaaccaaacagaaatcgctatggcagggaagatggactaaactggactgtggcacctccagcatagcctgctcttagattagtgaccagacatcatcgagatatttcgatattataataaatgaggaacccatctcagatgtttatgttagctcctcagtttttgcttctgaatgattaatttagatcttccttatttttgcaataaatgaggattcttttctgtctcttctgaatggatacgaatcatgcatcacgtatcagtgcacctattgcagtgaggagatgaggacaaggtgctgacgaacttattgtcctgagctcccacttgagtttctg

SEQ ID NO: 29429 - DNA, 2166 bp, Zea Mays
ctgtgtgagactattgttttcgagattgctagcgaaaagcatctcaatccctgaatcgcacacccagccagaacgaacgccagaaggcccagaaccgctacctcctccaatacactttcgtggctccgccgcagcacgaaaccctagcttctgcatctccgccccctccacctcccctccgcgaagcaggcgagatgtcgtcgggcggcggtggggggcagcagttccgctacacgcagacgccgtccaaggtgctgcacctgcggaaccttccgtgggagtgcgcggaagaggagctcgttgagctctgcaagcccttcggccgcatcatcaacacaaagagcggcgtcggcgccaaccgcaaccaggccttcgtcgagttcactgacgttaatcaggcaatctcgatggtttcttactttgcatcatcttcagaaccagcacaaatacgaggcaagactgtttacattcagtattcaaacaggcaagaaataattaacaacaagagtcctggagagactgctggaaatgtcttgcttgttactatagagggtgttcaagctagtgacgtcaccattgatgtgatccatatgcaggcccatgttaactggagaaaatgtcgttatcaacacctgcaatgggagagataccatgtttgttttgccgcctctgtcttctaactagtacattcaaagttcttatgaactcttatgtctcatcttgaggatgcaactttctaagtatcccccatcaacgcgcttatctccggtgtagggcacctcctgtttattcaagttattcatgaaaggttttctcggcctttgggtatgttcataaaatagccacctttgaaaaggctgcaggttttcaggcattgatccagtacactgatgcagatactgcttcagctgctagagaagccttagatggaaggagcatcccaagttacttgcttccagagcacgtgacatcctgctgcctgcggatttctttttctgcacataaggatttaaacatcaagtttcagtcaaaccgcagcagggattataataatccatatcttccaattaattattctgccatggatggtacattgcagcctgctgttggatctgacggaaggaaagtggaggctcaaggcaatgttcttcttgcatcaattgagaatatgcaatatgctgtttctgtagacgtgcttcatactgtgttctcatcatttggtacagtccagaaaattgctatttttgagaagaatgggggaacacaagctttgattcagtaccctgatgtaaatactgccgctgtagcgaaggaagcattggaagggcattgcatctacgatggcggctactgtaagcttcacctgtcatactcccgtcatactgatctgaatgtgaaggcacatggtgacaagagcagagattatacaattccagctggcgtaatccaaggggcgccacaaccacctggtatacaagccacgtcccctgggtggcaaggtaaccttcaagcagcagggccatatgccccacccggtgcccctcctcaaaatcacagtgccaatggacaagtgccgaactggactcctggcaattcagggtattccccagccccaggaacatatccaggccagatgtactcatctccggcacagtatgtagcatcagggagcttccttaatacctcagcggccactccgcctcagtatgcaacctcagggggcttccctaataccccatccaccgctccgtcacagtatgcagcatcaaggggcttccctaacaccacacctgccgcccctcctggtgctccatcacaaacgccgcacgcttcccagcagatgccgcatcagcatggaaatcattcaggaggaggcacgcccggaactagccaaccgccactgccagcatcatattaccgttaagttggatcttcttttgctattgtacttgacctgtgttttgaactgagtaatcatgtaatactgcaataacctgcggtctgtaactgtgtttagatgtgatagcagatggatacgagtgaggaatacatgaatatgtttggggttttcattcattttaaaaaacggatcagtgttggctcatggcgattactggcaagatcatgattgatgttggattggtggtaatgttctgaacagccgac

SEQ ID NO: 29430 - DNA, 1702 bp, Zea Mays
tccctaccatgactccatgagtgtgactgttgctctaggtctaggcacggtcaatcagtccatgaaagcgggctcatctgacacggatgggaacggaccagcgtcttgctggccgcttttggccggcagcaagctgatctccagatgctgcggcggcgactgctccgccgcgaggatcgagacgacgaaggcggcgctgcctcggacgccgttcgtctcgtcgtccagcctcccttcctggctccagcattgccgtgatcatcaggagcccgctacccatcttacggatgatctcggcaagacatggagctccatctgcagcagcagcaggccgtcacagcgaacgacgacgctgcatttctcggcgccggtgtctccggcctcctccatctcttcctacgagcacggcggcggccagtcgcagcagcctcgccactcgtggctcctcgccggcctcgacgccgcgcaccacccgtggagacccaagcgcgaggccagcatcaggtcccacgactccggcgcctccaacggctccgtggaggtggagtgccgcgccaggttcaaggagctcaacgccgagaacctcaagctgctctgcggcgcgctggagaaggaggtgccgtggcagaaggagatcgtccccgaggtcgcgagcgccgtcctgcagtgccggtcggggatcgccaagaggcgcgacaagtccaggtcggcggacgccaaggaggagacgtggatgctcttcctcggaggcgacgccgacggcaaggagagggttgcgagggagctcgccaggctcgtgttcgggttacgcagcagctttttgtccatcaggcctggcggtgtcgtctccgcctcgtcgccaccgccggcctcgtcaggctcctccgaggggcacaggagtagtaagcgcccacggatgccggaggaggagccggcggcctactacctagagcggttgcacgaggctgtctccgaaaacccacaccgggtcatattcatggaggacgtcgagcgggctgaccgggactgccagctccgcatcaaggaggcgatcgagagcggggtggtgcggaaccatgctggtcaagaggtcggcgtgggcgacgccatcgtcatcctcagctgcgagagctttggcgacagcaggtctagtagagcttgctcgccgccgagcaagaaggtgaaggtagagatggaggaggccaaggaggagcgcgcaggtgaccatgaacacaaccaagatggtgtttccaagccgtctccatcttgcatagatttgaacgtggacatggagagtgatcaggcggacgagccaagtctcggtgatcagtgtctgctcacggccgtcgacagggccctattcttcagaagacaggacaactagtgactgacagtgtacattggagttgaaggctccgtggtcgttccaacgtgctcagttctgataagaacctagattagttgcatgggcaatagggcatccagtctaattggcattttctttagttcatgttttttaggtttatctttttttttgctgtcttcgttttagagaattggatcgctggtgtatttgggcttcactaaagacaaacatacagctgctgtaaatttacctgcagattctaattcgcagtaccatatccggccaagttcactctctttctttttcacctagagataagcttgcaatttcaagatt

SEQ ID NO: 29431 - DNA, 429 bp, Zea Mays
agagccattaggcctcaatagaaaccatctactatacttccacgcatagctcaggcctggctttatggccatgccgaaactcccgctgggcaggataatccctaccgggactcgtccgagaccaggcaaatatagatggaccacagcgacccaccctccccatccatctcgtgacaatgctaggagaaccatgcacgtcgaataaatagagagagagagataagatgcactgccgggattcttctacgacgctgttcagagcctaagaaaaggccttgggtattagtcaagacaagtggtgaaggtccgcggggtagcctgatttggggctcgacccgagcactggcgattgctcgtcagagttcgcgttctccaccacatagtcgctgcaccatggtcgaaggtctcttcggcatgaaccttggtgag

SEQ ID NO: 29432 - DNA, 1205 bp, Zea Mays
gggcgcgcgcgaggaagaagttaggttagaaggactctccaaaagcgccgcttgagtaaaaaagatctcgccccaaggggtacgacgactacgatcacacaatataagcatctctctgctgctcaaagcaacccaggccggactcccgagggagcttttttagagcaagagaggacggagaggtagagagagaagggggacggaacaagcagctagctagcagggaagatgggtcgcggcaaggtggagctgaagcggatcgagaacaagatcagccggcaggtgacgttcgccaagcgcaggaacgggctgctcaagaaggcgtacgagctgtcgctgctgtgcgacgccgaggtcgcgctcatcatattctccggccgcggccgcctcttcgagttctccagctcctcatgcatgtacaaaacactcgagagataccgcagctccaactacagcacacaggaagtaaaagctccactggagagtgaaattaactaccaggactacttgaagttgaggaccagagttgattttctccagactacacaaagaaacatccttggcgaagatctgggcccactcagcatgaaggagctcgagcagctggagaaccagatagaggtatccctgaagcatatcaggtcaagaaagaatcagatgctactcgaccagctctttgatctcaaaagcaaggaacaagagttgcaggatctcaacaaagacctaaggaaaaagctgcaagaaacaagtccgcagaatgtgatccacgacgtctcctgggaggaaggcgggcacagtgggagtagtgttcttggtccgttccagggactccttcagcaccatggcaatgatccttccctgcagacacgcaggcctacatggaccagctgaacgaggacatggcggaccctgacgagcacggtcggtctggatggatatgagatgctccggtccgatgccccccaaataatgtcgatgcatgcatatagtttcctgcggtatgcggaactatatatgtgttgaaactgcaccaacgattagctgcctgattgtaatggttaccttaagaactccagtgtattgtattgttgtgtgctgtgctgtgttgtcagaagcttgcaactttgtatatgtacatgtatggtattctgttagtttcttggagctgcgcaaaaccgtcttcatttctgggcttcatttctata

SEQ ID NO: 29433 - DNA, 2205 bp, Zea Mays
ggacggttgggttaggtgatgcttacctttctggtttcctagaggctctcaaggacaggttgtgatgtctctccatccttttagttccttgcttcgtctctactcccaaacccaaacctgattaatgcctcgcctccattccgtactctcctgctgaagcttttttctctgaaactagtatatcccccatctgtttggtcccgacgattttccgctttgggagcaccaccaagctcttccagcttgcagggctggagtctttgccagggacagcaatggtgccgacgcatggcgatacagccggaccgagctccagccaggatgacccggcagccagcgtgaagaagcgcaacagcaacaggcctcagtgtaatcgaatctctcctctgataaagaagcagaattctgttaattatttctttatttctccagcctggtttttagtgaatttgagggctggggcttttgcaccataatcagaattcgatgtgcttcgaaccagaacaaaaagaaaaaaaaaactctctctttccaagattaggcgatggtgaattcatgaagttttttttttaaaaaatgaggcgattcataaagccgaagtaacctaaactaatttatacgatgctgttatctttgtggtttaaatttgaaacaaggagtggttgttatgtatatgatgactgtattgtgttgactttgaagatcatccgtttactcagcaacagcttccagcttgcaagcctatacttgcgcctcagacggtcatccctgtactcctgtttgtgggcgtagtttttatcgtgattggccttggctgcattgcagcctcaaacagggtggttgaagtggtctatgagtatgagacttcatgcataccaagacacatgcttggcaacaaagtcgcctatatccaaaacccatctatagataagacatgcacatggattctcaaggttcctagggatatgaagcacccaatctacgtatattaccagcttgacaagttctaccagaaccacaggaggtacgtgaagagccgcagcgacaagcagctgagagatcccaaggaggccaacagcacgcagcagtactgcaagcccgaagctaccaccgagcacgggagcgccgtcgtcccctgcgggctcgtggcctggagcctgttcaacgacacctacagcttcgcccggggcaacaacagggcgctgagggtccacaagcgaggcatctcgtggaggagcgagagggaacacatcttcgggaagcaggtgttcccgaggaatttccagaaaggagctctgatcggaggaggcacgcttgatccaagaatacctctgagtgagcaagaagacctgatcgtgtggatgcggaccgcggctctgccgacgttccggaagctgtacggcaggatcgaggcggacctccgcgccggcgagctggtcacggtgacgacgcagaataactacaacacctacagcttcggcgggaagaaggcgctggtgctgtccacggccggcgtgctgggaggcaggaacggcttcctcggccgcgggtacgccgtcgtcggcctggcctgcctgctgctggcgctgctcctcaccatgctctgcctcgtcttcccactgaaagaggaacaccttgcgctgcagtaccctttgctccggcctgccacggtgaccatgcatgcctagctagatcagtagacggtgtacagattgaaacagtttcttctttttcatttttgatgtatactcagattgaaacagtttgttctttttcttcttggatgtatacttggggtctgatcggtgatttcttgcgcacaggaacagctataggtcgagctgcgacatgtaaatagacactcaaagatttgagttgtacttgtacatttctactagggtctaggggttacagagtttaaaattggaatatgacagtggatacgagggtaacccccaatgtaatcgccaagtgatttggtagtagagcaccgcagtgtgtctaaaaatgaggattgaagtttctctgtcgatactgagcaccgttaccagccagccactacgcagctctgtttggatatcagttatattatttaggtgtcactgaattgtagtttagaattgtacggtctattttcacataatacagaggagtgagctctctattgagagagagagtttctagttataattcactgaacgttcg

SEQ ID NO: 29434 - DNA, 3355 bp, Zea Mays
gaaaaaatccagtcagcgaagggttcctctgaccgggcgaggctctcatggcggcggctgaccccgagacggcggcggcgctgcggggggaggtcgccgcgctgcggatgcgcgtacaggagctggaggcagagaatcagaggctggcaaggattgcttcgacctgtacctgcggattcaaggtgacggctcttcactctctttcggctgcaactgcaaagatatgtaggcatgaacacgaggtgtggtagagcggttttgttccttaagccttatttatagacacgagggatttgacaaccggattcgtacttataccattttcaccttttggagggtagtgtgaggtatcggtatagtttgcagtaactattccatgcgattgcttgttggctggaaaaaaatgaaagattttgctgttttgctgctttcctgttttagttaagacatataatattatgatgcatctgtgaggaaagacaatgactgcctataatccgtatcggcttctactgcttttacaatgttttgtctctatggattgcagctgcagcagcccgaatagccagctttaattcgaagcgaacaacctgtatgattcagtcagctccagaagatgcaattgccactgttgtttatgagagctaattagagcatctccaagagaggttttaaatgtgaccctattttaatatagggctcggaaccataaaacacccttccaacaatggccatattttataaaatttcaccaaacgattatatggcttggtctcttgggtcctaaatatagtaccctatatactgaagccctattctcattaactctctccaaccattagtttcctaataccatgatttatttcctaaatagtattgtttaaggcctgactgttggaggacaaaattgttttgaggccctaaacaatctaaacacggtcctatttcaaaatttaggactattttagagtttattgttggagatgctcttagaacttatctttctggcatcgaccaaaacttttttaaggttgtttctctgcctataaattgttgcgacatgataatctttgttatagcatgtgctgacatgaattacagggagaattgagaacatgtaatggttgtttgctgccagagaatacatgctaacagaaagtttccatccatttagaattatatgctaacagaaagtttccatccatttagaattatattaaattagtgtccttaatattggctgtcaccatgactatgtgaatgcgaatttctatatgtttatggcattatggcaatcgccaacactattatatgcatattcatatatatatatgtgtggaaatcaagtgcgatgcatcatccactcaaggttcaaaaaagtttagattaattcgtttgcatatgtaggattgtatcttgatgttgatacctttccttaaagcaagtcaataccctgcatatcatgtaccgtagggcagtgtttcaaaggtgtcgcctaggtggccaggcgtacccagcttgccttgtgaaatagtgatgccttgtcgcctaggcgtccaggagggcagtgttggatccattactgcacatcataatgtgaaatttcatcaaaatagcactatggagaaagatttgagctctccatttgatcacacagtaatatccaatgcaaatgaaatgcagtgcaacagaaatgcagatgacaatggtttacctgaggattcaagcaagcatactaaaagaacaggtcgcaaggtgggcattttaagtcactgcccaaagcgactagttgctctcaaagtcatgtatttcggccagagattctatggtttttcttctgaaggtaacattgaaccaacagttgagtctgagatatttaaagcactggaaagagcaaaactgatggttgccaataggaaagaatcatgctactcgaggtgtggaagaactgacaaaggagtttctgctactggacaggtgatttctttatatctgcgatcgaacataaaggatgttgggggggacatgttagatgaaagatccgaaattgattatgtgaaggtattgaatagaattcttccaagagatatacgtgtactgggttggtgtcctgttccagcagattttcatgcaagattcacctgtttgagccgggaatataaatacttattttggaaaggggacctggatatattggaaatgcagaaagctgcatccaaattcattggagaacacgactttaggaatttttgtaagatggatgcagcaaatgtgagtaactacaggcggcacattacagaatttactatttctgcatgtgacagaaggtccaacaatgatgagctgtgttccatgacgatcaagggtagcgcttttctgtggcaccaagttcgctgcatggtagctgtgttatttctaataggtcaaggccttgagtcaccatccgtagttgattcactattggatattatgaaaacatctaggaaacctcaatataaaatggcgccagagcttccattgattttgcaatcttgtctatttgataaagccaactttatgtgttcagcagatgccagccggtctctgactgagcacttaaatgatgaatatcgtcaccatatgctccaagctgaaatatttcacatagcgtcatcctgtttaccttttccagaaccaaattcatcagaaacgcctcagaagaagaggaaccatattcctctcctgtcacgagagacagagccttcttacgaggagcgcatatcgaaagtcaaagcgaagctggctgataatctcaagtagagccaccgttttcaattgttacaccaatacttggaagagaacttatggaactgtagaaggtttcttccaaaagcctatatgtttatgacgtgcgctttttttatggcaaaattggatctgttaacatgtggagatggaaattacccggaaacatgagcttagcgtggattttaccattttgaggtgttagaaaagcgtgctgcctattttagactagatatacagactaaaacatatggagccccacatttcgggtattgtcaagttgtgcgtttcactttcaaaatagtgtaagggccttgtgttttttttcttcttctgaatttgttgtaaaatagtctagcatcccttgcaaagagggggtaatgttgttgtcacatgatggtgtgtaccaaagtgtagtaaagcatcccttgcaaagagggggtggtagtgtcctgtatgtttttttaagcaaatgtgacaaactatataagaaatgaatatttcatgtgagttatgtatttccagccgtattatttaggttacttgcattcatatttaagcagcttacaag

SEQ ID NO: 29435 - DNA, 1434 bp, Zea Mays
accaagagaggtagctgagcgaagcatccggtgtgttccctcgccatccgccgccgccgccatgccgggcttcgctcagcgtctcgcgggcatcccgtggcggagcatcgcgaggcaaggcctctcccgcgtgttcctggtggcgaaggcctactgcgtgatccacgtcgtcaacgaccacctctgctcggtgaccttagtgcggggcgccagcatgctgccgtccctgaacctggcgggcgacgcggtggcggtggacagggtcagcgtgaggctcggccgggtcgcgccgggggacatcgtgctgatgatctcccctgaggacccgcgcaaatcggtcgtcaagcgcgtcgtcgggatgcagggggactccgtcacctaccttgtcgaccccggcaaaagcgactcctccagaaccgtcgtggtaccgcaagatcatgtctgggtgcagggtgacaatatctttgcttctaacgattcgaggcaatttggagctgtgccttatgggctgattacagggaagatcttttgccgggtttggccgccagagagttttggcgcaattgatgacgcaacgaagcagtcttaacgctgaggaggagccgaggaggtactgagagcacatggacccatattgtttgctcgcccccagagattctataatagccaactgcaggggggcccttccttgagctcgagagctttcgacgacctaccgcagcgcatttctacagcgaagcaaagagcgttgtgtgtcttgattgatgtcccgtgtttttacagttttggtgtgacaagttctgaaacccgtgtttttacaactacactacaacttcacatgcttattcgaaacatttgaactgatttgtcagtcctcgttttgcagaagggcgtgtctgtttgtttatccatgtccatgtcaaaacacacgacgattattgttcagcatgtccatgtcaaaacatacatcgatcttgaggttattatgccatatactatatataacactgtaataaagtcatccatccggcctctacgtcgacgcggcggcggcggcggtggcgctgggctccggtgctgctgccgccgctagctggaaccgatggtgctgctgctgcagcagaagcagcgacgacttgcactgggcgcacatgcagatctgctgggtggtgcagaagccgccgacgtagcccttgtcctggcagcgggcgatgcagagcagtggcgcgtcgcggcactccgggacgatgctgcggaacagcgggcacatgcccttgccgtctgagggtgacggcaaaataaggaaggagaacatgatcagtagtagggcatcagttgcagccatgacgaccaccttggaagaagccatggcactggttgtagcttccgcttccgatctgcaggcggaacgaataatcggtttcaggctttcag

SEQ ID NO: 29436 - DNA, 936 bp, Zea Mays
ctgcattgtttgctggattccctgataagcgcattccagaaagcacatgattgtcttctgcccatgggaattacttctaaaaatattgcccatcgatatggtgtaaccaggcaagagcaagatcagaccgccgcaattccagtcaagtgagtgatggtgctggagctgttcttctcatgaaaagatctgtggctcttaagaaagggctgcccattcttggtgttttcaggagctttgccgctgttggagtggatccagctgatatgggcgttggtcctgctgtggccattcctgctgctgtgaagtttgcaggccttgaaattggagacattgatttgtttgaactgaatgagccctttgcctctcagtttgtctattgctgcaacaagttgggactggaccgttctaaagtaaatgtaaatggaggcgcgattgcccttggacaccctctggatgcaacaggtgcccgatgcatggctactcttctaaatgaaatgaagcgccagggcatagactgcagatttggtgttgtcaccatgtgatctggaatgggggcagcagctgtgttcgagctgtgttcagcccgactggaggtatcgaccatcacttatcaccgtaacccgatggtgatcggcgaccgtgagcttccatgttattgtgttctgatacttgagacttttattatgactatgtatgagatattgtctcttattagtactggatgatgagatgtgtcttattatgactatggatgagacttttgtgatgtaattgatgagacaatggatgggacttttgtgatgtaattgatgagactatggatttaaatattgttatgtgattgtgtgtgatatgttttatgtgaaaatatgttgtgctatatagctgttgatatatttgttatgttgtggaatgtggtgtaaaataaaaataaac

SEQ ID NO: 29437 - DNA, 1034 bp, Zea Mays
tacacagctgatgcaccactgcctcacacatccatatacgtagagtatatccatagggcgatgcatggaagtgatacgggtgcatacgacgctgaaggaaggtttgttcctgcaaagtttgaagaaatattcacgaagcatgcgaaggtcaggccggatgcgttgacgttcgaggagattgaggagatgattctagcaaatagagacccattagaccctgaatcatgggctgcgcctgaaggagaatggggactaacatacaagcttgcaagtgataagcaaggctttcttcacaaggactctgcaagaggcatatatgatggcagtgtgttctacaagcttgaggaacagaggacgtctgcagcaagcgaaatgtgatggagttcagcattcagccagatgcaaccagcatatataataaacacgaaaatgtgttaggaaattactagactgttatgtgaatcgggttttattggttgctggctccgctcccgcccagattacgccagcctgggccggtatagatacatgcccgtctcacatccccacgtatgcaagtaaacagatgaaaaaacagctaggttgcgcgaccgtatataggctggactcacgccatgcaggtaaccattcataagccaaaatatagtcaatgtacgcgctggacctgaacgctgctgaccaggtaaccaatcaggcgaataatgtattgtgcagtataagttacggcttttatgttaagccttcgaaatttgaagtttataaagcacaccattggcatgcgactggacaatatgaacataagttaccaagttcaccagttgaaccctcttgcgaatacaaggttgacttgtcccttttggttcgagttgattatgagtgattgtccatgggtagcactctagggtagtggtgggttgaccagtgtgtgaaattatgtatgtgcaaccatgtcggtcggcttgaggtatgcagatgtcgagcacagggacggtggtcgacggctgaggtgaaggtcatgtgggctcgtgttgatc

SEQ ID NO: 29438 - DNA, 1242 bp, Zea Mays
ggcccaaaaaattggaccgggccaagaatttcttgcacgagttagatggctctcagtctcagtctcagcccaccgctgtatccatccttccctccaactccacagaaccaacaccgacatcgaagcggcgaaccaaccgccgcaatcgggccacaccaatcaccgccgcaacaacaggcatgccgcggcccccgccgccgggccgcgggaccccaggcgcaaggcggccgatccgggacttcttcgccacctggctcgccaccctccgctcaccgctcctcccgctgctccgccgcgcgctctccacctcctcctcgtccggctcctgggacgacccgctctcctccgccgccgcggctgtcgaggctcacttccaggcgcactggtccgcgctcgacgctgccgcacgccaggacccaacgcgggtcatcgccgcgggggactggcggtccccgctcgagctccccttcctgtggcttggggacgtccacccctccctccttacctcgctcctccgcacgctctcgccctcgccgcgactcctcgctgccgtcgaccgcgtcgaccgccggatccgcaccgccgtccctgccgtctccgaccgcctccgccaggcccaggaagcttttgtggccgccgaggcaaccggcgccgccgacgtggaggcgttcttggcggagctaaagggcgtcgctctcgaagccaaccggctgcgtcggggcgtactctcagacctcgtcgccgccgctggggggtaccaggcggcgctgtacctcgaggcgctctcgcgcttcgtgttgtccatgcacgaccccgaggtgctccgccgcttcgaccagtgtcgcgcctcgcctcgtagctagttacccttcttgttctcaaggtccgtgtaaatatttcaagaaaatgccgcaccaatattgagcaatggcatcaataaagttcttgtctgtatagcttagtgatagtttctgtacaaccttattctgcaaatggtttcctcaaatcatcgatgaactgtatgagaaaatggtacctagacccgttcaatttgtgactaaaatgctggttatgtcaccactgttcaatgcctatttggatacgctttagcattcccaaatttcagataatttaatattttgagcacttaagcatcttatttgaatatttgtgtatgctgtagacaacacacgtgtagtcttagtccatgggttactctattgggcgtttagtttgatgaat

SEQ ID NO: 29439 - DNA, 1397 bp, Zea Mays
aaaatccccccactccaccaccacttctctcgctttcgctttatcacctgtcgcccccgcccccgagcctggtcgccgcttcacccgccgtcgccgtcgtcggtcgggacgcctccgggcggccgcgccctcgacggaggaatgtcttctgttgctcccgccctcgtccaccaccgcggggtctcaggcagagcaatcttacctttgcatcatggagaatgcagagtccctccaggtgcttgtttcatgggcacatcacctacgttggggccaatgagggtatccttggtatgtaatgcaagccccaaccaccataggccaaggaattcggatatatcgcgacaacaaaaaggggggtcctccagaggaaaaggcaagtcgtaccaggataaagatgactctgagaacattgatgaatttgatagtgatatcatgttctccaagaatgggccaccaatctctttggcaagcaattcccgtcctcaagccacatcggctcctggggaaagagagaaggagatcgtggaactctttaaaagggttcaagcacagctgcgagctagggggaaaagcagggaagacaagaagcctgaacatgcaaaagtgcagggtgaaaggggcagtgttgattcacttcttcagttgctcaggaaacactctgtggaccagagaagaaagaatggtgacgacaaagagcagaattccgatgtattgaggagaggcaacgattctggaaatagacaaggttcaaccgtctttggcacaaaaagtgacatccaggaagagaagaagaagccacctccggcacccttcataaggccagcctcaaatttcaggcgaaggtctcctgttcctggagtgaagttccagcctgttatcaatgcggatctggacactgatgacgatcgcaagtccatcggcagtaatgccgtggatgctgtacagaaagctaagacagctcttgatgagaggactgctacagatgagcctgactccatgtctccatatgaggcggattctgtaatagaaccaggaaacatttctttgaatgacctcgatgacattttacatgacgatgaagaattcgatgcggatgaaccagacgacgagtatccagaaccttctttgggtatctctgatgtcacagatacggatgagtcgcacgagaacgactccacccccacgggaagtgcggatctaagctctctgaaggttgcggagctgagagagctcgcaaagtctcgaggaatcaaagggtactcgaagaagaagaaaaacgagctggttgaagtgttgagcagcagcatggattgatgataaagtgactgaaggctggcaattattggtctgcgctgcgctctcgacgccgtgcagtagctgcggctttgctcatggaa

SEQ ID NO: 29440 - DNA, 260 bp, Zea Mays
ggaacaactaaacttcaattttataaatactgaaaaactattcttatgtcttcctcattttcatgtggtgtagttttaatcataatacacctgggcatagttttaagaaagggacaaaaatatacggtagagaaatacatatttagataaagccatatgtaaacagacacaaagaactaccacttgccatgttttgttcatccctgccattcaccaacagcactcatactgtacataatcaagtggcctacaaatagcct

SEQ ID NO: 29441 - DNA, 2620 bp, Zea Mays
ctggccaggggagcctcctctcctctcgtctcgtctcgtcgcacgcgagcccatccccccgcccgccgcctgcgcttgacttgacccgcgctcctcctcggcgtcggggagaccgggctcggtccgcgttgtctcggcggacggaggaggaccgtagcgcgaccgcccgtccgccgccagagccctcgtcatcgtgccggctgctcctgccgctcgtcccgccgcgttgagcattggggatctcgcgggcccttcgtctgtacccgccgactcttcaaaccctagcctctgtggcccgccgacgccgacgggaggagctggagctggggctggggctggagggcgcggaagctggtggctgttgtttcgctgattgaaagtactccatggcttaatgatgaactggtaataaagaggtcaatcattgtcagctagctgtctgaggagggtttttggagttcttactaagaagagagttactcatgctagccagtgaaggacggacacagatcttgcttgctttactgaactgaagacatgcccaaaacacctcctgtcaatgcaagcaagaacactgaaccgcagaaacaatctgcacccaacttaacaataacaaatgggcacacaagtacaaaggtagtggttaaaaaagagcaccctatcaatgatgtgaaacacattagcacttgggtttgcaaaaatttggcctgtaaagctgttagaccagcagaagattccttctgcaagaggtgctcgtgttgtatttgccacaagtttgatgacaataaggatcctagtcaatggttagtttgttcatctgacaatgatagcaagaattgttgtggttcttcttgtcatattgaatgtgcattccgagagaagagggcaggatgctttgatctagagcaaattatacatcttgatgggagttattcctgtgcctcgtgtgggaagatttctggaatactaggatattggaaaaggcaattagtaatcgggaaagatgcccgccgagttgataatctatgccaacgcatttatttgagttacaggctattagagggaactgtccattttaaagaattgcatgagattattgaagatgcaaaagcaaaattggaaagtgaggttgggccacttgatggaatgtcggcaaagaatgcacatggtatcgtaagcaggttctcagctggtatcgctgtgcagaaactatgctctacagcaattcaaagagctgacgagtggttgagttctcctgacctgcatcttcgaggttataagctatggtactggaagagcagagagcaaccaagtatggaaaagcctgttattgtgtccaaagatgaaagaaaaatacttctttatgaccttaccccatgcacagaatattctttcagagttatatcattcacagatgatggggtacttggccattcagaatctagatgccgtactgaaagtagggagatatttgtcatgcgtgcaccaaagaatgcagtgggaggaggggctacacatgcgcaaaaaaaagacaggaaccagtcttgtaagtcaactgggttcaagatccgagatatttggaagaactttcaggaagctttagatgcagaaggctgttttgaaggattttctgaagatgtacatgaaggttcctgcagcagaagtgttacagagacagagttatctggagcttgtcgcaaacttcatttcaactcatcttctgtccccgacctaaacgccgaggttcctgtacccgtggactacactgagaaccattattattctaagaagggacttgtgaggtcaaatgacagtggtgactctgagacctgcgccgttggccagactgcagagccgcctgcagttgaatctcggcaagtaagcaaggtgaatagcgtaccagttaataaatgcgagcagaatggtgcttctgctatttgccatgaaaagatgctctccggatcgacgaggcaactggatggggattatgagcactgcgtaaaggtagtaaggcagttggaatgcgatgggcacatcgaaaatggtttcaggatgaagttcttgacatggtatagtctaagatccacagaccaggagcgcaaggccgtgagcacatttgtcagaacgttaagcaacgaaccaagcagcctggccgagcagctcgtcgattctttcggagaaatattaaacagcaagaaggccaaaaccggtttctgcagcaagctatggcattaggacaaaaaggactagatctcaagatactgctaactcactgattatccatatttttcactgaccggtgcagtgaaattctagtttattccatcaaatttgacagcgatgaaaagggggcatctgtgagaataggagattattttgggcagcaagtagcctgctctgaaataattcttttccatcaggaagtagtggaaacttgattttcattggattacctgggtcaatccagaaattattgtagaaggttgtctttttttcccctttgttgttgtggttcgctgagaaattctttggagatagcagtccgttggttattctgggttattatataaatcatggtaaatggaatgtgatggtacaaagtctctggtttacttgtgct

SEQ ID NO: 29442 - DNA, 5216 bp, Zea Mays
cccatgttagctcatcgtcttcttcaatctacccgcccaaattggacgtgccctccagaataccaaattccccgaccttcgccgagcttctccaacgctccagcggttgatgtccgtcccaccgcggctctccgtcgatttctacgatgacgacggcttcgactgggaggccgccgtgcaggagatcgacagagcctgcgccttcgcgtcggcctccgcccccgctcccgctcccgcccccgcccccactccggcgccggtgcatcatccgctgccgccgcggccccccgagccatcggcatcggcgccgcttcacaggccaccggcggcgggcggcggcacggcgcggcagtcgacgctcgaccgcttcgtcgactcatttaccaagaggcgactagagaaagagaggcccgctccagcgcccgtgcaggcggcgtcgtggggcgtgggggtggagccagtcggcggcggcctagggcggccgggtgtccgcgcgggcgagggatgttcgggacaggcgaacgagagagctgtggaggaccggttcatcgaatccttcaccaggaggcagcaggagaaggagagggctgcgtcggaggtggcaccggcactggctggtggtcaggggcgccctgcagctcgtgctggcaagggatgctcgggtcggggcaatcgtgctggcaagggatgctctcgtcggcccagtatggagattgagtatggtctctgcgctgtctccctggaccacgaggctgtcaagacatggatctatccaactaatgtagaagtccgagagtaccagaagtatatggttgaaaaggctctgtttaccaatacgttaatagctttgccaactggacttggcaaaacttttattgctgcggtagtgatgtacaactactttcgatggtttcccgaaggaaaaataatatttacctgcccttcacgtcctcttgttactcagcaaattgaggcatgtcacaatacagtgggaataccacaggagtggataatagatatgaaaggagatcaatgcccttctattcgatcagttcactggaagtcaaagagagtgttctttgtcactccacaagttcttcagaatgatatacaatctggtatatgcatggtacaacaaatagtttgcttagtgatagatgaggctcatcgagcgtcaggaaattatgcatactgcatggttatccgagagttgttggcagctcgtgtgcctttaaggattttagctctaactgctacaccagggtccaagcattcagatatccaaagtgttatagacaatttaaacatttcggagctgatttattgtgatgaagaagattctagagtgaaccaatatgttaacacacgcaaagttgaacttgtgcaggtcccttttggcagtgatgctactcaagtcgctgatatgcttttggatattatacgcccacatattaatcggttgcgtgatgctggtgtgattgaccatcgggactattcaaattggacccaatttgaactgctgaaatttaaggataaattcaaggaagtacccccaccaaacatccatgaaatcgagagaggggaaattgaaagatcttttgtaattcttggcccactttgtcacacaaggaagttgcttttgagccatggaacccaatttgcacatgggtatcttgacaaacgattgaagggagggtcattgaatttgatgcacaagaacgaattcttttggcgattaaaagaaaagatgaagctttcctcatctcacagtattactccaaaagtacaggaattgaaaaggctgatggttgagcactttaatactgattccaatttgaaggactcaaggattattatattttcccattaccgagaaagtgtcaatgaaatatattgctcactacaggatattgatgataaacttgtcagacctgttgaattcattggtcaaagctcagcaggatatactagggaaaagaacatgtggcatgagtgagggattgtgttcagttgatcccatggtttttgaggtgatgtgctgtcctgtggtgctgggggtacacctaggtaaccaactgaaggggcaaagccaaaaaactcaacaagctattttgaagaaattccgatctggggtatataatgttttggtggcaacatcaattggcgaggaaggacttgatattattgaggttgatctcgtgatctgtttcgatgccaatgtctcaccattaaggatgattcaacggatgggaagaaccgggagaaagaatgaaggtcgagttgtggttttggcttatgaaggtcaggaattgcaggggtacagaaagaaacaaggagattgtcgaaccatgaggaagctattgcataacagtgagagatttgaataccatgctagtcctaggatggttccacatgtctataaaccagaagttaagtatgttaagttgacaatagacaagtatattcctcacgcaaagaaaatgagggttgccgcaaaagaagcctcgccaattccatggaagatgtcggaggcagacggtcaaatgattactaggtactttagtgtgtgcaaagaagaagtttggaggccgtcccttgtggcatttcctagatttcagctttatccaagtgtcgttcacaaagttccacattcatttcggacaacagatatgctaactgatgctatgaagcaacttcaagacccatctcttttcaggacaaagtgtgaaatccctttgcaagaacctgctaatgtttctgctgtggaggagggtctggaacatgaaggtctctatgctgctaatggaaatgaggaaatgcctcaggaatgtgacggtttagaagcttcatcgagtgtagtgtggaatgaaaatgtttctgtgccaggttctccagttaagaagtatccggttcacactttcttcagtggtgattatgtaactgtggatagaagaggcagcgttttgattacttatgtacctgtcctgcctcaaaaaattgcattcagtaaggacataaaaagtgcagtttggaataacaaagatcagaacaaagccaaaccttacagatcagcagcaggcgtctgtaggacaacagttgaatttgtccttggtaccaatacagacaaacatttgtttgtggataatttatcaactgtagccatgcattcccctgagtgctcttggcatggtgacaatgttgatgacaatcatgtgcttactactgtaccatccaaaacactgacaagcccaagggagaaaatggacacaccctgcaatgttaaactgccagagtccacctattcatatcaggaagacatggagcttaattcaaggctaacagtatatatggaagaaggaattgttcctgagtctccagtggttgaagttagccacctacgtctagagatggatgaagctgcagactttggagctgtgccaaagcgtggttctccaaagtcacgtgatgagagggctcatgccaatgtagctggaagtcacaaaggacctttgaactttgagaaaaacgatcaattgctttgtggggaaaacgagtttgatggatcatcaaggttgtatatgctagatcagactcgagccaaaacagaagagccaatgcatccttcaaatgtgaagatggctactactacaagacatactcctgggaatatgctgtgtgatagtttctcaggtgattatcagcttaggtcagggggggatgcatcgggatcagtccagcaagcacctaagtacagaagactatgcaaatatggtgacaagatcaaaagagtctcttccatatctttggatggctgtgatgataggtttgaagaatgcaatattgctaataaagataggccaaaccaaataaaacatgctatggggacaaaaaggaagaccaagaggcgtctagatgcctatattgacgaggaagtcggggtgtctgaagatgcatatgtttcagaggatgaggatgataatcagagtgaagataaatacgaagatagcttcattgatgatcaggcaactccaactgaatttacacaaactgaacaaggtgatcgacacaatggtgacatgatgggtttctacaggcaatcgttgtttactcagtccccagtagttctaccctcaaggtaccttgatgtttcttacaattctgcttctcggaccggaaattcaagctattcttcagaggctaggcacaattacactgagactcccaaagagattcaaacacaacatcataccataaacccaagcccatcgtacagttttgtacaggatcgatgtgaaagagggatcgccaattgtgaatcatcgactaagctggattgcagaaagagaaggctaagcttccagcaacctctggcgatccctgttataaaccttgaaccagaaccagcaccagaaccatctccacacgtcgccagcagagtcgctgatcacctatattttgatgatggtttctttgagaaccttgatcttgatgcaattgaagctcaagcaaccgaacagtggagacagaagaccacacaatcgacgcagaaaccagtggaaattaagaatgcatcagacatgagttttgcacctccgtcattcgatttaggtctctgatagtggtggtaaagttagcatccattcatgatgtcatctagctgcagtacctagccatctcagagcatgctgagaactgcacaagcaatgaggttttctgcagaaggcccgaacctgcatcacatgacaatgccgcaggatctggcatgtctgccgctgtgatatttatcggcgccctggagctggaagatgcgctggcggcagattttgtagagtatttatctcagtacaggctcaatacaccatgtatattctcctgtaaatactgttcgatgtataagggtcttattgtatgcagacatttcagagacttgatgtgttaaacccagtggcaaaggtgacgtcagtgtcggtttttgttgcgcaggattatcctcgctctcgatgctgaaccgactggttttgcatagacgaggcatccgtgcagcatgatggcaacgtggagtttggtcaataggacgagtggttggtacatgatgcctggttgctttccgaaaacaggcaatgttttgtgcagtcttgtcgatttctgtacatctcaattaacgtacgcgttttcgtacattggcgcgacaatgtgagcacagagattctgaggac

SEQ ID NO: 29443 - DNA, 2090 bp, Zea Mays
aacacacgtggattgcggtgaatactagagtatccaaataaggcctaaggggtattaaccccctcccccccaaaaaaaagtcctgggaatctatttactgatttcacttatataggtgtagtgttaggaaacattttagcgtcggaaaacaagattttgaagcaattaagtgattttgtattttgtgctctttgaggttgtggaaaacaagactcgaagtggttgaagtgattctgaccagacctactgcattatgttttgagcatatctggtcgtgtagtgggtttatggcagtagggattcagtgctatcgttttcactcattagcgcatttgattgtaaacaaatacatccttgaaagtgtttatgatacattctccggtgaacctcatcttcaggtgaggcaaagagaggggagattaactctcccagcaaatttataatcctgacatggtttcttgaacttttttattgtagctagatggaacaagatactggatgaagtaccaagaatcagattgttttgttctagaagactctactgaccaccttcacatgctatagtatattgctggcctatcattatccctgttattgcagatataaatatacaaaagctgaaatttacagagaacctcatccaagcgaacataatgccttatgactgacctgctgatgaccatttctggtctattgcaacctgcagggcttcagaaaggttgatcctgacaggtgggagtttgcaaatgaaggtttcctcagaggtcaaaggcacctgctgaagatgataaagagaaggaagccaccatcagctgtggcaccattgcgacagcaacgtgcccctgcttcttgcctggaggttggtgagtttggatttgaggaggagattgataggctgaagcgtgacaagaacattttaatcacagaagtagtaaaactaaggcaggagcagcaaagtactaaagatcatgtgagagccatggaggaaaggctacgagtggctgaacagaagcaggtacagatgatggggttcttggcaagagcaatgcggaacccagagttcttccagcagttggcccagcagcaagacaagaggaaggagctcgaggataccatctcaaagaaaagaaggcggcccattgacaacacaccattctacagtgatggggaaagcgaacagcttgattcacagttgaaaatgttcgagtcaggtgttctcaatgggctcaatgaacctgagctggagaatttagcagtgaacattcaggagcttgggaagggaagcatagatgatgggaacttgactcaagttagtgaccagtcagagctgaacgacgacttctgggcagagcttttggtcgaagattttggagacaaggcaggacagccagagttggagggaagaactgaagacgtgaatgaccttgctcaacaactggggtatctgagttcttctagcccaaaatagagccagttcctaatggttgcccccacaatcactgttgactggtggtggagaggtgttcatactgaaggcgtgctgtggagaggtcactgccttgacgttgaaggcttagcgctgtactctgctgtgggagttacgtgtggggtgttggctaaatgtctcttccggcgtcttctggcaaaatgatctcgtggacggtgactggcaaagatgcctaggggccaacgtatacgtacacagctgttatcagatcttgttcaaagtcattgcgcggttttgacggtgctatgtatcgatcagggttctggccttctggggttgggttgtagaattgactggctgatctagtgttctccatgtatgactggtgtaaccttaaaacaccctcagcttgttgttgaactgtgacaagcatctcgtttttttgttgtactccattttcatcatcattgtacatcaaattgctgaattatgaacagatccctaataatttggtggactgcgtcttggcatttggctacggcccagcttgcagtgtagttgatacatgcttttgttgaagctcttgccataggttgggcgcccacagtacgccttctgcatgtgcactgtcacagttggctag

SEQ ID NO: 29444 - DNA, 1312 bp, Zea Mays
gttggaatgtctattgacccaaagctgcttctgtcaaacttcccaatgatctctatgatattgggtctcttgataattggaaagacattgttggttacatttgtgggcagggtatttggggtttctactatagctgccattcgtgttggtctcttgcttgcgcctggtggtgagtttgcttttgttgcctttggagaagctgtcaaccagggtcttctatcacctcaattatcatcgttactgtttttagtcgttggcatttcaatggctctgacaccatggttagctgctggagggcagtttctggcatcaaaatttgagcagcatgatgtgaggagtttattgcctgtggaaagtgagatcgttgcgcaactcctgtcagagcggttaattccttttgttgcccttgatgttagaagtgatcgggttgcagttgggcgtgcacttgaccttccggtatattttggggatgctggaagcagagaggtactgcacaaagttggagctgaaagagcttgtgctgctgcaattactttggatacccctggtgcaaactatagagctgtctgggcattgaacaaatatttcccaaatgtgaagacatttgttagagcacatgatgttgatcatggtgttaatttggagaaagctggtgcaacagcggttgtccctgagaccttggagccaagtcttcagctagctgctgctgttcttgcacaagcaaaactcccaatgtcagagattcaggaaagcatcaacgagttccggaatcgtcatctgtcagagcttacagagttgtgtgctacgtcaggaaattctcttggctatgggttttccagagttatgtccaaatcgaagtctatcagctccgatgatgaaagcgaaacagtggatggcgcactagcaatttgaagacgattagataaaatgggatcccttgatagtactagatcgattgcactgttagtagataagcttgttgcatgtagaaaaatggaataaaaattaatgcaagagctgtcacaaaaatcggcgtgcaattttgtatgttagagtacttatatatttcttctctcccccaaaaaaattgtttgcatacaactcttcacaaagaaaaataatacactctagcagtgcacgtgaaaatgagacccttgtaagcagggaagaaaatagatgtcagaatgctgaatacttcccatgcttgctcaaaggagcatatggtacagtcaggccagttggacggttgggacctggctttgggtatgtttagtacaatttttgggtgtgtttgggacagttttttaaagag

SEQ ID NO: 29445 - DNA, 818 bp, Zea Mays
atgatgctcatgacatttcccaatgcaacaaaatatctgaaaaaggtggggggctatcgcgtcggctacgacatcaagctctctggcaccgagtcccctaggtcggtcacggggctcgagggcgtccgcgtccgtgtgctatttgcctgggtgctcatcaccggcgtcgaggcgaccgacggagaggtcactgtccacatcgagccaatcaggaagtcgttccccgccattgggttcaaatccagccctcggtgcatcatcggattggcgacgggggtggagactaaggatccaagccactatcacggaccacaacatcaagtgtatgaggcagggcaaagaggccaacaggtgcaggttttcctcatttttattagatcctttcttagcgatcttggatctccactctccaggactccaggtcttgtgatatgtgtgttctcgtggcatgctgccttttcagtattggacaatgctaatggagttacaactccaaggacaggaaggtttaagcaagtcaaggatggactgctttctgcagtttcggaaatgcaatactgcgctagagagatgaggaagattattaactcgctatggacaatgaatttgaatgaagtgtcgtcgagacttcaagagatggctgtgtttctcgaagaaaacactatgtacataggggaactgggaggggtaactgatgccgactgggcacttgacaatggaggatatttgagatggttcaatgtaatctatggtgataatatgaaccatgtgggtggttgtagggtgcttttatctgaaacatctctatgtgattaaag

SEQ ID NO: 29446 - DNA, 5266 bp, Zea Mays
gggcgtctctggtcggtcgctttccctcctcagcttcagccttcagctcctctcctttcctctcctctcctctcctctcctctccacagctgcagccagagccacccaccttatcgtcatcctcgctcgctcctcatcgccagcgcctcctcctcctcctccttcttccccaccgctgccgacatggctgcgcaagaagagaagaccgctgttgttgttgctgctgctgccgatgtcgcgacagaggagcctacgccggcggcggagcagcaacctcagccggctggggcggcgcgcagggcaggaccatcggcgcccggcggggctccgcccaaccccttcgacttctccaccatgatgaaccttctcaatgaccctagcatcaaggagatggcagagcagatcgccaaggacccggcgttcacggagatggcggagcagctgcagaagacggtggtgtccccgcggcagcaacagcagcagcaggcgcggcagcagcagcagcagctggacccgcagaagtacgtggcgacgatgcagcagctgatgcagaacccgcagttcgtggccatggcggagcggctaggcagcgcgctgatgcaggaccctgccatgtccgccatgctggggggcctcaccaacccggcgcacaaggagcagctggaggcccgcgtcgcgcgcatgaaggaggaccccacgctcaagcccatcctcgacgagatcgagtccggcggccccgccgccatgatgaagtactggaacgaccctgaggctctgcagaagttcggccgcgcgatgggcgtcggcgtcggcccgtccggcgaggccggcggcgcagagcacgccgaggcggaggacgacgccggggaggaaggcgagtacgaggacgagtccatcgtccaccacaccgccagcgttggcgacgtcgagggcctcaagaaagcgctggaggacggcgcggacaaggacgaggaggactcggaagggcggcgtggcctccacttcgcgtgcggctacggcgagctccagtgcgcgcaggcgctcctggaggccggcgccgcggtggacgccgtcgacaagaacaagaacaccgcgctgcactacgccgccggatacggccgcaaggactgcgtcgcgctcctgctcgagagcggcgccgccgtgacgctgcagaacctggacgggaagacgcccatcgacgtggccaagctcaacaaccaggatgacgtcctcaagctgctggagaagcacgccttcgtatagacgtcccacgccgccggccggcccgtcttgctcgtctgctcttgtcgccgctgcggccacgtcgcttgcctctgctactgctgctgccgtcgccgccattaatgctttgttgatttctctcctggtcgagacaacgcaggtggaggttttcgtaatgaataaggatgaaatttccatttcaccgtccaatccaatctgtgtttcgagttgcagttcaggaaaaaaattcaaaattttgcgacgttaccaccagcagtccaccaccagaacgaatccaatccaattgggagagggcgtgtatgaagggaatactaatttctaggtgcttatccgtaaaatgcttcacgccattgtgtgcctcacataatcaatcggacggctcagaatcgtccaagattggaccctgtacccggccgcagaactccgcgcccgtcggcgacatcctcctccctcccaatgcttcgccggcgccggcgtgtcatccctctcctcgtccggtgctcgcagctccgccgccaaagcaccgtctccaggtaccgtccgcttccgcggcgacgagcccgtggagacacccgctacaccagcaacgacgacaccctcaccctcggcctcgcgcggcggaggcgcgacgccaccggcaacgctgctctccgctgccacggtaccgtcgcggagccctctaccccgccgtggcagcgcgacgcccaagacgacgtgtgctcgacgaccggccacgaccccaggccgcagcacggcgccgcggccgctcgtgccgtgctcgatgacgacgagacgcctggcgctgacgcctacgccgccatggtcgccagccgactcagggagcgcgacctgacgcgcgcggaggcgctcttcggcgcggcgcccgcggctgcccgggggctgtatctggataccgccatgctcgacgggtacgccaaggccggccgcgtcgatcgcgcgcgcgagctgttcgacgcgatgccggtgaagaacgtcgtcacttggacctctatggtttccgggtacttccgcgccggccgcgttcaggaggcgcgggagctgtttgacgtcatgcctgaacggaatgactattcgtggacgacggtggtgcaggggtacgcgcgcaatgggatgctcagggaggcgagggagatgtttgatcggatgcctcagaggaatgtggtcgcttggacggccatggttaaggcctacgttgactgtgggcagattcagcaggcgtgggaattgtttgatatgatgcctgagaggaactcgtattcctggaatgccatgatttctggttttctcagcattgggaaagtggctgaagcagttcagttgtttgagaggatgccacacagacacaagaatgtggtttcttggactacaatggtcgctggcttggcaaataatggacttgcttgcagggcaagagagttctttgatcggatgccagcgaaggacactgcggcatggaatgccattatcaccgtttatgccaacaatggccagctgaatgaggcgcagagattatttgattcaatgcttgcaaaagacctggtgacctggagtaccatcattgaggcatattcgaagaatgagcgtaagcatgaagccttaaacatgtttctacttatgcgccattcagcagtgtctcctaacattagaacattaattagtatcctggttatatctgagagcacagtcgaagttaagcaaattcacgggttggtcattgcacttggattcctgtcagaaacttccttaggaaatgctctgctcacaatgtattcaagaagtggagatctgatgtctgcctggtttgccttcaaaaggttggaacagaaggatgccataacatggacgtcgatagtgcaagcttttgcagaccatggctgtggttaccatgccttactggggtttgctcagatgctgagacatgggtataaaccaagttcgactaccttcactgctgtgctgtctgcttgtaggcatgtggggttggttgggaaaggtcgcaagatgtttaaatccatctaccatgtttatggattggaaccaaccattgagcactattcttgtcttgtggaccttctaggtcgagcagggtatgtaagggaagccaaggaacttgtcgatggtatgcagcagggtatgcgcgatgaggccattcttgcgacgctcctgggagcctgtgtggtgcataatgaggtagaggtagcaagagaagtgggtgaggatcttgtcagatttgacccctctggtaccggaggctacaggctcctggccaatgtatttgcatcgcatggaatgtgggatgaaacagcaaatgtgtggaaggtcatgaggggcagtaaggcaaagaggactcctggttttagtcagattgaggtgaacatgaggaatcatgtgttctactcaagggatcaagagcatccacaatgtgctgaaatatatgagatgctgattgacacaattgctcctcagatgaagggttcatcatgcgtgggactctgggaactgaccctcttgtccgatccacgcgaatcgactgcctggtgaccttggttgcctcattgcctgggcttgcttgtcaagtgtaaaagagatgcgaccaatgctgcagcatccatttaccaacaatagtgatgataacgatgctggacctgtgggtcatgttcggtgctcattgttgatattgtggaagaaaccagcagaacttctttttggatatcgaagggctcagcaagaaactcaattcttcaattattatttccccttgcagaattgcaataatgttgagcatcttgtttgtagagagcagcgagcagtgtgccttgtcagcacctatagcttgaaaaattatggtaatcctgctaggacataatgattaatgaagctcccgggccttgaaaggaaactgtttatccaaggtttgtcttgtcagatgaagtgagcattgttctctccttggcctaccacaactggatgcagatacagcgagatattgaagggggtgtggtagcaacaattttagcgtcgatgggggtgtcaaatatattagagatgcatatataaatgtgtccctatcatgtccacaaatggtgacaaggccggctcgtgctcctaaactcggttgccgaaggaggatgtgttgtacaacatcgtcgcctccaattgaccacccacacatctcttttctcgatcgtcattctttcccgacaccaaatgtcgagcatgatggaggcattggagcacacgtgcgcgatggtggcgttggagcccaggcgtgtggcggcagcggtggccctgctcctattcagattaagccacacgagattgattgctgctgaagggaggcctccccagttgaatccacatccatatgcagagtacacagccgcatccggaggtagctaggtaccggcatccggcacccactatcgcaggtgccaccacagcctcctgttttcatgaacgtaaatgccatttagggactgaatcagccgccaccaggtcatggggcaagattggaggactgccacatgtgcttgaaggcattgttgcctcacgcccactctgatctgctggtgaatgagtatggcaatgaagtgcacggaggagctgctccttccctatatttatggatctatgcttgttgtttttctagctttgaaccacgacttatgatttcaaaactcctgggatctgctctagtagcatattggccttgttctgtgtttcagggaagcaagagaaggtcacttttttgttctgttggtctactgtaactacaatctgttcagttcagctttctgaaagtatttggtctgtgttatgtaaatgaagttttctagtccatcctatgtacaagttttaaatttgctggttgttattgtcatgaaaaaaatgatctgctgccattggtgcattggtcagtgtccttcctctgccaattgggaaaatagtgccacgcagagtagacaagtatcaggtcattttg

SEQ ID NO: 29447 - DNA, 995 bp, Zea Mays
cttatgtccaccgagtcactcagcgcaaatctgcaagcagcccaagaagggtttagactttagaggaaggggacaacggaacccgtcgatggcggcggctgctggcggcgtgcggcgagccctcgcggcgctgcgctccggttccccgtctactatctctgcaacgctctcccgccaggcggcagctcgctctctggagctagcggccgcgtccctgccgcgcgcctctcgccggcgcctcgcgatctcgaggcttcgctgatgccgatgcacaacgccaccgcgtcggcgctgctcacctccatgctcgggcttaaacctggctcttggggctggctctccgaaggatttgctacacctctataacaggaaaaaggagtatccgtgataagtgcctgtttttaaacctttgcactagaggattccaaaaacatttttacatgccttgcggagtacacccttggacttctgctgatggaatctgtactaaaatctgcgacaaaaaacttatggtcctatgtcccaattatcttggttctactatatccatcgaattattcgctttccacgctatctccttttccttgtctcgtgtggcattgccatgggattctaatatgacatcagcatggctagtatcaaatatttgttatccgaagcatcaaagcaccagtatgaatgatctatatccatcgaattattcgctttccacgccatcttcttttccttgtctcgtgtggcattgccatgggattctaatatcacatcagcatggctagtatcaaatatttgttatccgaagcatcaaagcaccagtatgaatgatatatttacatgttttgtgttgttaacaagcatcagccaactgaagcagatcgcagattaccagatatgaatatcacatatgtaatgatatataagcatgcaaattctatctggcaagatttcatttgcatgtctaagcataatgttaagaagggcaggtctgataagca

SEQ ID NO: 29448 - DNA, 3401 bp, Zea Mays
tcacagtgtcgtggttctgccatcctccccctcgcgcatccaggaatcatcgcgtcgtgctcaagccaccccgccgtcatcgcctcacgcaccttccttcggcaaccttctataggcgcaatcacaggaatccccgcggcctcgccccagatccctaaaccccgcctcgtctctcatggaaagtgcgtcctctgcgctcggctctctccgcgtctgcgacagcccgctatccatggaacgtgggtcctctgccctggatcgtcacgtcggccctcgattcgcgtccgcgacagcctaatcccgcacgtggattgggtacccctctgccccgaatcgtcgctcccgcccggcatcagcgtccgcgtccgcgttgtggtgtccgcagtctccatggaaggcgatcccgcgtgtggattagcattagcagatgaagaggcggaatgttcttcttgggatagcgacgatgagtaccagaaattcatccaaaatatgaaccctccaagggtcaccatcgacaacacctcatgtccaagtgctatagttattcattatggcatactgttggaggtagtgcaggtcctcactaacctcaagctcatagtcacgaaggcatacatatcctcagacggaggatggttcatggatgtgtccaccgacgaaggagaagccaaagcacaggagcatggtgctatgttcatggagaccagtgcaaaagctgggttcaacgtcaagcccctattccgcaagatcgctggatcccttctaggactagacgcactttcgtcaggaaagcaggaagacatggtcgacataaacctcagacctgccagcggttcgtcggcttcaggtgcagccgcgcagctggagcagaaatcaggcggttgctcctgttgagacttcgacagttttgtgttcagagaagctacaacagtactgcaacatcgagttaagtactttcagagagattgtgacgaagagtgttttcgcccaaacgtccagtagtgatatactgacatccatagcgagaagccaatttctgtgtacagatttgtttagcaagttatcatatgctaggatataactgtttgatacacaagggacaaaatctgtggaggtaagggcatctcacattttttttgatgaaacattagcaggagctctgccatatcatataagaagagcaagctagagtgtcacagtctttattacatgaatgatcaaatacttagagtccatagggaaaaagtgaaaactgttgactatatggctaagagacaatcatgatccatgaaaaattctaatggactcatatacacagagggggctagcgtgcttgagagaataatattagccgccaccgcatctctctatagaggtgtacgtgctcaagtcgccaccgttgtttctgtcgtggacatggaaattatatggcggattgctggacatgtagtattggcttatctggtggacgatagactgcctagaccacatgaattaccaaatacttttgagtctttgacatgcaaaaaagggtgaaaactccattagaaaactttagaagctgaaacaaatattcccttcagtattgagttatattagggtatttcatatccccttcaatattcagttttattagagtacttcattctaataaatcacatccaatttcattctgccaatcatattttctttttatgcaattttattctattgatcctattttctttgttttgtttttggcaatgaggtgtttcagcatcgacattcaatttcacagcaggaacttctccattccattccaatccaacatcgacaggcattccatttcacacagctaatcggtggagggaaaaatattcatcaggaaaccagctaatcgtggaaggaaaaaatattcatcaaagtggatgtcactggatgttttagtggatgtcaactttgtcatctactcgtgtttgataccaggatgcagtgcaaccatttccacatatgtattggctagcattgaactgaggctttgtacagtagtaataagaaatgagaaatgtcgaattcttttagggccctgatttggcatcaattgaaaagacattgactgtatctatctacagggttccacatgcacattcagcgagtcaatcctgggatcgtgtggcttccatactgggctgttcacctcaccacatttgatggatgttagagagcgatttcagctagatgggtaattctttttcctactgttctttcatcttatacacctgcatctggctgtggtgttgacaacagtggatcctatgaacttccaaatgattttttgtatgtaaacatcatgtgtcatctttcttgtgctgtccttgtaattaggtgctatgaaatttatgatcgcactgacctagctcctcctttctgagggcatcggggttaatatttctgaagagaaaattttgaagtactcctggtggtgctagaacaagttgaagcctatttcaggttcctcgcgctgctcgcattcaagatattttctgctgagcaggtagatgttgctattctcgaggttggcctaggagggaagttcgatgcaactaatgtggttaaagcacctgtagtttgtggcatatcttcccttggatatgatcatatggaaattcttggtgaccaaatcctgttcttggtgataaacttggtgtcgataaacgggttaattctgttggcaaaattaggatgacacaggttgttagttctcgtgaatgtcctgttgtctcgaaatacaaagcttctgttcgcacctaatcgcctaaaatggaaatgtttgactcattgtttaattcggggggaagctgaaggtggtctgatccggtaagagatcttaatctgcattacacttgttggattttgatgtcgcttttgggagtgtctgattgaattctacaccagttctaggaagagaaaggctgaccaagtcatcatctccagggacgatgttagcgaaagtcaatttaatcaggtgttgatcattgggttgcaacaaatcatcggtggagactgagtcaccgcggccagaaaaccacggtctcaatttgaggagtttttccatctatgtttgttagaaggcataatgcctatttatctcttgtattcgaacatttggcaattaagaaatagaagattacttccccaatatcccttattcctaatctcacctttcacggcttgtggtgaacaatcacttgctattaccgactgacatgtccactcctcatatgtgcgatattggggttgatatatatgttgttcgtttccatgtaattattgtatactaacatttatcgaataatttttacaccgtcgcaacgcacgggcacacacctagtagtagttgatgatgcctttgcaggtttgca

SEQ ID NO: 29449 - DNA, 1278 bp, Zea Mays
caccagaggcccaccgtcgcgcccagccccaaatcccaaccctagctccagcctccagccgccgcagctcctctctaggctccactgctccagccgccgcgcctcctgcctggctgcctcttgcctggctgcctcctctgtcctctccacgactccacttctccagtctgagcagtctccagcgaccagaggcagcgccgcagcgcgctcggccgctcgccgttccgcgcggccgcgcctcctctccagcgtcgcgccgcgcctcctctccagcgccagcccgccaccgcggcaccgccaggcgccctgccggccagccggccagccagagccaggcgcgcaacgcgctcgaccgccgaccgccgaccgcacaccgcagcacgggactacgggagcagccgaggcccgaccgcccgagaaattcaagataaaagattttgaagcattttcaagtcttaagaactcggaagataaatttaccttgcatcatcatctcatgaacggaatcagaaaagcatatggaggaactatgctccaaaatcaaggtgggtgatagatgtgaagttgagcctggtgccaagaggggcactgtaaaatttgttggtagagctgaagcccttggacgtggattctgggttggagtgcaatatgatgagccacttgggaagcatgacggcatggtgaaaggcattcgcttctttgagtgccctcaaggtcatggggcaattgtgaggccagagaaagtaaaggttggcgacttcccggagagagacccatttgaagacgaggacgatgacgagatttgagtgcgtgtgcgtttggaaaagcaaggggaatgtccttgttgaattgcattcgaaacgtgtgtaaaatgaattcggagatttgagtgtgcgcgcttgcttgcatcttcttgggcaatcatagtgatcacatttcaaggcatgctgttacatctctactatttaagcgtgagctaataaattttccctccaacgcagagtatccaaaaaatggggtggattcgaatcctgctcacttgtataaagcgcatgacttctaccactataacttatttctgtctgtgttatataaattagagatattttgtgtgtatgatactaataattttaaaaaatataatatcatttaagcaaggtttacttatatatctgtagaaacagttacatatatgtgggttcttctactagtcctctgacccggaggaaaagatggagattttcgccaacttagagcatctctaacaatacctcaaag

SEQ ID NO: 29450 - DNA, 238 bp, Zea Mays
aggaaaaaaatcctgtccgccgccattgccgggctgagagagggctgccaacttcgatctcgcggtgggcctatgctgggtcgcggcgtgcttctccgatgggtgctcgtcgtcccgaggaagatcttcgtggtcgtctcggacgggtgatgtgccttagcttcgccaatggcgcatcggatgctgcgtccgccaccggggggggcactgctggccaataccactgcctggcaaccgg

SEQ ID NO: 29451 - DNA, 403 bp, Zea Mays
cctggcttgccttgcctggtcctgcttgcttgcactttttgcctttttcggaggccacgggtcaccgctaacctccatccatccatttgccgattcacctacacagcaggaacaaacgaggagccctccaaggatatgcgccccgccgcttatacattaaccaaagacttgcctccaatcactcgtgtctacctcttcgagttgcgaggatgcctgcgaatgaccaccatcccaacggcctgctccaggagtcagcccctggactccagcatgatgatatggaaaaccagcagcagcaagtctgctgggagcgcttcctcctaaaggacactctcaacgtcttgctcgtggagagtgatgcttcaaccaggcaggttgtcagtgccctgcttcgttgctgcat

SEQ ID NO: 29452 - DNA, 2266 bp, Zea Mays
ctgccataaatttcttagagctgataaaatacatactgcgcgttgcaagctcccacttcctgaggaacaggaactccatgagatccgcggcatccgccgtcccgttcatctgcacaaaaagaccgtaatccttctttttcctctcctccccatccgcggagtgtaaatcgtctctcgctagcgcgttcagtagaaaccctaaaccccgcctcctcccctcgccggggtaggggctacgggtgtcaacgcccgccatggacgcattccggaagcaactggatgtgctcatgggcgctaaccgcaacggcgacgtcgaggaggtgagccgcaactactacgaccgcgacgtctgccggctcttcctcgccggcctttgcccccacgacctcttccagctcacgaaaatggatcttggtccttgttctaagattcactcgcttcaactgcggaaagattatgaagaagcgaaagcaaagggaacagagaattttgacagagaactcgaggatatgatagaaaggctcattgtggagtgcgacaggaaaattcagagggccctgaaacgacttgcggatgacgatgccaaggctgctattgcgatatccgtctcggaggttactctgacggatgacatactgcagctgtcaaaacagatcaaggaaaaaatggtagaagttgatgcctttgattttgaagggagaactgatgataaaataaaggcccaggaagtagtggaagaactcagaactaaaagagctgatatgcaggctaccctcttgcttgatgcttttaacaaggacagagcttcattaactcagcctgctcaacctcctcaagtggcggcagcgccaccaccagctccacccgatgctcgtactcaagaaatgatcaatgaaaagcttaagaaagctgaagagcttggggaacaaggcatggttgatgaagctcagaaagctttggaagaggcagaagctctgaaaaagctggcgcgacgtccggagccaccttcagacccttctaaatatactgccgctgatgtttggattaccgatcaaaagttgcgcctctgtgatatatgtggagcatttctgagtgtatatgacaatgatcgacgtcttgctgaccattttggagggaaactgcatctaggctacatgctgattcgtgacaaacagaaagaacttcaggtgctgagtgtaatgtaccgttttctgctttaaagagttactctgttttgggccttttggcatctgaattagtccatgtcgcgtgattggaatctcatgcgatgatcttcatacctatggctacaacagtcactgtctgttgacaaattatcgattgttgggcagaagctggaggttgcctttttactgcctgagccatattatgtagaccaggtgacaaataatactggttaagttatcctgaaagcacacttcttttgccaacattttgctgtaagtgacaacttgttctgttttctatctgctacctcctccataagtttgcaagttacattttgctgaagcaaccttgcctgtaaagtatcgcccgccctatcttttggaacgttgtctctgattttaaatatgccaaaatatcattatctgtactgtcaataaacaaaatacactgtggcatcttgcaggagcagagaaacaaaaggaggacaggcaaaactgaagatgataggcgatctagagagcagagcaaggatcgaaacggcccgccgtccagggatagagattcagaaaggagagacagggttgagtctcgagatggaagaagagattatgatagggaacgcgataggcgtcacgatagggaccgtcgccatgaccgcgaccgggatagggattatgaccgctcccgcggatatgactcaaggagaagagagcgttcacgctccagggagcgcagcaggcgccatgagagatactaaatgttactccatggctgacagattttggattgctggcgtctgttctggtttgtgttgtgctttgtgtcttatcttccgaagtttcctgttcctgctcgagaaatccgaaagccaatctgcgttctgcatcatgtcatgtcctagtgtcgtactgtttagttatatgccgagaacatctctttcatcaaatgaatatttggaaacaccaacgcacttgacgctaaatgggaatgaagtgtggagtatttaaacgcctctgaaatcaaatgaaagttgtacttgtacgaaagaaacatattcaaaaaaaaaaaactcaacaat

SEQ ID NO: 29453 - DNA, 2202 bp, Zea Mays
gatcggtccaaattgaaaaaacagactccggccacagccgagacgagactagcagcagccgcttgctcagatcggcagcttcggcggcggcggagatggcgattcggtactggccgatggccggagcagccgttgggttccgcctcgtcctggttctcttcggcggggatctccaccttgcctctcgccctgaggtctccacccccctcacctcccttcgccgcctggcggaaggctactggctgaagcaagcgtccgtgtcaccgtactccggttctatgtatcacggttccccattgctcctgtctgttcttggtccattaactagtagcaggcctgacggacatcatgctcatatttactgcagtttgatttttgtggctgtagattttctagcagccatgctcatccgagcgactgggcatgaactcgaaatggcacggaacagaagtttgaagtcacttgacctcacaaaggcagtaaaggatacagttaatgtaagcgctggagatgttgcttctctcatatatttgtggaacccttgggcaatagtcacttgtgtgggatcatgtacatcaccaatcgagaatctaatggttgtaataatgatctacggatcctgttcacgtctggctcctcttgctgcttttggatatgttatggccacacacctctctctttatcctgcaattctcatagtaccggtcattctgttgctgggttatggtctagatgctcctcctccaaaagtatttgttataaaagggtcaattgccagaaaaagtgatgtgtcagacaatgataaaacaagcagacagagagttgttcagcagttttcatggaaaccagtacttcactttatattttggctgttcatctggtcgtgccatgtgttgttattgagcagcgtgattttgaagaaagttggtggcctccacgagatgtttgaaaagtaagatgctataagctcccttccagccttcagtgggatatgtttcctggaagtcaccaaatttgtgtcaaaatgtgctctagtttgcccaaagtcttcttcacatataatacagtttttcttaaaggagtgaggtataactttgcttaggagttttgttcagatatttgcaaatcacgtcgcccttgtaaaggcggttttccctatcctatgagttcattctctgatattatcccaataacaactttcttcactctctgagcatcatctcataaacagctcttttcatttccaatcaacttgttttgtctgtcacctgattatacctgatgtgctgttgtttgcaggacgtatggttttatacttacagtgaaagacctatcaccaaatattggtgttttgtggtacttctttgctgaagttttcgacttctttagaaatttctttcttatggtattcaatatgaacatcatttttatggtcttaccattggccatccgattgaaacatcgtccgtgctttcttgcatttgtttacacggcaattgtggcaatattgaaatcttatccatcggctggagattcagccctgtatcttggtcttctgggcttatttgtcaacgaattagcagaaatgcagttcacattcttcttgttttttggatatattggagtctccctacttagccctgtcatgcataatctgtggatctggaggggcactggtaatgcaaatttctacttcgccactggtttggcttatacttgccttcagactgtgttgctggtagagagtgtaagttcaatgataaagcacgacagaaagttaaggctacttgttacaagctaatttggtcctcataatcagaagctcaagtggtggacagctccgatgcttgcaattccctacatggtgctcttgattcttgaacacaaacagctcctcatcttggagttcgtagatgtaggtcatattcgatgtagcatgttgtactgtagaccccacacttgtacaatactaggaccgcaactctttcaacaaagacaaggaacacggtagggctcgtccttggtgactagtacgtagttgtgttcgctaccgagaattgttgtggatcctggctgtgatgttcagtgatccagcttggttgaactgccctcacgtacatttaattccgtcagtctgatggatcaacaaggaaaccaacatttgaacgtttaaccaaactgatatctaattttcgtttcttc

SEQ ID NO: 29454 - DNA, 884 bp, Zea Mays
cactccgaagcgctcgtcgcaaaagctgtggcactgccgcactggcacagtggcacgcgattcctttccttccgcgtccgcgtccttctcggctgtctgtgcagttgtgctcgcttgctccccacgcccacgtcattccccgtccgctgcggctcacctccagcctcacggtcccgcgaccgctatggccgacgcgtactggaggtacgcggccgctgccccgcgccagcagcagcagcagcagcagccgccgccctccgccggcgggggcgtcgcgcaccccggcatgggcggcggcgcaccgcagatggcccccgccggggggcagcagcagcccatgaagcggccccgccccaccgaattctcagatgtacccggtgcacctgacacggctggctattatccacgcgatgaagaaagggcagggtatcgtgctgctagagataccgagtctcttaacgcttcctacgaacgttttctacgtactgggcaaattcaatcctttggtggtggacatgctggagaacctattaggcctgctgtgggtggcaatgctgcctacccagttgatgatcgttcaatgatggctgctagggacatcttccgaccatttgttggctttcgtgaggttagacttgtaaacaaagaaccgaaacatcctggtggtgaccctattgtcctttgttttgttgattttgcggaacctacacaatctgctattgcattggatgctttgcaaggctataagtttgacgagcatgatcgcaattcacccaatctgcggctgcagtttgctcgtttcgcaggtccaaaggggaattcaggacctggtggtcgtggtaggcgataagttattggcgttcctttttgccaggtgattcacg

SEQ ID NO: 29455 - DNA, 2227 bp, Zea Mays
acagatttcaattgtgtccatttcaatatcaagcccgatttggcaagccaaagatgtagtgaagactatcaagaaacggattgcacacaagaactcaaaggtccagcttcttgcattaacgttgctggagaccttgattaaaaattgtggtgattttgttcatatgcaagttgctgagaaggatatgcttcatgaaatggtgaagatagctaagaagaagcctgactatcacgtcaaagagaagatattaattctgatagacacttggcaagaagcttttggtggtgcccgtgcaagatatccccagtattacgcagcatatcaagagatgctgcgtgctggagctgtatttcctcaaaggccggagagtactgtgccaatctatactcctccacagacacagcctctacggaactatccgcctcctgcattgcgtaacactgattatcgacatgatgtgcctgaatcctcttctgcaccagaagtgcctgcattaagcttgacagaaattcagaatgcacgtggggtcatggatgttctttcagagatgttaaatgctatcgatcctggtaacagagagggtctaaggcaggaggtcattgtggaccttgtggaccaatgtcgttcatacaagcaaagagtggtgcagcttgtcaactcaacatcggatgaggacctattaagtcagggccttactttgaatgatgatttacaacgtgttttagcaaagcacgatgcaattgctgctggcatagccattcgattacaaaaaccaaaatcagccccggcccgcgcagacagttctccaacgaagcctgagccgacaaaggaaacagaacaaaggtctgctaaagttgccagtagtgtgactccatttgagcagttagcacttcctgcaccaccatcatcaagtgcttcaaagtctcatggagaatcagctgttagcccaaatattgatttgcttagtggtgatgagttttttaaaccagaacctgttcattcccaagctcttgttcctttagtcactcaggcttcagcttcttcaagccccagtactttagaccttttagacatgttttctgatagcaatgctatcaataacaccagccagaaccctaccatactttctatatctaactcaaatcctaatacatcagtacaagcctatcctgttccacagcaacctgttccaccacaccatccttcaccatatgctaatggcttaaattcagatacaatgacaccctttgatcaaggctctaagttaacctcagcaagttcatggaatgaacagattgcccatggaatgattccaccacagcagtttgcccatggtcaaggtgaacaaagcaacgaccttccactaccaccctgggaagctctgcctgcagaaactgagcaattagaagctgaccatcctggtgggttgtcagctctgccacaatttggagttagtcaaccccagccagtccaaattacacattctgggcagcaagtgttaccatcgcaattaatgccaactggacaaccgggagggcagttccagcctagatttggggctcaacaaccatatgctacagaaaatacgcagtatggaggaatgtatccgccagtgcaaggcaaccaaccaacgggtatttatccccagcaaatggctggagatgtctaccagcaacagatgtttggtggccagatgataggttatggctatggtccgcagcctggaggctactacgtgccgaacgccgcatatgcatatgccggtgcaaatgatctttctcagaggatgaatggcctctcgatgcaaggcaacagtctgtatggcacacccgcgtcgtcttccctccagcagcgtaacaggccaagcagacctgaagattcgctctttagtgatcttgttagcatcgccaaacaaagccttgtaaaactgcttccaacaaggctggtaacttgtaaaccatgagtttctgctcatagtatataaaattcttgaaatttttttcctattggaaagtagtgggcgagatttgtatatcctgatattgataaagatgtttacatcttttcaagaaattatattttgtttacaagtattctgtaccattaatgtcttatgtatatacataggagcaaaaaaaaaaaaagactccagtatgctgattcctctttgaaattttggcatacgacttcagcatgtcagaccatgttcctgttctatacattttgc

SEQ ID NO: 29456 - DNA, 2262 bp, Zea Mays
agtagatttattaggaggcaatagacactggtacatatattggcaaggaggacccaagagagtgaccgattgggtatctcagtgcaaggaatttcttgagagaagaacatctcctgaagcaacaaaagccttagaattgatctccaatgcattgcacatatgtccacattcggacagcgtcaaggagatgaaagcagaggcattgttgatgctacgaagatatgaagaagtgattcaactatgccaagagtctgtgaatctgactgaaagaaattcagttttattcaaagacaatggagaaccaaagaattccagagtctctgaacggatgcagttttctggaaggtattggcggccctacctcatttgcaagtcttatttcctttcaggcaagcttgatgaggctcttgaattgttaaagaaacatgagcaagtcacacctgtcaaagaaagtgaagtgaacacatatgaagaaaaattctcatcattgtcagcgactataagagaactactttctcttaaggctgctggaaatgaatcatttcaagctggtagatattcagatgctgtcaaacagtattcagcagctttggcatggaatagtgaatcacgcccattttcagctgtatgtttttgcaatcgtgcagcggcttatcaagcactcggtcaagttactgatgcaatatcagattgttcacttgccatggttcttgatacaaattatccaaaggcaatttcaagacgagccaccttatacaagatgataagggattatgaccaagctgctaatgatgggagtggagccatcctgctcttcagaagatattaagaaggcataccggaaagcagcattgagacatcacccagacaaggctactcaattattaataaggaacgagaacgcagaagatggattttggagggatgttgtcaaggaagtctatgcagacgctgatcatctgttcaaaacaattggggaggcatataatgttctttctgacccggccaagcgtgaagagtacaactttgaagaggatctaagaaatgccaggaggagagtatctagttctaggagcatgcataggtcacctgaacagaactacagcaacagaggctttaatccacgccagcggcagtcaagcagagcatcacgttcacgttggtacagcaattcagacgattactggtaaagaagccattacatatggagtgggcatgtggtgcgaagcaacttttgcatgtgtggagcaaaaggcctccttgcaccaagatggcacctgcctttctggggttttttaggtgccggtgctgacgcaccagccttcgcagtctcagctttcgtgtctgtttgctgtgtttcttttccagagggtcagccttcgcagtctcagctttcgtgtctgtttgctgtgtttcttttccagagggtgaaaatattaggattgatcaactggggatctgggatgattggttgacacttgattagcacagaaaatacgtgggattaggaagtggtacatcaaattatcttttgttggcctggtgatttctgaacactgactgcttgggagtggctggcatgatggtatccactcttgaggagttgaacactgagaacaacttcgaaggttaggagcaaggataaagatgttggttcctcgaatatctgcaggcactcttttgctggatgcatggctactgtttagcacgggcagtttgcagcagatcaactggaaggagacatgctcagatgctcctgtttggcgcgtgcagttctgttctgttgcttctgtttaatccaaacgacgtagcgctggaaacagagtggctacatattacaactggctaactgctcaatgtcggaactcggaatcacgattttttatttattcattgttattagaggttttagctagcccaatgttgagagtattttattcagatcaaggttccttcgaagaaaaaagaggctcgggttacggtgacattggccaattgcaggttctgtcatgttgcttatgatgaaatatttggaacgacttaaacccttggactgctgcatatgtttttttttgcgtgaacgtttcgttgataaacgggatatatacacatattcgaaggccttaaggcacaaagaaaaggagactaattaagggtgtgtttggttggagagtcaactaaaatgagcgaaatgagcggctgtattacagtttttgagaatgaatctattctattttatgtttggcaaacagaatttagccg

SEQ ID NO: 29457 - DNA, 329 bp, Zea Mays
agccttcgttcacgtcgcagtctgaattcgttgttataacaaattaatactgcgaggggctactattgggggccctcgtcttttgaaggtcctcaaaaacatgattaacaatgtttcccaagcttaatatatgtacaggaaccttcagactcaggatgaagctatacacaatatgaagagcagggtcggaacgaaggttgaaccagcgccgaagcagagcgcaagggagcttcggctcaatagcagaaaaaggaaccgacttaaggaggaaaaggttatctagtccccggtagattgtttttaagtcaatagtgaacatgaagggcatg

SEQ ID NO: 29458 - DNA, 4818 bp, Zea Mays
ttcatttcatatcaaatgttaaacaacattaagatccatatcatatattgacaaagtgatacacaatgtacattacattgtacctttagcttgttcgaaggcgaaagcgagagggtgattccaatctagtgtgaacagtacgggggtactgttcatctatttataggcaaggggcgcagcccaagcaaaagtacattgtcacacccagatttcaggggtctaaaacccgggcgcgaacttcaccaagtgtgctaggatcaagtctcacacatatgatgactcatagtacagaaatgaatgtcacaacattaatatataacagggttctgtacaaaatagataaataattacatcatacgaagacaacgatccagcaaccatagttgactgggagacgacggcctagaccactcatgaactcatcacagcatccttcatgcgcctcatcctgcgatacatgttcttgtcctaggggttgtgagtacaacaaggatgagctcacatacgttcatcgctcaacaagttgtgtggaataatgtgcatgaactcaccaaaggtgggagctcatgtgaagtgtaaggcttacaaaggagatggttaaagctgagcattgcttttagagttggtcaaaattttattagcagttactaagaataagtagataccaacccaattaaataatagatcacaattatcaataaatcccacaatgcaatgcatatactagattaaatttaagtccataaattaatcatgcgagagtcatgagtcgctcttgaccgtgagcacgaccgatataccagttttacactctgcagaggttgtgccctttacccactagtcgtgtatcccgtctagccagggtttggaaggcccttagacacttctaacgtgaatggctagggatccactacgaggcctttataaagttccactagcttcagaaaacccgctatggtttctaagaagggcaatataggaatccctcgttcgaaaagctatcacaacatgatcgacctgagaacctccctaaacgtagctcctctaccgcccttgcccctttcgggtaaggtagtcctccactagcttttctaattagtcagccaaaggcgtcccattccacccttgtggtagcacggatatctcaagttaagctccatgttccaattgacacaatgatcttgtcatgaacaataattaaaacaacaacataacggaacatgatcataatgtaacattaatttcccaaaaccaggtagagaaatagcaaaactaactatccaaaagttcagtggtaaacatggtgtaggataaacaaatctaggtaatcctattagggcccatcaaattaacctgagcatgtcacaatgattaaccagaatattattgggtaaagagaaaagtgatcaagggcataacttgcctgtgacttgagattcccaggtgctttcaccaaattggtctttgggattctcgtgacctcactgctactcgtagcaatacatacaaatacacaaggaacacataaaaataacagtacactaaacatgagaacgaacaacgtaaaaatattctacgcgatgctatgagatcgtaggttcgagaaccactaaaatcagggttaaaacgaagaacttatggataaaacaagttttttgggcgcaattgatctaacagacatgatctaacatatattgcatttaaactaaatgtattaaatttaaatatttgagttggtattaatcactttaataattatttataaaatgtgtaagatagaactataaattagattaactatattgcttagctaattaacattaattaaacaattaattaattaaaacatgtggcatgatcaataccatgtcattactacgtacacaaaattactatgaaactaatgcaacttgaatggaataaatctaacgtctagtacaaaattatcacatgtttaataaattagtagggctgcaaaaaaataggtgacatgacgcgatctaattgattagaacaaggttacataaagaattatgagttaaataaatattatatatatgatctatgtgtggtcatcttttaccttactcagttactcgtatgtgatatattgacgccggcatccctaccctcttgcttgctcgtgcccctagatccaaacgttgatgtttcgctccaactctcgcggctctctctctctctctctctctgcgcgcaattgggaacgacgactgggctcgcttctgtaaaccggagaaagaatatggcagtctatttatggaggccgtgggaacgtatctggtgctcaaaggggatacccagtcggagcactgaaggaatcagatttttctcaacaaaattttgttgcatggatgaaggagataacagtcctgttgtgcggtcttcacgcgtcattgatacatgggtgaagtcagccatgacatctccggctaggggaataaaaaacaaatacgagtgaaagggaataattccttaaatgtatgatccaattaaagcataaccaaaaaaatatagtatctatcacttatttattttagagagatatcctttataaagaaagaaatctattattaaaagatgttttaaatcgaattttttgagaaacttttataaatatcaaaataagatttttaggtgttacatatatttatgaccatgatacgtacatattatcctaatacaaacatcagggattaacgggtcttttactctttggctcaacatcgcttttgacctttgtaatcgtcttgggacgaagctatgaaccttcggcattttacacatgtctgttgcagctttggcgttcagcccatttagttgtagacgattcctacgtcatgaggacattcaacggagaaggagatccccaacagtagctccttggcggtgctaggtcgttttttcataacgagctcgatcaacgaaacacacgaaggcttctgaatgccgaaggtccgaaaaacaccttctctgggcttgttattaaaaaccgaataaaaagttacggcctgtaccggtccaccgatcagtcagtatgagcaatgcggtgattcgccttcttcacctgcacgactatataaacagacgagctggtgagaagttaccacatcattcattgctattgcatcgttgtgctattgaaaatttttactaaagtcgaagcttttgttgtctgtgcacttgttgtttaatcttcaaacaatcgtcgagttagttaaaagttagcttcgtcttaagaattgaaatggctaggatcaggtatactgctaggctgacaaatgaaggtgaagagactgaggcaactgtgatagccccaatctcagaagtaatgaggcactttgggttggttgttcaagagggagaagagtctattcccgagaaggatgacgttattgccgaagctgaacatactaatgcggaagttgctagtgatgatgaagaggatgatggcatagagtccgagcaagcctagccaaattgaatttgggaaatccactatgaaggtagaagatttagttttaatgaagaagcttggatattttggaaaaatgatgatgagttgataaggttcgccagagacgaagtggttccaaagccaagatatgatgaagttgttgtttttaagagcttcttcagagcagggcttcagttccctctgtatgaaatgatgggtgaagttttgaagaaatttgaaatctatcttcatcaactgactccaaatgctatagtcaagcttagtgtgtacatatgggctctctgaagccaaggaaggagtgctaatgttgaaggattctgtagagtccagaactccattactagaccaaggcgagagcagacggtctgcaaaagaactttggatgctacaattttgcataccaaaaggataccgcaccaagtggcccactggctagacaagtgaatggttttatgtgaaagctgatgagaagagaagggagaagcttatgagtatggtgatgagtcccttgaaaccgaacttcggcatgacaaggccattatgcaacatgcaacttggctccccatgccaactagccaaagtagaatttagggttatgggccgagcatatcagtactcgggacctagttcaagaatactcgacgtacaaaattttattaggtgggaggggaatgccgaagaagaaagacgaaggaaagaaatttgagattgttagacttccatatcgctttaaatttcagaaaaccttcagcggcccttgtgccgaattgttggaggtcattgagacaatgtgtaatgaaatacttggaaattatactgacaaagaggaccaactaatgactgttgccttcggcacacgagagaaacaaatgctaaatcaagtgatggatgcccttgcctttgagtatcctgactatgatagacttagcgaagaggcgggggagtgaaaaagaaaagagtcgtaaggacaagaagaaaaggttaacaaaaagatcgaagttaacaccagaaccttcagcatctaagaaaagaaatattatatcatcgagccgcgaagaagaaagatcttctccgccgaagcattctgcagagaccccttcggcaacttctattggcgtgacagaaattttagaggtaatgactaaacccttgctttcactatgctaagtcctctaggatcagagctaacaagcttattacagccacagaagaaagatgttgttggaacttgctctcagttgcaaggggatccaacaagggtgaacaatggcgttaacagggttctcgcgctcgatggcaatagctctgttaatctggcctct

SEQ ID NO: 29459 - DNA, 1308 bp, Zea Mays
atctcgggcgctactgatggaatatggatgggcaggcgaaagagcaggaggagcagaagaagcgcggtttgctgacgtctccatcccatcatgtattatcctcagcctaccgtctccttggcggcggcggttgccctcctccgcccctcactccgccgccactctcaaagggcgtcatcccttctccgctcctccacgccgcctccatgggttagtgcgaggaggaggacggccgtctccgacgacttcttcaccgtcgagttggacgctactggagtggaaccggaaccggattccatcgacgacgggctcccctctccatgggagggagctgtcgtctaccgccgcgacgctgccgtccagcacctcgagtacgccagcacgctggagcgcctcggcctaggggacctctcctcccccgactcccgcgcgcgcgccgctgacctgggcctggctggagggaccctggacagcactggcgcgcagcctcggacccccgtgctcgtctccgtcgacgtgaccaggcgccgcggccgcctgcgcctggacggcatcgtgcgcaccgtcatcaccctcggctgcttcaggtgtgctgagccagctcctcaaggtatatttgccaatttctccctgctgttgacagaagacccagtagaggaggaaccagacctcggcacgatttttcaagaggacgacgacaaaggtggtgcttcgctagcctgcgccatggatggagatcaagatatcgactgggatgaccggctgcatttcccagcagctgacaaggaaatcgatatatccaagcacatccgggacatgattcatctggagatcaccttggatgcagtgtgcaaccccaactgcaagggtctatgccttacctgcggcgcaaacctcaacaccaccagcagctgcacatgcaagcccaggaacgtccaaggactttctcctctcaaaggggttttcaagtgatgatgcggataccaaagtttgtacaaccagcccaacttcatgtcatgctattgatgacgatggaagaacctatttttggatgtcctgcgatgcaagtgaaattgtctgctgctctgctgcttaacaactccctaaacatatctgggtagcttgggactgcattggttggtgctatttcaattggtttatttgtgcctgagttattgtacccattaataaattgatgattattttgacattggtgataagttacagtaaactaaccaaaacagaaacaactgatttccccctaatgtacacagcttttcaaatatgtgatggatgtttcctattaaa

SEQ ID NO: 29460 - DNA, 3987 bp, Zea Mays
atggaggcggtgaaggcgtcggaggcgcgccgcgacccgccgctgctgcgggcggtggagctgtcccgcgtcgtcgccgaagagggcgcgggcgccgagctggccgggatcctcgtctccaacctctgtttcgcgcacaactcgccctcgctctggaagctcctgggccaagccgtcgcgtcccgcctcctctgcccgctccacgtcctcgcgctcctcacccctagggtgttgccgcagcggcgagcgcagcctgaggcgtatcggctgtatctggagctcctcaagtgtcacgccacgtcgtcgttgctggcgatggaggctgggcctaaccgtgacaacatactcgaggattgtggctttccatctgtgatggcagaggggcaagagagtgtatatgccattgaggggccacagcctatggacttagacattaaaaggggatctactgagaaccaaaatgagcatcgcgaacagttacgccggaagaacactttcatggctttggacgtgttgcatatgatggctgctgatagaaagattcaatcatttctgagcttgatattcctgaacatgcctgaaaagttcagttctctacgccagaggttgagttctattgaagcacacaaggtgaccttggagactctactgccttctggacacaaaattaatgacttgttaataaacatctggagagtttgcaaagcaggctatcaaccaaataacaaacacattctgggtgttcttggtaatatgggatccggtggctcccttctgggccagcttactggagctgggaggcctgcctgctggataatatttgatatatatgtggagaatgcaattgatgggaagcatctaagtgttacatcagctatcgggattataaaagaaatgaccaagacaatgcaagtgcttaatgaagcaagctggcaggaaacatttaaagctctttggatttccacccttcgtcttgtacaacgggctagagaacctcttgaaggaccgattcctcatctagatgcaaggttatgcatgttgttagctcttataccattatcaattgccgcgattcttcaagaggaaagtgatatgtttggagttgaagggaacaaaattcttccacaaagacaagggcttatatcatctctccaggatctgatccagtattcaggacttcttgtaccaccttcatcagtggtgaatgcagctaatgctgcagcctcaaaagcagcaatatttaaggccaactataaggctggggctggcaacactagcatgatggaccagactgactcttcaatgaaagctgctgggaacatgctccatctcattatcgaagcctgtatctcgagaaagttgattgatacatctgcttacttatggcatggttatgttgtaccatctaggactttaaaagatacagctttgccccaagaatccccctggctgaactttatgaaagggtctcaactttcagaaccccttattgatgctctggtcgcaactcctgcttcaagtgttgcggaattggacaagttatacagtgtagcaacaaatggttcagaagaagaaaaaacagctgctgcaaagattctttgtggcgcatcacttgttcgtggctggaacattcaggttccagatgttgccgtggctttaatgccactatgtgaggcttttgggtcaatagcaccgccacctaatcacaagtctaccattcttggtgaaacatctgtttatttggtcttctcctgtgcatttctttgtcttcttcgcttgtggaagttttatagaccccctcaagagtattgtcttactggtcgtggaggctcagtaaagctggaactgactctggactatctgttgttgatgcacaataatcgcattttctcaaattcgtctgcccctaatagggattcttacaacagtatgggctcagtcaatgaggtctctgctcagccgatttatattgattctttccccaagctaagtgcttggtatttccagaatcaagcttgcatcgcctctacactttctggtctttgcaacaaaaaccctgtccatcaagttgcgaacaaaattttgaatatgatttgccgaaaaatgaataaaggtggagtatcatctagtaatctttcatctacttctagtagtagcgttagtggttcttctgtaagtgcatcggatgattcttaccaaaggcctgctgttcctgcttgggaatttttagaagctgttccttttgtacttgaagctgttctgacagcatgtgctcatgggcggctttccagccgagacttgactacaagcttaagggatcttgtggactttttgcctgcttctcttgctgcaattgtaagctacttctcagcagaaattacacggggaatctggaaacctgttccaatgaatggaactgaatggcccagtcctggtgcttctcttcattccattgaagctgaagtaaaggaaattcttgcatctgctggtgttcagattaacagctgctatccacgtggtgtgccgccaatgcttcctttgcctatggctgcacttgtcagcttgacaattacatttaagctagataggagtttggagtacattcaaggggtcattggacatgcactagagaactgcgcagggggaagttcctggccaagcatgcccattatcggggcattgtggacacagaaagtgcgaagatggcatgacttcattgtcctctcttgtatgcgttctccatttggcagagacaaagatgcagttgcgcagctcatccgaagctgcttttcgtcctttctgcagtcatcatccagtggttctgacataatcgcaaaccgtggagttggggctttattaggggactcaatcacggatcaaggtcttaggctcccaatggcacctggtttcgtctacctgagaacatgtcgaactttccatgacacatacttcgttagtgaagtgatcctcaagcaagtgattgaatgggctcacaaacttgcaaatggatggtctttcaatgggcctccgcagttgaaatcaggccggacaccactatcttgtgcagcatctatggcgcatcaggtcgcgatgcttggtggtggtctcctatgcatagcaggtggaccacttgtggtccaggtgttgtatgaagacacactaccgacactgctgctgtcagccagagaacagagtttgaaagaccctgggccagtttctagcacactccaaggttacgccatggccaacatgctcttttactgtggtagcctactttggggagcggacaggagttctcctgtcatgaaattgtctttcctctcgaggcggccacgggtggtgagaaaccacatggatttcatagctggtgtactggacggacacattcttctgggctgtgacccgggtacctggaaagcgtatgtttctcagtttatgttcctggtggtgaagtttgttccatcatggttgccggacataaagctggacacgctaaagaagatagcagctggacttcggagttggcatgaacatgaccttgctctatcccttcttgagcgaggaggaccacaagcaatctctgttgtagtcgagacctttctgtgatcctgccatttggacattttgccccccacctgacatcgcagccgctgttagggtttgaagtcggtggtctgaggtctagctgaagtaatcaggatgacccttccagaattccacttgagcaaccaggataactgatgtttttctcatgtatggcgaacccattttgtttttgtgaattcaatacggaagaacattcaacctactagagtctagagtgtattgacatcagccctaacatgtaacctatgggaatttcattaactttattgcactgacttcagccctaacttgtaacatacgggaatactctatcgtgttttatatcggcgttttagttgggataaccgaactttactctccatggttcgcatcactcttagg

SEQ ID NO: 29461 - DNA, 1537 bp, Zea Mays
ctgcaggggcggtgccaagggaggagaggagacgtgcaggttggagattgttggcggctaggttagaacaggagaggagagggtactctaaattagactgtagatgggctaaaaaaggcccaatatttaaaccctagccgggatgaccaggacacataactcggacgactagtcgacgattagtcggacgaccaggacgactaggtcttctagtcgagtcgtccagcaaatcgtgtcctaattgccgaccagcccgactaatcgcgattaatcgcaattagtcggacgacttgaaatcattgcttgcaacccttaaatattatgttgatctatcctttgctccaaaaatcatttctagtgacaagatttttgtcagtgcaggcacttacatatgcagattgttcaagcgctcctatcatccacctattcacccaggtaaggttattccagtgataactaatagcagttcatgttagatcaatcaatcatatttgagttctaaatttttattaataaaagggtaaccaattgcatggattttcttcttctgaaaatgcttatgcattaatatagtccacaaggcccaattgtctcatgtgataagataaatatggttccaataaaaaagggcccaaaatcttgtgccatgtaggtcattagacatgcgacccacaaccatgctgccctgccaaagggatctgagggagctggtgatgttgcctgcagacaaactcagggaagcaccacctcaactggtggggtactcgagaagaagtcaaccccccctccccctgtttgcgcagctgtcacacaagatgccgccagtggccaatgccacccatctgctacggatagtctgtctctaacatcagctgtaataccccttaccggtgaggaacgcactaggcccaaatatttacaccgatacaggatagagactgtgtggaacaaggactctaacaaagactatatatgagaacgaaaacaaggacacatggacatgcatctaacaaggaaaggttcctggattattttcctagtgtttttttacataagcgtctccctgatatatggtcttataagcaagagcggacggctacaagtgaggtccccacacacatccatgtattaattatcaatgaacacatgtccccttaaaatatcccacattgcgctactggtccattacttcacttgcctctagttgattttcatggtgcgcctgcagctgcaggtgtagcttacatggtaggcagtgagtgggataaaatgatacaatggaagaaagaggtgcacagtgggaaagtatcccaggttgattgactactgttttgtagcttagggaaagtagatcttttactcccttcagtcttgatgctggaatgagattaactaatgtgaacttgtgtagttgcaagtattgcttctctcttttttcttgaagggctaatattgtctctggtttgattccttttgcctctatgttagcaatatttaaggataatacagtaacaaagttttattcattgcatgttgc

SEQ ID NO: 29462 - DNA, 1168 bp, Zea Mays
gacgacactgcacacctctcaccagtccccacacggccacaccacacccagctgtccccatcgcgcgcacactctctcggtctctccctcccagtcccagcgtttgcggtccagtccagagagctcgagcagccatggcggctcccctgttcctcctcctcctgctgctggctatgttcacaggctcaggtgagcgagctctccggatctgcatgctgctccctgcggcgcttaacgtttgtgtgagaagatgagacgcggcgttctgcgtgtgcaagacgggcgtgcccgaccaggcgatgcaggcggcgatcgactacgcctgcgccaagggggccgactgcgcctccgcctccaagggcgcgccctgctacggcaacggcaacaaggtggccgtctgctcctacatctgcaacagctactaccagagccgcagcgccacgggcgccacctgcgacttcaacggcgtcgccacgctcaccggcaccgaccccagctccggcacctgcaagttcgcctccggccccagcagcgcaggcaccggcggtggcatgggcgctggcgcgggtaccggcggtggcatgggcgcaggggtcgcgacccccgggagcgccctgagcccaccgttcggcggcactggcgcgtacggcccgtcaggggcaggcagcacggactacaacgacgccgtcgccccgcgcgccgccgggctgcacgtggtggctgccctcgctctcgccgtcgccgtcgccgcacctctccaccgctaggggcggtgccatggcaactgggagctggcgggcacgacactcgcagacgggatcccgcctcggcggcccgccagcgcgggctctggtcgatgtccggcgttagtgcgtgcgcgtacctgatgaagtgatgatgggttttgatcgaccagccgtcagcgtagtgcggtcacggggtttacagtgttattcgaactgacctctctgcttcctcgtgctagtagtggtggctgccatgtgtgtgtgctgctggtagagaactagggattctttttttttcttctgtcgcttccttgcttatatgtcccgtcgtgttaggctgtgtttactatgcagtgtttggtggtggccgctttccatgagaatatttggtgtgcgcgctcatgttgcactgcacgtttggc

SEQ ID NO: 29463 - DNA, 3053 bp, Zea Mays
atggcgacggcccgggggatgaccccggctgcggcggacgctgtggaggagctcacgcggctgtaccgggagctgcctccgcgcccggccgtggaggaggtggaggcggcggcggcggtgctggcctcggcggacgcggaggaggaggcgcgcctcgccgagatcgccagggaggaggaggcggcgcggcggaaggaggccgcgcacgtcgtcgagctcgagaggcggttcaagctcttcgacgacctcatccagagggcgtcgcgggtggtttctccaggtgatggtgctaggggcggcggcgacgccgtcgtcgacctcgaggtcgaggcgaaccggaatcccgcgttggctgctgcggtggccgccgcggcaacagagatagaccgtggaagcaagggtggcttgggattggaaccgaagtccgtctcgtcgttgcatcgtgctacatcggctggtactgacacagaaaagctgggccttatccaagtcgcaagccttatagagtcatcggcaaagaaggggactacagagctcaatctccggggtaagctggtggaccaagttgagtggctccctgtctcgcttgggaagttacaggatgtcacagagcttgatctatctgagaataggatcatggcactcccatctacaattggtagccttagatacttgacaaagcttgacctccactcaaaccagctgatcaatctgcctgatacctttggggaactttccagcctgattgatcttgacttgcgtgcaaaccagctaaagtctcttcctacatcatttggaaatctcatgagccttgccaatcttgacctgagctcaaatctgttgaaggtccttcctgattgtttaggaaagttaaaaaacttgagaaggttaattgctgagacgaatgaggttgaggagctaccctatactattggatcatgcacctcccttgtggagcttagattagattttaatcagctcaaagcccttccagaagccattgggaagttggaaaacctggaaatcctgacgttacactacaacagaattaaaggtctgcctacaacaattggtcatcttaccaggttgagggagctggatgtcagtttcaatgaagttgagactatacctgagaacatttgctttgcagccagccttgtgaaattgaatgtcagcaggaactttgccgacttaagagcccttccaaaatcaataggggaacttgagatgctagaggagctcgacatcagtagtaaccagatacgagtacttccagactcttttggtcatctctcaaagctacgtgtgtttcatgctgatgaaactccactggaagtaccgcctaaagaagttgtaaaattaggggctcaggagctggttaattatatgaagaatatggctgctgcaagggaagtgagccagaaggaaacagatgagaggagcttttggacctggctccgctcactgtttggttgcgaacagaatcaaggatcgggaccagttccagtttagctgaaccatttcatctgcatgtattgtcatgaaattgttcagtcttggtccatctctcaagtcagcgatgaaacgaggtatggttatcattattattttccacttttttgtttgtgtatacaatgtatatatgtagcgctttcttgtaaaggttggtttatttctgtgtaattcatctgtatgaaacactgtcatgttactcaacgaaacacgagcggcccaacatttctattaaatacaggatgcattctagcacaatactatgttaaagtatcttaagtttaaggtcctgtttgtgagatctttacttcaagaatttcgggtctgtttcagcttttatccaaacaggtctagctcatatagcttttaaaaaactgaaactaaatcagttttatgaaattttcgaagctccttaaagggcgctttaaaaacactgtttttataccttctaatgagcagcttcattgttagcgaagaataatggcgacccttcctttcccgcctgacccttcccctcccctggacctctcctctaccctcgacgcctcttcacctacctacaccagccccacgtcggtgatcattctggtcccggcggccaatcatctctcttcttccccggcgtcggcggggccctctgggtgcggtggtcattccaaggcgggcatggcgggtgttggtgctgttccggtgggcgcgggcgtgggtgctgacccgtgggcgtgggtgcgattccgcatccgagtcggctctcctataaggaagcgctggtgtcctcacaaccctttgtttctcatttcgtgggagggagtgctggtggcggctgggagactgtccagagtcgttgtggccgccgcttggctcgccgccctcctcggccagtgcccagacccgttccggttgatctgcggggcagatgtttcaactgcttctctgctgagcaccgggcgacgaggtgttcgaaccatgttcggtgcttcttctgcaggcggccggggcaccgtgtgagcgagtgcccgcgcaggcagactgtggcagaatctcccaagttattgggcccacatgcacctgcccttgtctcaaagaccttagacgactatgcatgtgtaccggataacttaacaggatccgtccgagtgtcctaaggacctcggataaaccactcacaaccaggatcacaagattaagtaaacacaaattacacaccaacattttgcagcggaatttctttattataaaaggttacaagttacaacaaatttatattatgtttatcagagtggttataaaagtgatttaaagaaataaactttgaaatgttataaattgtttataagtttgaaatatatgctagctcaatgcaatcctcaataagaagtataggagagttactttaacctataagaaggccgagcccaccggcacttagcatcatccacagcagcacaattctagttcctgcaacaacatgggtttgaaaaccctgagtacggagtgtactttcgcaagttttacccgactaaggaaaaaagactctaaag

SEQ ID NO: 29464 - DNA, 1940 bp, Zea Mays
aactaattttagcggttaactactagttagctactgaagattccaaaaccaaccccccatccacgccgcgatgctccgccgccgccgggcaccgctcctcctggccgccgccgccgcgggcgccgcgctggctgccacctctccctccggcgaaaatggtcgaagcgtcgcctccgcgctccaccaagccgttggctgtcgcagattggttttgtgatggcagattacaagtattcgctgaggggtctggatgctggatcggcggattaccgtgttaagctctccaaggttcatctgcggtcagcaaaaaaactacttaaactatgtgaagtgaatggagggttttatgtcaaagctggtcaatatgtatcttcactaagacaagtgccaaaggagtactcatcaactctctcctgcctgcaagaccaggcaactccatccaagtttcaagatattaaagcagtaatagagcagaactttggcaaggaattgtatgacatgttcatcgaggtcgattgcataacaatcaagatgtagctgtcaaggttcaatatcctggattggagcagcgaatgaagatagacattatgacaatgtcattcttgtcaaaaatggtctcttgggtttttcctgattataaatttgacagaatactaattgaatttgagaaatccatgacaatggagcttgattttacgcgggaggctaagaattctgagagaacagccagctgcttcaggaaaaatagtgttgttaaagtgccttatgtgttctggcaacttacaaccagggaggttttgacgatggagttttgttatggacacaaggttaacgacttggacttcctgcggaaaacagatattagccctacaaaggtagctaaggctttgattgaactctttggtgaaatgatatttgtacatggttttgttcacggtgatccacatcctggaaatatattagtttctcctgaaggccatgggaaattttcactagttctgttggatcatggaatttatagagaattggaccaaaagttcagattggactattgtcggctatggaaagcactgatattgttggattcaaacaaaattctggaattaggcgaacagtttggcgttggcaaatatgcgaagtactttcctgtaatattcacagggagaactatagaaagcaagtcagctcttggcacacaaatgtctggtgaagagcagaggcgtctgaaggaggacttaaactctcttgggatggatgatatatcttcatttatggaatccttgccaccggacttctatgtcatactacgaacagacggactattgaggtccattttagggaatcttggggcaccacgccatgttcggcttctcacttatgcaagatgtgctatacacggtcttgagaagcagcacaaaatggagtctggtgcaatcagacgtatgttcttgaatgtcaaaacaaatgtcagctatctccgtctgagagtgattattgaaatagcggtattattagctaaagcaaatggtgccaagcagaaagtcgtgaacaaactcagacagatgttacaggagaccagtcaaggttttcaccgccgtatgtgatgcccagaagtcagcgacgtggtgaaattaaggctacgagaaaggtgggggaagttggaagtacgtcaggactccggagtagaatcataactgtgattgttctgtttcaacttgtaaattggaggttgtattgtgtcaaggagtccaatcataactgtgagtgctctgttgtaacttgtaaattctacttctacgtcgagtctgcgctcgagagtccaggtgttttttttttgttggaccaagtacgcatcccaaaataagtctacatcccaaaattcgaggagtcaaacaaatcttaatttgaagtttgcctaaatttataaaattggtattaac

SEQ ID NO: 29465 - DNA, 962 bp, Zea Mays
ggctgacccgaccccaaggccgaacgggggaagggcggcagccccagcctccgggtagcgcagcggggccaggagctcagctccccgcctcgtctgggtcggttcggccccgctccgacgcgtggtgggcgcgagcgcgaccagtctgcgacccccggcttcaggtccgttccgcaccccgcttcgtccaaccaatcgccgccgcgtctcgtcgcatcgcctccttttcccccgcccgcgcccggacggcggcctcgcctcgccagaagaacccaggctgcagccgaaacccccggtctccgtcatccgaccccgcctcgacggcccagatccacttgccgccgctgccctcgtgctcctcactccctcgcctcctccggggccgcggctccgcggcgaagacagctgcgagcggggcggccatttctaggcggaagcgcgggcggctgggctagcagattgattggtttgagtggttgggtcggctctaggaaacgccccgccgcggcgatggggtgcttccattccacggcgaagcggcaacaccctggctacgaggaccccgtgcacctcgcctcccagaccgccttcagcgttagtgaggttgaggctctattcgagctgttcaagagcataagtggttcggtgattgatgatggcctgatcaacaaggaagaattccagctagcactatttaagaatcagaggaaagaaaatcttttcgccaatcggatatttgaccttttcgatgtcaagaaaaggggtgtcattgattttggtgactttgtccgagctctaaatgtgtttcatccaaatatcccaatggaagaaaaagtcgatttctcgttcaagctatacgatatggatggcacagggtttattgaacgaaaggagtcgctcccgccagctaccgtcgtcctcagcccagccgctgcgccgcagaacgcgcggagctctcccgg

SEQ ID NO: 29466 - DNA, 900 bp, Zea Mays
caaaagggcaacctgatgcaacagatggtgggccaacaggaagagagctgaatatcggacaagcaagtttccattcagaaccgagcaacgcttcaaaccagttcatcccagaccaattgatgcagggacattatgtgcttggccacaatttcgggccaggtagctcacataaccttcacgacaatctgaaccagttcgatcaggcttcctcggctcctaccttgcaacaacagccgtttaccgggaatggtcaactgacccagggatatcctggtgatatgcatgcgttgcagtttgtggagccaaccccccagattgaccatcagaatggcgatgagggtcagtcgtcaataccagtgtgggattttctttgagctgcctgcctctggcactttgccatcctcccctccacgcgagaggccgcgtttcaccctagttgaaagggcatgtggctcgcgagaagagagattcagatataccggaccgtggttacctattaattagttgtgcatcccaaaagggcattcgtttttatttgtgtcgatatagtactccatccgtttctttttattagtcgctggatagtgcaaaattgcactatccagtgactaataaaaagaaacggagggagtacgtatctgtaaatactagtttagtctgctttgctcgcccggtagatggaaggcattgtaaagtttagaaattacaaagttttgtacctaggagtacaaggtttataatgtgatcattgcatgaagtttctaagttcattttttttgtctaggagtagaacgtttggaacgtgctaagcacaaagcacaaaattatttaacttagagtccatagtttttggatttataaagttcttgagtaggagtacaaagtttataaatgcgcgaa

SEQ ID NO: 29467 - DNA, 3805 bp, Zea Mays
gtttccctaaccatttcactgctccacgctccagcgaaggcacacaaccgctgccgtttcttcatctcccaatcttcatcttcctcgcagcgtcccttgctcgcgttcggcacataggcgacggcggcggcgctcaggatcgggctctcggcgacggcgctcagggtcgggctcttagcgacggcgtcagcggcttcccctcccgcctcccgttagtcgcctcgcgccctcgcctccggtcctccgcccacccgctggtgaccctgcgagcatgaatcactgacttgtgaaccattacctttatgggaaaagaaaaactccataagcagccctctggccgtctgattgaatctctcaaaatggagaggatgaggaacatcctgactcatagatatccatatccgcatgaacactcaagacattttatcattgctgtgtttgcttgttggcttttcttcatttcctcggataatttgcaaaaccttataatgaagttggacaagaattttaaatggtggtccatgtatgcttgtttgattggcttcttctatttcttctcatcgccttttatcaggaagaccatcaaaccaaactattcgaacttcaatcgatggtatattgcatggatattcttggcagcactataccatctgcccagttttcagtcaatgggcttggatttgcggatgaatctttccctcttcctcaccatttatatttcttctctaattttcttgatggtcttccatatcatatttcttggcctttggtatttgggttttgtttctcgtatggcagagaaaaaaccagagatgcttactataatacaaaactgtgcagttataagcatagcttgctgtgtgttttacagccactgtggtaacaggactgtttcaagagacaaatctattgatcgtagaactgctagctggattgtattctcactttggacaaagcatgatgacaacacactgatttcaaggctattgcgtatgcataaatttaaagaacagatttgctcctcctggtttgctccagttggttctgctagtgattaccctcttctctctaaatgggccatttatggagaattgtcttcaaatggatcaggttcctccaatgaaatttcaccagtctactctttgtgggctacattcatgggtctttacattgccaattatgtcatagagcgttcaacgggatgggttttaactcatcctttgacaatttcggagtatgagaaattgaagaaacagttgaaaccagattttgaggacatggttccctggtactctgggacatcaactgatttatttaaaactgtctttgacctcatgatatctgtgactctgtttgttggtcgatttgacatgcgtatgatgcaggctgctatgaataaaactcctgatgaagctaacagccatgaccttttgtatgatcatcttgatggaaaagatgagctttggtttgacttcattgcagatactggtgatggtggcaactctacatatgctgtagcacgattacttgctcaacccttgttagttataaactctgatgactcgaggctaacatttcctcgtgggcaactgcttctcgttggtggtgaccttgcgtatcccaatccatcctcattttcgtatgaacgacgttttttctgtccttttgagtacgctctccagcctcctgcttggtataagcctgaacatatagcactggagaagcctgaacttccccttggggtttctgagcttaggcggtacagaggaccacagtgtttcatgatacccggaaaccatgattggttcgatggattaaacacattcataaggtatatctgtcataagagttgggtgggtgggtggttcctacctcagaagaagagttattttgcattgaagcttcccaatggatggtgggtttttggtcttgaccaagctcttcatggtgacattgatgtttaccagttcaagttttttgctgagttgtgtcaacagaagtatgcaggtcggagaaagtgattccgtaattattataactcatgaaccaaactggctccttgattggtattggggtgatagcactggcacaaatgttgcatatttgatacgggagtaccttaggggaagatgcaaactgcggatggctggggacctgcaccattatatgcgacattcttgcattgagtcaaaagaaccagttcatgtacaacacttactcgtaaatggctgtggtggggcctttttgcatccaacacatgtcttcgaaaacttcagggtattttatgggaacaagtatgaaacaaaatctacatatccttcttaccacgattctagcaagattgcacttggtaatattttgaagttccgaaggaaaaattggcaatttgatgtaattggtggttttgtgtactttgtcttggttttctcaatgtttccacagtgtgactcatttcacatcttacatgaagactcctgggctggtcgtatcaatggtttcttcactgcaatgtggaatgctgtttttgagattctagagagatcttatgtgtccctaggtggtgttgttactctattgatggtatcgtttttctttgtacccacgaaactgtcccgtaggagacgtgttttgcttggttttcttcatgccgctgctcatcttacttcggcagtgctactgatgctacttatggaattagctattgaaatctgcattcggaaccatctattagcaacatcaggttaccataccctttatgaatggtaccgaaaagtggaaagcgaacattttcctgatcccacaggacttcgcgctcgtctcgagcattggacctttggactttaccctgcatgtattaagtacctcatgtctgcattcgacatcccagaggttatggcagtaactagaagtacaatctgcaaaaaaggaatagagtcccttcccaggggaggtgccatcatctattatgtctgtgttttcctgtacttctgggtcttgtcaacacctgtcgtatcgctggtgtttgggagctacttatatttatgcataaactggttccatatccatttcgatgaggccttctcctcgctgcgcatagcaaactataaggcattcacacggctccacatcaagaaaaacggagaccttgaggtcttcaccctggctgtggacaaggtgccaaaggattggatgctggatccagactgggacatggaacccaagcagccattccagatgagctacaccaggaaattcccaagcaaatggagggctgcgtcgggccttgacccaatcaatgctgtgcgcattgttgaccggtttgtcatcccgcgaacgccctcaagtcctacaacaccaggaggctctgtttcaagtcctacaacaccaggaggctccgtttcaagtcctacaacaccaggaggctttatgagatgatgttcatgctgctgtgaaatataatgtaatgtacacaaggatatcttcgacttctcgggagaaattgtacagtacacaaggtcctctaacataccacgggagaaatagttgggaaaaaaaatagagggcaaatctccacaagatccaaatgttgtacatctggtgttatatcagttgtcctgatcaggtgtaatgataagtttttcaaacttagggtgtgattggtaggctgaatccggccctgcctggttgcatggatgcagcctgaacatgtttggttggttggctctgtgttgggccaagtactggagatacatttcctggccttgggcctgggaatttgtctccaccattgccactctgctgtccg

SEQ ID NO: 29468 - DNA, 2089 bp, Zea Mays
ccagaccccaaccaacggacgacgactccgtccagaattccagatcacgcatatctctctccctccctctctctcctcggcctcgccgcccctgtcccctcctacactgccgcgcgcgcatcgtggaatggagatccctccggccatgaagtgatctatttcttcgtcgcccctagctcggagaaggagaaggagaaagagaaagcaggagcccgctcgcggcgaggcagcaggatgtcttcgtctaactcgccctgtgccgcgtgtaagctgctgcgccgcaagtgcacgcagggatgcgtgttcgcgccctacttcccgcccgacaatccgggcaagttcgcgagcgtgcaccgcgtcttcggcgccagcaacgtctcgaagctcctcaacgacctggaccagctgcagcgggaggacgccgtaaactccctggcgtacgaggccgacgcgcgcatccgcgaccccgtctatggctgcgtggcctacatctccgtgctgcagatgaagatcaaacgggtccgcgacgagatcgccaacgcgcgcaaggagctggcggcttacattgggaccgcggcctttgcgccttacgtcgccacgccgcagtaccaccaccatcagtacgcggcaggcgccgtgcctctcgccgtcggcgtcgggccgcagcacggtcacccgcaccaccagcagcaacagatcatggtgcaccagcacctccaccaccagcagcagatggcagcggctgccgaggtgcagcagcagctcgctgtggccgtggaggtcgcgcgagagcaggatctcatgatgcggcaggccgcggtatacgcgcacgccgtgcccagcggcggccccacggtcgccgttgtgccgcccgacgcgctgccgtacgagggcggcttcctcttccagcagcagccgcccccttcgcaggcgcagaccgccgtggcgctcacgtaccagatggagcagtccccgccgtcgtcgtcctcgggccagtctcaccccgaggtgtcgcagcagcacaatacggatggcagcgacgagggcagcggtggcggtggtgtcgtgccgccggcctgatctgagtcgtctcgtctgacggcgcgctgcacgcttgcctctcattcgagcttgctttagccttttgctttcttgtgtttggtgttcgtaatgaatctttttccccttccgtcgtcttcatcatatggccggcgtacgtcttggcatcgtctcggtctagaatccatgcacgtttcaagtggcaaaattccaattatttccctcccgaagccagactatagctggattcttatcaaggttccacatgatcagttgcctttcttcctcaagagttagagccaaataaatgctggacagaaagagtggtaggaaatggcctggggacagatactcatcatatggatcagtgtaacacagagaaattaatggtgggaaggtggaggtagacagaaacagcagagagaagcatgcatggtgtgcttcagcgcaggaggggagcagtaaatggtgaagtaagataggaaacaagatgcatgcaagtagcttgcaatttgcaggagggagcagcagcaggcatgaataaagaaatcaacacgaacatgataagcaactcatataatatactgactccgttctcgaatatttgttggccattagtttatttttaaactaaaacatgacataaaaaagaacggagggagtatcttagttcacttgtgcatttggtgttgaacatatgtttttttttcaccgcttaattttattattattctttcatcttttcccctccttttctgtttctcattggtaaattctttctgtcgtcttgcattgtgtgtataaagaaatagaatcctttcatttatttgaacataaatggatggaggcaagagctagttagtcatcgttttaatttgtaaagtcaatgttgttttgtctgaattattattatatatccggtagccttcatgactatggtagggccaccaggctcacttcgacattctaaaaatgagccctaccatatagtcccgtcaatatgtatcagtttaaataagttaaatgtgtg

SEQ ID NO: 29469 - DNA, 3206 bp, Zea Mays
aataatgcaagtggggtcacggcaaaggtgtggcgcgtgcgtggacctcgccctcatctcgtctcctccggcggtccggcctgtccaataattctagtattccaccgccgcacacctcctgtcttccttcaccttcgcgctccgccgccgccgtcgattcgtgctgctctcacccctaacctgtccaacatcgccggggagggaagcagcagaagaagctccccttacctccggctatcgcctgaggataaagtggggtctgtaggggagtcttaggggggagcaaaagggataggatagggagagatgaagcaatcaatttcttcgtccgccttcgcccctgcttacgtccccgctactaaccctaggatcattctgtcttttctcgtttcttatccgactcttcttcgttttatgcctatcagttatgaggttgaacgccttcagaagcttctctactagattagtgtaaatagtagacttgttcgagtttagcttggctggaagaattagtctctggtccgtgtttatatctgctagcaataatggctgcgatgaacggagaggtattgggtgaatgtggaaggaacataaatagtctcaagagaaagcgggagagccccgctgcatatgctgctggcgtattctgcacctctgaattgcatcagcatactgtcaatgattctgctgttaggtttcatcttgataaagaccgtaaggcaaagatcgtgtgccacttcaacaagcaggttttgcagagctataagaaattcatgagtagtgcaccacctaagcgtattttgcttcgccaaggtgctgtctggaaagactttccagaaaagattgtcaaattggcccaagctgacttcagggcaaaaaagatgatcacagaaacaggatatcagaaccagctatttttgctggattttgcccatatgacattcatagacacaaagacaggttttcagaggccaattgcttggatcgatgaaaatgaaaagtgctacttcccggaatcatttatacaagatcagaagttatttatgaagaaagattttggcaacggaaatcatgagtacattagtgaagagcgaaatgggacacgagaaacgaatcaccagtttggagcatcagaaagttctgctgaaagctcaaactttgagtcaagtattggagatgtttctagtcctaagagagctagggctgaaaagaatttcattgtaaaaaaatattgtgatatgggagaagctattggagaaaatgagtcatgcactttgttgcctacagcctgtaacctactaccacaccaagctaatctgggtgaggtatcccgtgctcagcgcactattgaagccgtggagaagctgttgctgcaggggatgggttcagttattgaatccaaggacattattggaatctacaggactccattattggatgaccacggacaagtccgttaccatattcaccaaaagcaagtacaggttaccggatgtcatcgtggaaacgcaaatgtccgttatgcatggcttccttgctccaaaagcactgtgcatgtaatgatgctgaatggtgttttgcaagttgataagcctcccaataagtgtgcagcctatggagagggcactctccttacaccagcaaatcgttcggatgcctgtgtgaaatactctgatgttgatgaaaatggcattgtccgtatgatgttgtgccgtgtaataatggggaacgtagaaatagttcaccctggatctaagcagtgccaacctagtaataagtattttgatagtggagtagacgaccttaaaaatccacggcattacgttgtgtgggatatgaatctgaatagtcatatctattctgagtttgtagtcactgtcaaattgccttctaaaaccaaagattcctttgtatcgcaagaaaactgtcagaattcgtctgatctatcactggtgttgaactctagttcacctgattgtatttcacaggtaagatgctttacatggggtattaacaagatagtactgtaacactagagacaactgttgctaacttgatatacagaagagttccactgttggagcagcaagagtgcagtaattcagattctgtgatttgactcaataattgacatgattgcattattgagattataacttggagctgattatattcgttatctatgatagaaacctccaaatatgataagtttccctgtgaaaccatgctattttagccacgctggagttggttaaagcaccagttaacaacttccttttatgcataaaacaggagatgaacctggaggcacctccagcattgggaggtggatgtgcagcccccatgctaggagattcgatggaaaaggctccaagctcaccttggatgcctttctccatgctgtttgcagcgatctctaccaaagtgtctcctgagaatatggacgtgattattggttgctatgaagagtttaagagcaagaaaataagccgaggtgaactagtgaagaagctgaggcatgtagttggtgatagagtgctaatatcgacgataatgcgtctccaagataagctggtggggttctgggatggaccgccagtccgccacgcaccgaacttctgaaggcctatatcttttgctgtgaacaagctacttttcaagagcatcagaacagcagtggtttgataacctgattctttttacactgttttctgaggaaatgcttcttttgtgtgtgtctatttggcagcagttacctccagtggataagcgtgaggaaccagacacatcggcgtccaaggtggtggcggaaccatgagatgggtgtcaggaggtgggcgaggaatgcagaaagggaggaaccagccgacttgacatagaaaaccctgtgggaagcagcaactatgaagcctcttgcatcagtcttgtgcatggaggctgctgtttgttctctgtatcgtaggtgtctacgtttgcgaggaaattgtatccggtgtttctctttcttcaaattaaaccacgcacatgcagctgccgtactttttggaccattgaagtgtttcgtccgtgaaaaaggctccttttaccttcccgtttgccttcctaagagcatctccagtagttttgtaaaataaaactccctaaaagacgatgtagagagttgctaaataataatagagagtaaaaaattgcatgttcttcaatag

SEQ ID NO: 29470 - DNA, 2586 bp, Zea Mays
tccgcacacgcgcacatgcgaccagagcttagctcagcttagcttatagcagtatagcttattgcttatactgtctccccctcggcttcgtcgctcggaggtgtgcacacacacaaaccgaagcccttgccctcccatccccctccaaacgcgcgcaaccatggagagtggcggcatcattgcgccgtgtactccccaatgattgatctctcatcgtctcttcttccaaccacctcctcgtcctcgcactcgcactcgcactcgcccttctctcttccctgcccggctgcccgcttgtctccccaaaatgaccagcaacagcagccagaacatgagcagctgcagcaccggcggaagcgacgcggcggtcggcggcggcagctggctcggcttctcgctgtcgcctcacatggcggcgaccatggacggcgcggccgacggcgttccggtgcagcaccaccaccacgaaggcctcttctaccctcccgtcgtcagctcctcgcccgcgcccttctgctacgctctcggcggcggccaagatggcctcgccacggcggccgccaatggtggcggggggttctaccccgggctctcctctatgccgctcaagtccgacggctccctatgcatcctggaggccctccacaggagcgagcaagaacggcacggggtggtggtgtcgtcgtcgtcgcccaaactggaggatttcttgggcgcgagcgcgagcacggcgatggcgctgagcttggacagctccagcttctactacggctgcggccacggccacggccacgaccaaggcgggtacctgcagccaatgcagtgcgcggtgatgcccggctcgggcgggcacgacgtgtacggcggcgggcacgcgcagatggtggacgagcagtccgccgcggcaatggcggcgagctggttctccgcccgcggcaatggcggctacgacgtcgacggcgccggcgccggcgccatcgtgccgttgcagggccacccgcacccgctcgccctctccatgagctccgggacggggtcccagtccagcagcgtcaccatgcaagtcggcagcgcccacgccgacgccgtcaccgagtacatcgccatggacgggagcaagaagcgcggcgccggcaacggcgctagtgccgggcagaagcagcccaccatccaccgcaagaccatcgacacattcgggcagcgcacgtcgcagtaccgcggcgtcaccaggcataggtggacggggaggtatgaggcgcacctctgggacaacagctgcaggaaggaagggcagacccggaaaggccggcaagtttatctcggcgggtatgacgtggaggagaaggccgcgagggcatatgacctggcggcgctcaagtactgggggacgtccacgcacgtgaatttcccggtggaggactacagggaagagctggaggagatgaagaacatgaccagacaggagtacgtcgctcacctgagaaggaaaagcagcggcttctcgcgcggcgcttcgatctaccggggagtcaccagtatttcccgcaggcatcaccagcacgggcggtggcaggcgcgcatcggccgcgtctcgggcaacaaggacctctacctcggaacgttcagcacccaggaggaggcggcggaggcgtacgacgtggccgcgatcaagttccgcggcctcagcgcggtcaccaacttcgacatcacgcggtacgacgtggacaagatcatggagagcagcacgctgctcccgggcgagcaggtccggcgcaggaaggaaggcgccgacgccgcggtctcggaggccgccgccgcgctggtgcaggccggcaactgcatgacggacacctggaagatccaggcggcgctgccggctgccgcgcgggccgacgagcgcggcgccggccagcagcagcgtcaggacttgctgtcgagcgaggccttctcgctgctccacgacatcgtgtccgtcgacgccgctgctggtacagggacagggggcatgtcgaacgcgtcctcgtcgctggcccccagcgtgagcaactcccgggagcagagcccggaccggggcggcgccagcctcgccatgctcttcgccaagcccgccgcggcgcccaagctggcttgcccgctgccgctggggtcctgggtgtcgccgtccgcggtgtccgccaggccgcccggcgtgtcaatcgcgcacctgccggtgttcgccgcgtggaccgacgcatgaacaaacatccgtgtcattaccagggtacggttcttttggtttgcttagagcgtgctttttagctgggtaaggttagctgcgtagcggtggtctgatcagcatatgtgagaggaactagccatgcgtgtctgctttggcctcctgcgattcctcctccagttgcgttgcgaggaggtttctttttgtaataccggggctagatagcacagcatggatctcctcctgtagccaacactaatttggagtaggatggttagtgttgatctcctaacttcaattaggaaaaatatgccaagtaagataagtttaaacctgtgcgctttgcaattcatcaatgagctgggattcag

SEQ ID NO: 29471 - DNA, 1113 bp, Zea Mays
tgatgatcggcggcgacagacgatggaagtttatgtcgtgaacacagagaatgacaagctaccgcgggtcaaatacccgaagccgctcatcttccacgacgggcgccttgccttcctgcccacccccgccgccatgcttgccttcttcctcttccttccgctcggcgtcatcctctccgtcatccgcattaacatcggcatcgttctcccttacaaggtcaacttcgtggccgccgcgatcttcggcgtccgcttccgcgcctctgggctccgcgccccgccggcggacggcgagcagcgccggggcgtcctctacgtgtgcacgcaccggacgctggtggaccccatcatgctcaccacggcgctgcagaagcccgtgcccgccttgacgtacagcctcagccggctgtccgagctgatcgcgcccatcaagacggtgcggctgacgcgcgaccgcgcgcgggacgccgacaccatgtccaggctgctgaagcaaggcgacctcgcggtctgccccgagggcaccacctgccgcgagccgtacctgctgcgcttcagcccgctgttcgcggagctcgcggacgacatggagcccgtggccctggacgctcaggtgacgatgctctacggcacgacggcgagtggccacaagtggctggatcccgtcgcgttcttcgccaacccggtgccatcgtaccgggtggagttcctggggaccgtgccgcgggagtggacgcgcgccgggggcaggaccggcgtggaggtggccaactgggtgcagcggcgactgggcgaggcactggagttcgagtgcaccgagctcactcgccgtgacaagtacatgatgctggcgggcaacgacggcgtggtcgccaagtagagagcgcctgccgtgcatgcgctgcaacagttgggtgtggtttttattatgcatatacatgctgggtatattattgtcaaaagctagttactgtattttgcatggcagcaatggatcctttggttccgttgtgtaaagaatctttgattagctgcaaaactaaacgaatactagatgcttgaatttaacttcaaatcaaaacagtatatatttcgtctgatcgttttgctgaa

SEQ ID NO: 29472 - DNA, 372 bp, Zea Mays
tcacctacagtcgactgaggcacggtgatgcccgaccacggagaggagcggcttggcagcgatgaagcgctccggtgagcaattcactccgattcgaatgcgcacagcttgattcgagggcacgaacggttttcccaggcgctggcgaatcccacacgaccctgcgccgaggacagaacaccggcacggagggtttccaccggcgacgtgacctccggtcactggattcgcggcgcggcactctttcttcaccgggcgcaggcggcgcaaggttttcacgggatgattaggtcagacatgggaacgaggtcatggtggctcggcctttatggtcgtgaggtcatgcgtcgtgtttgagcaacgggctccgag

SEQ ID NO: 29473 - DNA, 3156 bp, Zea Mays
ctcccttccccaaaacaagaactgtcaatgcatgcagtccatccagccctctctctctcatcagccgtcctgcccagcccagatccaccccatcaaccagcaggtccagtccagccatccaactccagcacagaacgagaacagcaccactgctgctgtactgcttgctgttcgcctcccagcagtggaacaccagcacttccccttcagcgtccagccgtcgaccgagcacacggccagagcggtgcctcgcttctgctttggacgcttgtgatccagtagagtaaccaggaaggaagcaaatcaacacggctgctaaaaagaaaccggcgattaaaccaggtgccgcaaggctacaaaatcccctgcttgtcctgttgcgccccgccgccgctgggttccgagggagggccagccgtagaaaggagataagaagcgagaagagagcacaggcagagggagtgagggaaaaggcgagagcgtagaaaggtgagagcttttttcttttcttttttcatccgattgctcctcgcactcgcacagtcgcgcatcttttccgcccccacctcaatctctctggattctctcgaagtttcttccttttcgagaggtgggagagaagagacgcccgcagcggcacgagcttctgaattcctgtttttttgttcctggttttttgcttttgtttctgttcttgttcttgtgtgcgggtttggtttggtttccgtgcgccttttctctttattctagtgcgccgatgacgtgaggcgccgggttttcaatacttgcatccttttcgctgcatttgtttagcgggagttcttcgaacaagcagcgctgccgctgcttgcgcgaatctttggagtgaagctccccgtcacatcagtcctcttcttccccggtcgtcgtcctatgcttgtccctgtctcggcaattctgggatactaaagaggaatcggtgaaggtccggtcttcgattccccgagatttgcatctgaatcttcttcttcttcttctcttttgcctccatggagtctcttgctgcgtgccactccatcgagcgagtctagcgcgcgcgacacagtagcagcagcaaagcagtccggtcggagaagcggaagttcgcgttgctttgctgatccaatgggggagaccaacgagctaccgccgccacccgtggccgcgccgccgcccatgatgccgatgcagtccatgatggtcggcgcaggcgccatccacccgccccacgagcagttccaccatctcaactactgcgtccactcaaatccatcctgggttcaggtggcagcacttgcattccttcactatcttgtgatgttgggttctaccgtcatgcttgcaacagctattgttcctgcgatgggtggtaacgctggtgacaaggctcgagttattcaatcgttcctctttatgagtggcataaacacactgctgcaaacacttattggaacgagacttccaacagttatgaatgcctcttttgcatttgttgtcccagtgctgtcaatagcaaaagagattgaatcaaataacttcctgaatgatcatgagagatttaaacacacaatgagaacagcacaaggagctctgattgtggcatccatcctcaacatgattcttgggttcagcacgatatggggggcatatgccaaaaagttcagtccggtgataatgacccctgttgtttgtgttgttggtcttggactattccaacttggctttccccaggttgggaaatgtgtggagattgggcttccaatgctaattcttgcggtggttgtgcaacagtatgtgccaaattacttcagttatatccatcaacgggtcaccttcttgtttgagaggtattcgttgcttctttgtatcggcatcgtgtgggcctttgcagctatccttactgctgcgggtgcatatgaccatgcttcacctaagacacaacagcactgccgcactgataagtctttcctcatgtcatcggcaccatggattaaaattccattaccattcgaatggggtcctccaatcttcactgctggtcattcatttggaatgatgggtgctgtacttgttgcagccttcgagtcaactggagcacactttgctactgctcgtctagcgggtgctacaccacctccagcttatgtccttagtcggagcgttggcttgcagggtattggaatgttcttggaggggatctttagtgttccagcaggttcatctgtatcagttgaaaacattggcctccttgggctgacaaaagttggaagtaggagggtgatccagatatcaactgggtttatgatattcttctccatatttgggaaatttggggccttctttgcatcgatcccactgccgatctttgcagcaatttactgcatcttgttcggcattgtagctgctgtgggagtctcgttcatgcagtttgccaacaagaactcgatgaggaacatctatatcatcggactctcgttgttccttggcatctcggtccctcaatacttcaacggatacacttcttcagctggcggccacggacctgcccggacaaatgctggatggttcaacgacattataaacaccgtgtttgcttccgggccgacggtggcgctaattgtcgcttctgtcctggacaacacgctggagttcaggggctacgaggccgaccgggggctctcgtggttccagccgttcctgcgccgccataagggatactcggaccccagaaacgaggagttctacagcttcccaatcagcgtctatgacgtcatcccagaccgatttcggcgctgactccaaatgaccgctgttaccccgcagctgtgcatgtaaatccccgtgagtcttgttagtcttactcctgtgacttgtagcggctggttctagggggatatgggtaaaagaatgcttagggcaattgcttggtttgactcttttcgggataagaaacgggttacatgataatgtagagctctgtgccggatacattggttttgggaagggttacagaagaatactagcaccttacatgttgatgggcatttagttgaaggcattggctatttgtttttttgcccaatatatggctgttggagcttgatctgctgactgggaaaagggggcagtactttggat

SEQ ID NO: 29474 - DNA, 3521 bp, Zea Mays
agaaaagcagggtcgtgacaggacggggggaagagagacctccactcacggactcagcccccgccggaaagcactgagcttccgagcggcccgccgcgaggaacgcgtgacctcgccgcgcgctgttgcggctgggcgggcggcgcattcaggatctgctagggttccccgccggtggggtcctggccatggcgagcccgcgctcggccggcggtgacgaggcgatctggatgaagctgcgcgaggccgggttcgacgaggacgctgtcaggcgccgcgacaaggcggccctcatcggctacatctcgcggctcgagtccgagatctatgaatatcagcacaatcttgggcttattttattggagcggaaggagttgacgtccaaatacgaacaactcaaagcttcttttgaagccactgagatcatactcaagcgagagcgagcttcgcagcagtctgctttatctgaaacaagaaagagggaagaaaacctaaaaaaaaatctagccattcagaaggagtgcatatcaaatgcacttcatgatatgcgcggggaaacagctgaaataaaagtttcatatgaagcaaaactggctgaatcccttcaaatgatggagacggcacagaaaaagtttgatgaagcagaagagaaacttctcactgcaaaatcattagaagcagactgcattcgaactcgcaacacctctctgagaagactgcaagacattgaagatcgcgaagatcagctaagaagataccaaacatcttttgaacttgagaatgcatcgaaagagaaagagattaacctcctgaggaaatcgttggatgataccaaaaaaattttgcatgaaaaggagcaatgtttactgaaagaacaagtacttcttaatcagagggatgacagcatccttgagagacttgcgtacataactagctcagagaaaaggttggaggaggaaaagttaaatctcgaagatgaaagaaaggttcttttggaagagaaaaataagctggatctgaacatgcaggcaattatatccagggaggaagctataattcagaaggaatccatacttgacaaacgtgaaagtgaactattgattctccaagagaccattgcaagcaaagaaagggctgaaatagaaaggctccgtcaagaggaagaaattgccttggtgaggaggaggcaggaatttgacactgacatggaaattaagctcacttcttttgaggaagagattgatgcaaggaaagccttgctcgatcaaagggaaaccaccatcaatgagaaggaggatgcagtggcgcaaagggaacagaatctcaaccttaggtttgctgagttagcgaacaaggaagaatctttggtgaagaaatcagatgagttaagggaggaagagaaaaggctctcctctgagagagagacactgcacattgatctgcaaaaagaaaaggaggaaattcataacatgaaattggatttagagaaggaaaaatctttctttgaggaggagaagcgtgaagcgattcaagctcaggagaatctagcaataacccaaaatgagcgagaagatttacaaagtttgcaggtgaaacttaaagatgaaattgatagtctgagagcccaaaaggttgacctaatggctgatgcagaaaggctattatcagaaaaagaaaggtttgagattgaatgggagttgatcgatgagaagaaggaggaactacaaaaggaggcagccaggattgctgaagaacgaagagtaatagatgagcatctcaagagcgaatttgatattatcaaacaagaaaaggaagatctccgtgttcagttaaaaattagtacagaatcccttgctcatgaacatgctgaattcatgaataagatgcagcaagagcatgctagttggcttagcaggatacaattagaaagagaagatctgaagaaagatattgatatccagagaaccgagttactgaattctgcaaaggctaggcagatggaaatagattcatatttgagggaaaaagaagaggagtttgaacagaaaaaatccaaggaacttgaatacatcaattctgaaaaggaaactatcagctcaaaactagaacatgtcaggcttgaattgcaaaaacttgaggaggagaggaaaaggtctatgctggagcgagagagaagagaggaagagctgtctgaaacaaagaagactatagacgcgcttaatgagcaacgcgagaagttacaagagcaaagaaaactgcttcattcagaccgaaaatcaattacacagcaaatgcagctgcttaatgagttagaagagctgaagattgaatctgagaacaggcaactgtctttgagacagtgtgggaaatcaaagcatgctggtgtggaaaacctggaagacaacggtgttcacctgtctcctgatgaggatcaaaatgctagtccaaaacaaactactgtaaagaaattggaagtgtccccttcagtctccacaccaatttcttgggttaaaaaatgtgctcaggtgatattcaaacgctctccagagaagagtgctgatcccaacaatgatatacctccaaagttgggaaatgtcaatgactgtacctccttagctactgcctattcagatggattgtttgcttgtcacctggaaaatggtgctgagaaagtaccacaagctatcgacggtctgaaagttgggaaaaagaggcttaataatgcactctctcatggtgactccgaaatttcacagccaaaacgcaagcagcaaaagagcgctactcagattttgagagtgattggaggagaaattgattccaactgcagcccatcagttctagaagaaaaatgttcaaagaatgaacatgatgcagtcccagttggtttgtgtgggaagggaccacaaaatccccaagcagagcattcagaggatatttcagtgtctgcatctgaaccgtcgaacggacctggtgttgtggactctgaggacaaggatggagcagatgaggagtctgacgatgaaggcgaggacgaggaggaagagaagacgtcatcggcgaagaagctgtggcgtttcctcatcacatgatttatttatctttgtcgtacgataaaaaatagcacggctaactgtaggttctatatgatggtaggaggccacttaggcatccaaagctctactagtttcattggctttgtcatggcgtgtcctctggtgtgtagtagaggtggaagaaggtactggtttggttgtgtgcttcgggtgttgtgagtagcgcggtggctttggaaggcgctgtggactgtctctcccccacctactaccacccatgccttttttttcttcctgtttatcttgtccgcaggaagacgtgtgtaaagtgattgacagtttccgggttggtgtgaaaatgagcctgcgtggttgctaccatggtccaagtgttagtgctcgcgtttgtgttgcttgtttgagctgtaacagtggttgctaccatgattcaagtttgattcaaac

SEQ ID NO: 29475 - DNA, 2654 bp, Zea Mays
gctgtaagcctgtataacaaatgatccaatctttacatacatagctagctgacgtgcatgattccgtgtgcaacgacaaacatacatcgcacatggcggttctcaacctcctcgccttgatcattgccacgctactgctacttttcagaagaacctccggcgccggcatttcgccggcggacacgctcaacagcgggggcaacgtcaccgatggcgagacgctggtctcggccggtggcacattcaccctgggcttcttctccccgtcgaccacggtgctgaccaagaggtacctcgggatctggttcacggcgtctggtacggacgccgtcttgtgggtggccaaccgcgaaaccccgctaaacaacacctccggcgtcctggtgatgagcagccgggtgggccttcgccttctcgacggctctggccggaccgcctggtcctcaaacacgaccggcgcctccacctcttcggtggcacagctgctcgggtccggcaacctcgtcgtgcgcgagaagagcagcaacgccgtcttccagtggcagtcgttcgaccatccgcagaacaccttgctcgccggcatgaggttcggcaagaacctaaagaccggcatggagtggtccctgacgtcgtggcgggcgcaggacgaccccgcgacgggggactaccgtcgtgtcatggacacgaagggccttccggacatcgttacttggcacggcaacgccaagaagtaccgcgcgggtccgtggaacgggcgctggttcagcggcgtgccggagatggactcagggtacaagctgttctccgtccagatggtggacggcccggacgaggtcacctacgtgctcaacaccacggccggcatccccttcacccgcgtggtgctggacgaggttggcaaggtgcgggtcctgatgtggctgccgaccagccgggtgtggaaggaatacccatggctgccgcgcgacgcctgcgacgagtacacgtcctgcggcgcgttcggcctgtgcaacgtcgacgccgcgccgacgccgtcctgcagctgcgccgtggggttcagccccgtgaacgcgtcggagtggtccaggagggaagcctccggcgggtgccagagggacgtgccgctggagtgcgccgccggcaacgggacggcggtgacggaccggttcgcgcccgtgcacggcgtgaagctccctgacacggacaacgcgacggtggacatgggcgcgacgctggagcagtgcaaggcgaggtgcctcgccaactgctcgtgcgtggcctatgcccccgccgacatccgaggcggcggcgatggcagcggctgcgtcatgtggaaggataacatcgttgatgtccggtacatagaaaatgggcaggatctgtttctgaggttggccaagtctgaatcagctacaggggagagggtccgtctggcaaagattttggttccagtgatggcgtttgtgcttgcactcacggccgccggcatgtaccttgcttggaactgcaagcttagagccaagcgtcggaacagggataatttgaggaaagcgatcctaggatactcgactgcgccaaacgaactcggtgatgaaaacgtagagctcccatttgtcagccttggagagattgctgcagcaacaaataatttttccgaggacaacatgcttgggcaaggtggctttgggaaggtctataagggtacgctgggacagaacgtgcaggttgcaatcaaaaggctcggccaatgttcaggacagggcgtggaggagttcaggaacgaagccgtcctgatcgcgaagctgcagcacaggaacctggtcaggcttcttggatgctgcatcgacggagacgagaagctgctagtctacgaatacttaccgaacagaagcctggactccattatttttgagacctgaagacgagcaacatactgctggacgcagatatgagccccaagatatcggatttcggcatggcaagaatctttggtggaaaccagcatgaagcgaacaccaatcgagttgttgggacgtacggttacatgtctcctgaatatgcaatggacggcgtgttttctgtcaagtcagacacgtacagtttcggcgtcatagtcttggagatcataagtggcctgaagatcagtttaacccattgcaatggcttccctaacctgctagcttatgcatggagcttgtggatagacgacagagccatggatctcgtggactcgtccctggagaagagcagttcctgcagtgaagctttacgctgtatccagatcggactgctgtgtgtgcaggacaacccgaatagtaggccgctcatgtcgtcggtggtgaccatgctcgagaacgaaagtacgccacttgcagtgccgatacagccaatgtatttctcataccggggactgggagggacgggagaagaaaataatactagcagttctgtgaatggcatgagcctcacgacaatgttagtgggacgatagttgttgtttattatattatacctccgtttttgttggaacagatgtgtaatagcgcattagcagcttatattgttctagagaagtcatatatttatatatcgattgctattataagcaagatgatattacagtgtttgtgctcatctcggccggcggagacttc

SEQ ID NO: 29476 - DNA, 723 bp, Zea Mays
cttgattcgtatagcacctcacatccaaatatgcaacacatagataaggagaaggtgggaggcacaagaacgaggagatcaagttgcctctgtgcttgatgttggagaagttggtccccgagcagcatgtcgttgccaggtcgttagaagtgttggcccatggtcagcaggaacagctcaaatcgaaggaagcatccataatgcctatttttctcttattgaaaaggcagaacattttgtttacatcgagaatcagtttttcatttcaggtctttcaggggatgacacaattaagaatcgtgtattagaagcactatataggcgcatacttagagcagaaaaagagaaaaggcgcttccgggttattattgtcataccacttttacctggttttcagggtggcattgatgatggtggagctgcgtctgtgagggcaattatgcattggcaataccgaactatttgtagaggacctaattcaattcttaaaaatctgtatgatgtggttggctcgaaggcggatgattatatctcattttatgggcttagagcacatggaagatcagatgatgggggtcctctggtcaccaatcagatatatgtgcacagtaaattgatgattattgatgatcgcatggcattgattggctcagccaacataaatgatagaagcttgcttggatctagggattctgagtctcggccacaacgtcaccttcggat

SEQ ID NO: 29477 - DNA, 1597 bp, Zea Mays
cgccgtctcatctctctgcttcccggaacctgagtccgagaagagcccgttcgacatggacacggagccgctgctgccggcgcacctcctccactcgctgccggagcactcggaggtgttccacttctccccgccgccatccccttcctgcccatcaccggcctcctcctacaaggaccgcatcatcttcggcgcccacccgccaccgcctcagccgccgccgccccctccgcttcccccgtcgcactcgcaccgcgcgcaccgccgccgcagctccgtggacggcctctacgattttgacctgccttcctgctcctcgtccccgccctcgccaccgtcggaccccgaggacccttcctccgccgccgctgccggcgcgtcctctctcttcgaattcatcgccaacgccgcaagcgcccgcaccaacctccaccgctcccgcaccgccccagccatggcgccgctcagcgccgtgacgctcgcggccgcagccgctgccggggaccaggctcccgcgccgcccgagcgcccctccatcgtgctgcacaccttcctcttcctgctcgcctacctcgccctcggcgtgaccttctacgccgccgcgcccgccaatttcagctcctccgcgggacccacgcaccccgtcgccgacgcgctctacttctgcatcgtcacgctctgtaccatcggatacggagcatctcctcatcaccgcgctcaagaacccaacctctgcgcgcaagcaccgccacaactacatctttgacgtcaagaagggcaggatgcgcatccgtatgaaggtggcgctcgcgctgggcgtcgtggctgtttgcgtgggtgtcggggctgcagttctcaggagggtggagagcctggggtggctcgacgccgtctatcttgccgtgatgtcggtgaccacagttggttatggggaccaggcgttccggacactggctgggcgcctttttgcatccgcttggctgctcgtgtccaccctggctgtggcaagggcattcctctacttggcagagatgaggattgacaagaggcaccgagccatggccaactgggtgctgtccagagacatgaccgtgtctgaatttcttgctgcagacattgacaacaatggatatgtcacgaaatcagaatttgttgtttacaagctcaaggagatggggaagattactgaaaaagatatcatgatgatatgtgatcaattccagaggctggacacagggagctgcgggaagatcacactttcagatcttctggagagccatcacttggtttcagaacccagggataagaaaaaggggaagaaatcttaaacatgtgtcatagtatgcacaagaattgaagggcagtgctaaaattttgggactagaaagcacgccaaatgagcaagggtgcgacaggaggcattctcctacacggaatggaaaagacggaatccgctgaagttgacgcgcatggaatgagctcagttgtggtccattgtcacggccgtttagagtgacgaaaccgaatgcacagtatgtgtgtcagaatctgtttttcacaattgtaatattgtatgttcatatcacaattgtaatac

SEQ ID NO: 29478 - DNA, 949 bp, Zea Mays
atgcctggacagtttctctctctcgcttcgatagctaatttcgccgtcacccgccggacagacacggaggtacaggagcgagggggaaagtgggatggtagtgggggcatcatcggtgtccggcgccgcggcttccggaggtacctctggtacggctccgccgcggaaggggaagtcgtgcaagggctgcctttactactcgtcagtgctcaagtcccgcggctacaacccaatctgcgttgggatcccccgttccatcccccaagttcctaactacgtggtggatgagcctaaggaggacgcgacagcgcaggggcatgatctcaggcggttcaggtacgggtgcgcgggttactccatattcgtgaacagggacggccaaggtggtgagggcgagggcaagacgttgttgccgtattgcaggggcctcgagttattggtggacagcagattggtcgagagaaaaccatccgcagctgaacaagctccagcacatgttacaaaggatgcagcagctaccacccgctctcaccaacaaggacaacagagacctgcgaacttgtcgaggcaggaattcttggagaggaaagttactgtccatagcttttctctgtccccagcccccactaggatatattgccttgctgatgtatacggatggcacaggtttaagaagagtgctggactggtcgcttcaggggtcgcgaagaatctaaacaaaacggccaattatatcaaggaaaatattcatgacatattgtaccacgatcgtcgcccaccaaagtagtagccatgccgacttgctgagggcgcacgtcaaatactagtgtgtaaaaaaagaacgaaatggttaacctgctcctggcccagtgatcagttgaatgcgctgacggttgaatggtcgtctgtgctgccagatcccacggttgaatggtcgtctgtgctgcca

SEQ ID NO: 29479 - DNA, 2152 bp, Zea Mays
cggctacggcccactgggcatgatcgtcccaacagaacgacggtggaaccctggtctcctccctcttcacccgcacctgcactgcagcacacgcgccgccgaagcgctctgcccacctcgctcccctccagtggccgccggcgcggctcagcggtccatcctcctgacgccacctgcaacggcgccaggcggtgatccattccaactcgcgctccgtcctggtatccaaacatgtggtctttgggaaggtggtcagtggaatagctttgcttaaaaagcttgaagcagttggtagtgaaactggaaatccttcttatcaagtgaaaattgtagactgtggtgaagtttccaacacaaattctccggatctgctaaagggagagaaagaaaaaaaactaagaacggcagatggtaactccactgctgaagggagagccaaattaaaaaaaacatccggtgatcataagcaaaggaagaagagaaaacactattcgtctgattcatatagctcagatacttcagactcattgtcctattcttcagatagtggctctgattcagaatcagattcatcaatggatactagctcatccagtgatcataggcgtaagagaagaaaaggatctaagaaggataagcgcaagcccacaaagagaaagggtaaacatacaaggagtaagagaaagagtagaggatccaaaaggcgatctagacggagccatgggagttcaagtgatgattcagtaagctcaaagacagataacagcagttctgacagtgaaaagggtggccatcataccaagcgttccttgccgaaagataaagagagtaccaaaatgacaatttcagaacaaggaagaacttttcaagaagcggacaaagacgaacaaacagttactaccatcaatcgatcacaatcacatgatggaagtaaaccctcaaacaaagatggcaacagggctgatgaaagatctggaaattacaattcagaagataggaatggtccaggtggaagctccaggaacaatcccattcaggttgatgtaaatttaacgaaaccagtaaatgtagatggcaacactggtggtgataatgcagaggctggcatgtctagaactggtgaaggaaggcaccttccaagcaatgattctgtgtccaccaatggtaaagatttaggtgtgggttctgcagacaatgggcaacctcaacgaatcaggaaaggacgtggttttactcagaagtatgggtatgcacgccgatacaggacgccatctcccgagcgtccccctgttcgaccccgctacgatggagggagagatgatagatggaacaatttcaataggtatgaaagaaatggtccttacagtagacgctcgccagtaaggagataccatggctcgccaagagccaatagcccatccaggtacccaagaagagaacgaatgaggagtaggtcacgcagcccagtgaggcgccatgaccgtggagggtatcaccgccccagcccaagacgtagccgcagccctgcagaaccgagacagaatgtgaatgataggcctcgatcaggtcatggcggaggcgatcctgaccacagccctcctgccaacaggtccagatcgaagagccgggaccccttgggacccagatctcctgatgctgccccagccaagagggagagctccagatacaaccgcaggcgcagcagcagctcaaggtccagcagccctgatggaaacaaaggcctggtttcgtactgagaagtaacggcacaacagtttgcaggctccatggaccatgtttcttgctagtttagcatcatgtactcttttgtaatggattctgaacttgaactgctttcgatgcaggtgtagatttatatgttctgttagatttgaatgtttcttatgccagatatttatagaactactgagtagagcaggggaaaggctcgagcctcgtgaactggcttgagcttgctaaggcttggagaggctcgcgagtttgtaagcctgaatcgagactacttttatgactcgctcaaacgccgagccctgagcgaacttgagtcgactcgggagtctgcctaataatattgtgctacgttgttatattattatgtttttaatttattttcttattttttatggattca

SEQ ID NO: 29480 - DNA, 1948 bp, Zea Mays
cattcacatgtcaacgcttgtccacgcgttgctactgttggcagcgagcgcgttttaacaaaaaatgagtgataacctgatggaaaaggttagcgcctttggtgagcgcctgaagatcaccgggacggaggtcagcaagaagatgacggccggaatgagctccatgagcttcaagatgaaggagttgttccaggggcagactcccgctgataagattgttgaggacgccacctcggagaatctggacgggcctgattggaactcaaacttggagatttgcgacttgatcaacacagagaaagttaacagtgtggaacttatacatgggatcaagaagaggatcatgatgaaggatgcgagagttcagtacctctcattggtcctgcttgagactattgttaagaactgtgagaaggccttctcagaagttgcggccgaacgggttcttgatgagatggtcaggttgattgatgatcctcagaccgtggtgaataacaggaacaaggcccttatgctgattgaagcatggggagagtccggtgatgaactccgctatctgccagtctatgaggaaacgtacaagagcttgaaatcaagagtgcggtttcctggacgtgacaatgagagcttggctcccatatttactcccccacgatcagttgctgaagctgatgttgaaaccagcttgccccagcaggcgttcgaagacgtccatgttcatacatatactgctgaagaaacaaaagaagcgtttgatgtagctcgtaacagcatagaacttctttcgactgttctttcctcttcccctgagcaggatgcttcgcaggatgacttgacggccacactcgtgcaacaatgctaccaatctcagcacactatccagaggattattgagaccgtcggagacaacgaagctgtgctcttcgaggccttgagcgtgaacgacgagatccagaaagtgttgtcaaagtacgaggagatgaagcagcccagggcctcggagcatgcagaacagagagcagttgtcataccggttgccacagaacatgaagatctgactgctgccgtcaatgaagacgcccttgtcagaaaaccagctgccgcgagaacaaggtcaggtggggatgatgatatccttgatgatctggacgagatgatattcggcaagaagggaggtagcagctcccaggaagggccgaagaagccagatccaaagaaggatgacctgataactttttaagcgtacccttctataattgcagcctttgcttgctattttctggtgatgtacccactcggtagattgaagattccttaggatttggatcgattgtctattcgcatacgattcgtatctgccccctttcggtttgttcagtaaagtcgctgcactttctcagtcttgtttcatggatgagtcccagtcccagtcccagtgaccatgaatgtgttggatggtggattatgcaccaacggggggaaataaaatcatgacgggaataaatggtggtccttaattgacgaagcactcgcatacaaagcatatattgatagtacattctcggtacctcatgtttcacgcctgtacccatacactggattggcagtaaacgccactaccaaacgagttgcacgtagcaaggcatggaacctgagcgtcaagctcctcaggcggtcgcggctgccgcgagcttggcgcgcagctccctcctcaggatcttcccggacgccgacttggggatggagggggtgaagtacaccttgtgtagcctcttgtagaataccacctgaaaatcggcgcacgcgcgcacacgtacactgttatgtcagaacaaacttcttcatggcataagcaaggcgcgcggcgtgatccagcctgcgtgactggtgagtacctgcttggagatgaactccttgatggcgtcctccgcgatgtcggcgtcggcgg

SEQ ID NO: 29481 - DNA, 1319 bp, Zea Mays
aagtgccatgctcttccacttgcggcaaaagctttatcaatactgcatgatcttacatttgtgaattctggggatggatggacacattgcatcttgttgagaggctttgacccgcagtggctgtccataacattctctaaagccatcttccttgggaacggcttaattgccattgtatctgggctatttgcgaaccttcttgctgagaacttgggctttggtcctgtggctccattcgatgcggctgcgtgctttctggcgattggcatggctatcataatgtcctcatggagtgaaaactacggagatccatctgaaagcaaggacctgatggcccagttcaaggttgcggctaaggcaattgcgtcagatgaaaagattgcattactgggagccatacagtcattgtttgagggctccatgtacacatttgtcttcctatggactccagcattgagtccaaatgaagaagacattcctcatggttttatttttgctacattcatgctgtcatccatgctgggtagctccatcgcgtcacgtctattagcccgaaagctcaaggttgaaggctatatgcagatcgtgttctcgatatcggctgtcacccttgtcctccctgtcgccaccaacatcttagtgccaacgtcttctgtgaaaggaggcagcgtatcaattggaggttctcttcagcttcttggtttctgcacctttgaggtgaatgcattccctatcactgtcatgtttgggatgtgttctatcttcctcttcatggcagcaatcttgcagagacggctgatggttgtctctgatcaagtacacaaatcatcaactacacaagaaatgatcggggaagatgagccactaaatccttagatgtcgacagaaccatacatgcgaaatcagatattgacgacgacgtccatactccatactgcatttcgtttcgtcacctgtgcaataagatggacgtcaaaaccatgtagtctagtggttttcgtttctgtagtgtagatttgaccaggctgctaagtttgcacctgtcccgagaagattagatgagcaagtcaatcgatattggctattcgcattgttgtttcttttttttaaaaaaagatgttcgctttaaagtttaaacgatacggtatatatccttgtaagtgttgcattgctgcatctgatgacaattctagtggtgctgttactgactgttgagggctctctctacttggtcgttgtaagaactgttgcttcttaatgaaaaacgggctcaataaattcagtagaagcctgcagttgcagtaatcatacaacacgat

SEQ ID NO: 29482 - DNA, 2577 bp, Zea Mays
ctccgcctcggcaagcgccccctccctagcggcaatctccctcggcaagcgccctctcccccgcagcaatcttgccgcgccctcgctccacgacaatcttggcaatgtccctcgctccgcgccaatctcgctcgctccgcggcgcccccatgctcgccctcccccacggcccccacggcaatctgcctcccccataagggcaccatcccgagcccgccccagccgccattctcgcttcggggcgccgcgtccgcgtcgattcagtttccctcgagtttcagaaaccccgcccgccaatagccctcgcgtctgtagatctcgcgtcctcgatggaaagttcgcctccacgccattcatggcgccttcctcggtccccttccccatgaccatatcacgccattgtggaatcatggtatttgtcatcttcgtggaagttgaataaccgcatataatttctaggagcacccgggccactgccagtccgccatgcccaagccaccggccggcttcgtgctgaatgaatggggcaggtgcatcgccgctgcattcaagtgcatcttcatcatcgtgcggagttggcctgccgccggccaccaataccatcgcctcggtccacccaccagttgcaacgctggtcctgtgctctcaccatttgatagggagtgagggacgatgggatcaggtcgacctatgatgggcatgcctgctccgcctctctggcccgatctcacagtcatccccaaattcccatgtactactcttgctatcaatcggctgaagttgtatgatgactgttgttcattgaattttctttctgtcaatcgacccgattactcttatttctgactaaaaaaactcagactcaatgtcatgatatttgtctttgcattggttctttgtgaggggttatatataatttgagaaatttcaagatgtgatgattaccaggagtcagcaaaaaaggtattgttttcaggaagaatgttcttgtgaacaatcatcttcacagctaccccttccatgcccattaagaaacaagaaagaatcgcaacatttaggttctccagattttctaaagctcaataattggtaagcctacaacctttgtacagacatgacatggacatatcagtgaactgatgggagagtattaataattctggtttgctataatttctttaccttttatttcttttaggaattcagtccgaatatattcattgaaccaaagagaggatccatgtcggacgtggtggcttggtagatgtggaaatttttccaatagtgacccattttcctttcataattttcatttcatcactacacaaatttcatggattgcttactgactttggccaatatattttagatatgtccatagttttgtttttttcatcccatatctaagcttcagtaaaacaaaggttgtgttgttgtgcatatagattgcctggacataatcatacgatattcaggaaaaaatatttcacatattcagaagaatttgctcttgtttcttcatgtttcttttgcctccttgactcttagcatttggttttctgatttatgcaggttcagtacaaagaagatatcaattatgaagagacttcttcatgaattcatgaggaaacaagctcttcacctgcaggtgtacaccgaggaaatcagagtgcagagctctggtctttatctgccacggatacgaagccgagtgcagcatatccatcggagatgatcaacatcattgcgcctagctggagagtcatccctgcaacaaacatgatcgacaaaatccgcaaagaccctcagctcaagaaaaagatctgtttcaatccgtacatgtacagaggaaacctcgcactgcaaataggctgcaaactcctttccgtcagcctagacatcaagaagagcctgcacgaggtgagatcttcgccatctgttaggccaccacatgcaacattggtagcatgaacgttcccgttggatcgtcgaccatgggacttctacagtaacatcggcacggacgacgtcgtcactgatcgttccgggagcaagctgctgcacaacctgaagaagatttgtctttttaagatgaaggttctgaagaacgtgatccaggtcgaggagatttctaaggtcttggaaatcagcggcgagcgcagcctcatcgataacttcgtcttctcctaccacgtgctaatgtgacacttttgcaacaatatcaatgccggacaacatgcatgctccttgggaggaattaaggggaagatgaagaactaaaaaaattaccagaatctaatttacgcacgccaagtcagaccaccgtgaaaaactctatctccacgtgaccaatcttctccatttttcagtttgcaagatactttttatattgattaaagttcaataccaataacactaatgtgagctcactgtggtgttcatctttttgcataaattttatgaaaagaaaacagaactctttctattttgccttctctgctatagtaaagatgtaccatttcatgtttattcgtcctctttttggttccttacggtcaattaaggattatacttttg

SEQ ID NO: 29483 - DNA, 3413 bp, Zea Mays
ttggttctgtcgatgcagctcatcaattccattcccagctccggaaaatcgagaaatttcgattggttatttgatttgatttgattctggccgtgccgaaccctagcttccatctcggtccaatctcagttccacatattgttactcctcggcagcagaggaggccgtcgtggaatgagttgaggatgacggcatactactcgtgctcctaggaaaggtcagggaaaggaagaattcgagccatggaggacgaggcggacggcggcggcgaatccttcgtgctgcgctccggcgtccgcgcgggcctcaagcgcgaattcgccttcgccatcgcctcgcaggccgtcctttcgtcctcatacgcacccctgggccgcacccgccgctcatcccgcatcctcaacccatcggccgcttcgaccccctccgtcgccggcgccgccgtctcgacatcctcctcctcaacccccgacacaaagccaaaagccaagcgcccgcgcccaccagatcctccccctccccctcccttcccccctccaccagactatgcccctgcccccggagaagaccatgacggggccgctgtcggccccgtgctcgccttgatggctgctgctgggcccagccctccgccgacgcctttgactccgcaaccccatgccgacgcggatgcggatcccgcacacctcgccaacatcatcattccgccggagtcgtcgcccaggcgcatcacgcgctccatgctccagcccaagtctcgccttcctaccgccgctcgttctcctgacaatgcggcaccgctcaaaccaaaactggaaccgccggaagaggaggatggcaagccggttccagcgttgaggcgcttcaccagatcactactggtcaaggacaaggacagcaacgacgacgacctctcaggcaccaccaccgccagcaatgcctcctccccttcgcccaaaaccaacaccacaagtaccagcaggagcagcaacaaggggaataagaatacaaacaagattcccaccaacctcagggagctgctcgccaccggcatgctcgaaggtcagcccgtcaagtacatcatgaggaaaggcaagcgagcggtactccggggagttatcaaacgcattggcatattgtgttcatgctcttcatgcaaaggccgaaaagttgtttcaccttactactttgaggtgcatgctgggagtaccaaaaagcatccatcagactacattttcctggaaaatggaaataatctgcatgatgtgttgagggcatgtacaaatgctacattagacatgttggagcctgcaatacgaaaggcaataggcccagcacctcaggagagaatattcagatgcaaatcatgcaaaagttcattcagtacactccgcagtgggaaatttgctttgttttgtgattcgtgtcttgagtccaagggagctaagaataatatcagttcatccaaagttgggcgaagtcaaacttcatctgccaaggtatataagagtgcatcaccaggagcaaagtcttcaagtgtaggaaggcttacaagaaaggataagggtatgcataaggtcgttttcatgagtggcattttaccagagggcactgatgttggttactatgttggtggaaagaggttactggatggatatataaaggaacttgggatctactgtcattgctgcagcacagtggttagtccttcacagtttgaaggtcatgctggtcgagctgctcgacgcaaaccttaccacaacatatatatgtcaaacggcgtttcactacatgagctgtcaatttcactcttgaaaggtcaaaagatgtcaaacagacaaagtgatgacttgtgcagcatttgttcagatggtgggcaactactcctttgtgatacctgtccaagagcttttcatagagaatgtgttggcttatcttctgccacaaagggaacttggtgttgccgatattgtgagaatagacaacagagggaaagttgtttggcatataacaacaatgcaatagctgctgggagagttgaaggagttgatgccttggaacaaatattcacgcggtcgatacgtattgctacaacacttgagactggatttggtggttgcgcactgtgcaagctccatgatttcagcaaaaagaaattcagtacccgaaccgtgctgctttgtgaccaatgtggtagagaatatcatgttggttgcctcaaggaacataatatggctgatctgacggcattgcccgagggagcctggtattgttctacggactgtgtgaggattaaccagacactgcaagatttacttaacagtggtggagaacctgttcttgccatggatttagatgtcattaagaagaaacgagaagtgaaaggttttaatgatgatgatgctgaccttgatgttagatggagagttttaaaggacaagagctcagacgacagcaaactagtgctctccaaagcagttgccattttccatgaaacttttgatcccattatccaggtttcaactggacgggacctcattccagccatggtttatgggaggagtgcaagggaccaagattacacaggaatgtattgtactgtgttaactgtgaacaatattgtagtttctgcgggtcttttccgcatcatgggtagtgaaattgctgagctgccgttggttgctacaagtagggatagacaaggcttgaggaagcggagtctatctggactgagcgttttgggttcgcaaagataagccaggatgagctgcgcgaatacctcaagggtgggcgaacaactgtgtttcaggggacgtcaaacctgcacaagctggttgcgaaacttgaatgctagttatgtgagaattgtatggcaagagcaaggacatgaagctaagaagcagctcattgtttgtgtgcctctgggattgatgcagacaggaaagaggcaccctgatccctttcttgtaaatgttggtgagcatgttggcattggcatcttgatctgtttccataggtaaggtgaagaggattgtgtaagataaaagggacaagctgtatgtaaagacaagccaaagctgagtgaatttcaggcaccttattgtgtggagggtcctgtgtttgttgagtaggcaacgctcgggctggtgtgagatgatgactgcatttgtgttgtgttggtggtattttcactgctgacatgactgttgtatcggatgacatcttttctgttttatgacagtggcagtgtgatactaggctgttaggaggggacgggggaggtcaaacccaacgtacatcatgagtggagctgctgtaatgtaacagaagtattgcaccccccccccccccccccccaataatatataacatgcttaatttggtgcgaattccttgccgcttgtggagcttag

SEQ ID NO: 29484 - DNA, 5369 bp, Zea Mays
cgacgtgtcactttcatgagttcgtagtgttgagttccatatcccgtgtcactttcaggagtatatagtgttgcgttcctgatccatgttgagttctaaacgatggtgtggcgttcctaatcagtattgagttgggcgcatgttgattttgggaggacccacgggcgaacgacgtgtcactttcatgagttatagtgttgatttttgaaggacccacgagccgaaccccgtgtcactttcatgaggtatagtgttgggttcgtgctcagtgtggcgttcgacactatggtgttgcgttcctccaatctgttgggtttcagggtcccatgttgatttttggcaggacccgcagtctgaagcccgtgtcactttccggagtctacagtgttgcgttctgaatactagtgttatgttccatgtcccgtgtcactttctggagtctaccgtggcgctcctgctaagtgttgagtcagatttgcggatgttgattttgggaggacccacggcaaacgcaggcttcccaaagcggcatggtcagttcgagctcgccctggggatgccgccgctctgcccatcgcagacgccgtggagcatcgacggcgacgtcgcaggacatgaggtcgcctaccagctggtgacccgaaacacccaggcggcccgccgccacgtcgagataacggccctgacggtgccgacattttggggcagcgggcattgcccggagccgctcgtcatcctaagaaagggcagcacggtggcctgctagtacgtgacgggatctggcagcgcagggaacggagggacagacggcaagagcatgcaccacatcgacgtgaacatggagtgagcgagccaacggagaaatggcgatgggaatggaggtgcagctggtgggagcagttggcacgccgatgaccggacgaagcaagtgaggcaagggatggacgtcgcacttcaatacgtgcctggcggcaccgacattccgatgcagcggctacccccggagccactcgtcgtccatgaaaagggcgacgaactggcctggcaagatctggcggcgcggggatcgaatggacggacgacaagagcgagcgaagaagtcctggcggcttggtgagaaaatggtggcgctgggggcgatgggaacggaggtgcggatggtggcagcagtggagtgagcgagcgtggcctggtttcttcttgaggaaatggcattgcagaggcgatgggaatggagatgcgaatggggggaggagttgccgtgccgacggccgaccgcgatttttttgggaagaatcgtgagaagggataacacacagagagaaaaatgagtgttaccttcgcgttacaggaatgaagcgacggcgacgtcgagactgattgtcgtcgtccgcggccatggggcggagcaccttccggagaagtcgagacttatacgattaaaaaagggaaccgcctcaccgattctgatgtcgaaggtaacctggtgccgatccgcaggggtgaagaagaaagccaacatgccacaggggaagagtaagaagaacgtggtgaaggagaaagccaaaaagattaagaagaacgcggaatcgagagccaaagttcatgaaaatacagatcaaattgagatcaacattagagaaggtgtttcaatttggataacaaaggctgcagtgcaaaaatgttttgagtttccccctggtacagataagaagctgccaatagatccaactacaaaaacatttgattcactctacagagtattgagtgtttcagaaaaaaaaatcaatgtaaagaagaagaagatgaaggagaatatgaaggagaagcaggttgaggaggagaagattgagatgaacatggaggagaagaagcagaatctggttgaggatgaaggtagtcaacaggaggaaagtgaagaggaggacggtgaagatggggaaattggagaggaggaaggtgaagatggggcaattggagatgctaaagtggggggagatggagacaaggaaagtgctaaaaggggggggataaaggttgctgtcagaagaaatgttttgactcctttgaacatcaatttgatgttacagaacatcaacaacgatgagattctcaaacttcttgttaaaagaaatgaagacactgatggtacagaaccgaatcttgacattgacctgattgtcagatgtttctttgcggtggtgttggacagactgttgttgccacaagccaccttttatctgagctcagctacattgaaagcagtgactgatctagacagactgaaaacagttgactggtcaattttattttcgaaaatttgaagagcagtgttgctgagtttggcaaggataagaagaaactgatatcagggtgtacaactgtgctaatggttgttttcttggaccatctcgtggaaaaccctttggatcctttgaccatccctaggatcaacttgtatacttcagattttatcgcagacctgataatggtacccaaggatagccctggccctgaaaaaaagcgtcgtaagtttaagaattcggaggatacatgctatcatgaagattcagaaatggtgccaagtccagggagagcatcgccggttgttgcttctgtacaatctcataagaactttgttgatcatgcagatttagaaattgtgccatctcatgagaactctgttgatctacatagtgtttacatggcacatgtattggaaagaagcagacaaagcatagtagtggacatattggactacaatatacctgaatctacttttgcagattgtttgctacctacaggtcatatgcacacagatgtattttatttacaatgccaactgttgtcaaaggattggaaggataaagtaattcttagctggaaagctactcaagaactgattcatcaagatattggagttaaggagctggacaaggaacttactgcagaggttatgaacaaagtggatctggtttgtgctttgttttatattacagtagagttttttcagattgacagtagagtttgtgctttttttagatatttattcctatcattcatgccggtcactggtcccttgttattctttccactgccaaacaagagacatatatccttgactcctacccaaggcacagtggggtggccaaggatgttttaactcaactgcagaagtatttggataataaacacaactttgacatgtctaactacactgaccatgtgccacctgttcagcatcaaaaaaacaattacgattgtggctttcatgttttattgtatattgaagaattcatgaaggagaagatgtataaaatcaacaaaaaaatggtgttgaaattcagaaagcagctttgcatgaatctcttgtaccatcctttgaacagaataaatcttgtggaattcagaaagaagctgggtattacattgaaaagaaaacttcctggtatacttgatcttactattgaaggtgagaggagtgaatctgaggctgcagtgataattgaaatagagaacagagatgataagactctagaggatgaacatatttcagttgagaaagagtaaggtaaaaaagaagagcatgtactatcaactgacacaaagaatgacgaagcttcatccccatctgacgaagagcctgagcagagtgagtcatctgagcagactgtgtatgaaagatggatgattccaaaggatcattatcacctgagaaagagcaagctggagaaaaatatcctcaaacgaaaaaagaggttgggcaaagacaacatgtcctctcaggatatgatttctccagtgtttggcaagaggcttgtgcctgcaaacacacattttacctctcttaggaagttgcgaaaacacaagtttacgtctgataagatcaacgatgagatctgcaaacatatcttgaactacaatgaacgggagttgttaagtgtggggcagactaccatgactgggggtcagctggaaaagtacgtaaatgaaggtgacaatggtgataaaatactcagagcattcatcacatgcttcacttgtgatgaaaagttcaatcaagggaacatcacaaccgtcatcccgccacatgaagtatccgaagagggtgaactctccaaagttgatgctgcacaacttgtagaagaaatcaaagctgtactcaaaggcaccaatgttgcacgtgtacgcaaagacaccgaatccaccaaagatcccaaagtgaaagtctttcgaaacatgaggaggacatttatattttttcctttctacaagaatgaagaattgtttgtatttcatgtcgatacgaaaagactacccatcattgatgctctgttttgcaagatgtcatcattgtcgtttgaagatagatcctgactaggaaagtctatcatgggctgtctactcaaagccatgaaggattccggcttcatggtgaaaaaatatggtgattgtaggttcacagttactgtaactgaactcgaattcaaagatagtgcctcagcgctcataagttttattgagaacttcacttctaagttggacgacaatgccaagaaactgaaaaagggtgacaaggactggctggaaccttacaagaagtcgacagtggcataccttgtttgtcacactgaaaataaggtggtgttgcctgacgatattgtgaagtacaagcaaaacaagtgaggtggttgagtcgttaatgggtccagtggctgtgttttaagacttgtatcacactacttgtatggctttattctctgaagctgttccattgttgccgttagtaacaggtgttgcttttgtctctgctcagtgggtgattcatttcatccagagttgctgcaactttaatcagtctatagtgttgggttcctagctcagtgttgagttctaaatgatcgtgttgtgttcctaccaagtgttgagctgcacgacggcgtgcgcagccgcagccgcaccggcgaggagcgtttagaactctgttgatctacatagtgtttacaccggctcaacagagttctcatgttgatttttgaaggacccacgtgttgggttcctgctcagtgttgagttctgaacgatagtgttatgttccatgggcccttgttgatttcgagaggacccacgggccgaacggcgtgtcactttcatgcgtctatagtgttgggttcctgtctagtgttgagttctcaactatggtgttgtgttcctccaagaagttgagtttcaggggcctattatattgtctcagttaatgggtaactcagttaatcctatatattgtgtcagttaatgggaactcagttaatggtatatgttgtctcagttaatgggtaactcagttaatccagcatatcattgatgag

SEQ ID NO: 29485 - DNA, 2934 bp, Zea Mays
tctattgggacactttgtgataaactgaagcaaacagatccatataaatcagagcttgagacaatgctggtccgacatgtctttcctgaattcagcagtcgtgttggacacctgcgagcaaaggcagcatgggttgctgggcagtatgcccatatcaacttttcagacccgaacaattttcgtcaggctatgcactgtatagtttcaggaatgcatgatccagatcttcctgtgagggttgattcggtctttgcacttcgttcttttgttgaagcctgcaaagatttaaatgagattcgacctatacttcctcagctccttgatgaattttttaagctgatgaatgaggttgagaatgaggatcttgtgttcaccctagaaaccattgttgacaaatttggtgaagagatggcaccttatgcattaggtttgtgccagaatttggctgctgctttctggagatgtatggctagttcagaagctgatgatgaagctgatgattccggtgctttggcagctgttggttgcttgcgagcaatcagcacaatccttgagtcaattagcagcctcccacatctttttacgcaaatagaaccaacattgctgcctataatgcgcaggatgttgacatctgatggccaagatgtttatgaagaagtccttgaaattgtttcctatatgtcattttactcgcctacaatttcactggacatgtggaccttgtggccagtgatgatggaggcgcttaatgattgggctatagatttctttgagaatattcttgttccattagacaactacatttctcggggaactgatcactttcttgcatgcaaagatccagattaccagcaaagcctgtggaaggcacttcaatctattatgatggacgaaaacatggaagattctgatattgaacctgctcccaagctcattgaagttgtttttcaaaattgtaaaggcaacgtggatcactgggttgagcactatctcaggattacaattgagcggttacgtcgagcacacaaaccatacctgaaatgcctccttgtacaagtgtgctgttgtgttttattgagcacaaaaaccatgtggagtgtcttcctgtctgatgagttgatcgtggtgttcttggatctggttcttggcctttccatttacttctatgataactggaaaaaaattaaaactgttgaagtgaggtaggattgaacccagagcatcatgagcttgcgctcacatatgttatcgtaaatgtgacttgagatggtttggtactggataatgacaccaaagatttttcagcaaaaatatcattgaggtcacatatatgggataagctcgtttcatcactcgatggaaaccactccttttgtgaccgcctggatggatcagggtctggttcggtggcaaaaacctgagacaaggacaaactcattgtgtaatgattcgtgtttatctctgctatattgcttgtgcctaagaactgtgatacatgcagatcgctaatgcgctctactacaatcctgcgctgacccttgagattttaaataagctcggggttgcagctgacatttttaaccattggtttgctatgctacgacaagttaaaaaaagtggggcacgtgttaatttcaagagggagcatgataagaaagtttgctgcttgggcttgacctcccttattgcgcttccagctgctaagattccagcagatgctttggatcggatcttcaaagcaacacttgagctgcttgttgcttacaaggaccaagttgcagaagctaagaagcaaaatgaagaggctgctgatgatatggatggttttgatgctgatgaagaagatgatgacgaagttgactctgataaggagatgggtcttgatgatgaagacggggatgaagtaagcagtcttcagctgcagaaattagccgcagaggctagaggcttccaaccagccgatgacgatgactcagatgatgatttcagcgacgatgagctacactcaccaatagacgaggtggatcctttcattttctttgtagaaactgtccaaggtttgcaggcatctgatcctgccaggttccagaaccttatgcatacattggatttttcttatcaagcgcttgctagtggcattgcacaacatgccgagcaaagaaaaaatgaaattgagaaggagaaatctgagaaggcaaatgcacagtgacgtcataaagcatttctggttcccttcgattgttttgccattttgccggtatagcattggtggacggttaatttcctgcgatttgcaggccgcaggtaagagtttttgcagccttagccaaagtgtaggacaaattcaatcttgtgagatagcatcttggataacctgtcacctcgaccatgttcgtcgtggccagttgtagacgtcttggttgtgcaagaaagtttctctcgaggacagttgctcgttttgttagggccatcaatttttttgggcggcttgtaagttatttgagaatcccacctcaggttgaggggttgtattctcgagtcgtcaaagtttagtaccggtgcggtgtagattgtatatggtttcagttgtctagaacgttgtggcttcatggacgggctgtggtataagtttttattattttttaatttttttgtcaacaagacattgtaattggggtttgtttgtttggtaagagcaagaaaggtcggcactgttatttcttcggtatcattgtccacttgtttcgatattagcagtttacctaatcctatatccaaactccactcttccatattcaaactccactctgaacaatgtaatctatagtgcttttgagtaaactatgaaaagattgctgcagatggttttacaatgatggaaaatgggtattgggataagtggtattgggataagtatcataatgatattgcttg

SEQ ID NO: 29486 - DNA, 1672 bp, Zea Mays
cctggtctcctcttccttcccctcctgttctgtccatctctaccgttccattccaattccatccccggaaagcgcaagccgcgggagagcggccggcgtacgtaccacgaggaccgccagccgagggccatggccgccggtctgtccggcgccgcgatgaccagcttcgtcgccaagaacccgctgctggcggccgcggcgcgccgcagggcgctgcctcccctcgccgggcgcgccctgccgttctcgccgctcaccaccgccagggccccgcgccgccgcgggctcgggaccgtcacgtgcttcgtgccgcaggacacggagcacccggcggcggcggcaccggccccggtcgctcccgtgccggagacggcgctggacgaggaggccagggccgcggcggcgcggcgcgtcgcggagaggaaggcgcggaagcggtccgagcggcgtacctacctggtggccgccgtgatgtccagcctcggggtcacgtccatggccgtcgccgccgtgtactatcgcttcagctggcaaatggaggtcgggatggagttctgggcgcggtgggcgcaccgggcgctgtggcacgcctccctgtggcacatgcacgagtcgcaccaccggccgcgcgagggcccattcgagctcaacgacgtgttcgccatcgtcaacgccgtgccggccatctccctcctcgcctacggcttcttccaccgcggcctcgtgcccggcctatgcttcggcgcgggcctcgggattacgctgttcggcatggcctacatgttcgtccacgacggcctggtccaccgccgctttccggtcggccccatcgccaacgtgccctacttccgccgagtggctgccgctcacaagatacaccacatggacaagtttgagggcgtcccgtatgggctgttcctgggaccaaaggagctggaggaggtcggtggcctggacgagctggaaaaggagctcgcgcgaatcggccggaccatctgatggattcgtccggattccggcgcggcgatctccgctccgctccgtgattccggcgcagcctcatggttggggagccgacgaccagaacctccagaagggatttggtttggatgcgcgagcctagatcttgacctgcatttcggatggtctgtggaggcacagctcgtacctggagatgtctagtgccatggaattacttttcttttctttttttcctgacattttcacgccggcgtctttatttgtgaagacgtcgcacgttcgggcccctgtattactgttcttatggctaggattctgtatataacttgtagggacatgttatgaaccaccagctcaatgaagctaaaaattcggtggttggaaacagcgctgaaaaatcagaagctcctcctttcacattcagaggcgctggcgcaacgagggcacgacgaccaacgttacacaatagttccattagccttaacttaaagttgtagccacgtagagggagaagaaggcgatgcaaacagtccttaaaaaaaacaacgatgatgcaaacagtctcgcggtgcaagtagtagaagaggatatcttatgttaacccaaatgcatgtaatttgctaatttctccctttaccttgctgcttttctgctcattacttgatcagctatatggaggaataaaatattt

SEQ ID NO: 29487 - DNA, 2562 bp, Zea Mays
acaaaatgtgcgtaaataagagcaagagcagctcactcacacagtcacactcacactcctcgctctctcactggagtggggaacaactgaggccagcggaaaccagagaggggagggagatcatagcagtggggcagtttgagagctcgccgatctgctgcggggatggggtgcacggcgtccaaggtggagcaggaggacacggtccggcgctgcaaggagcgccgccgccacatgaaggacgcggtggcggcgcgccaactgctagcctccgcgcacgccgactaccttcgctccctccgcgtcaccgccgccgcgctctcgcgcttcgcgcagggccacccctcgctcgccgtttcgcaccacactgcccccgtcctcctctccgccgccgcgccgccgcccgcccccatcgccgtccatgcgttccccacaccggcgccctccaccgctgcgtcgtcatcgctcccgcctccgacgccgctcgtccagcgcccacacccgccgccccagccgcccacggcggcggcgatggcggcgccgcagccggcgctggcgagggcaccacgcccacggcggctcagggtgccccacatcctgtcggactccagcgtgaccagccccgcgcagccgtcattccgcaagcagccgccagtgggaacaccatcctcctcgtccgcatgggactgggagaacttctacccgccgtcgccgccagactccgagttcttcgaccgccggaaggccgaggtcgagcaggccagccgcctccgggagctcgaggaggaggagaaggcccgagcctacctccaccatcacacccactacaacctcaaggaagaagacgaggccgctgaagacgacgacggtgaggtggaccatgaaccagatgggatgcattccggcggatgggaggacgacgagcactacgcgtccacgaccacgtcggagaccagatcggacgaggagggcgagatgggggacagatcggaatgcgggttcgcggccagatcagagtgcgggttcgtggccagatcggagtacggcgggacggcaccgtcagagtacgccgccgtaccattgcccctgaggagggatgaaaggtcggaggctggcgacttctccactgtcatggcggcgacagagatgcggatggtggtgcgtcatcgcaccctcgcggaaatcgtggcggccattgaggagtactttgtcaaggcagccgactccggcaacgatgtgtccgagcttctggaggccagccgcgcacaactcgaccgcaacttccggcagcttaaaaagacgggttaccattccaacagcgtgctatcagcattctcatcgacgtggacgtcaaaaccgccattggctgtacgatacaagttggacactaatgcactggagatggagtcaacggaagggaagagtcatggatccactctagagcggcttttggcttgggagaagaagctctacgaggaggtcaaggcaagggagagtgtgaagattgagcatgagaaaaagctttctactctgcagagcctggaatacaaagggagggatagtgcaaagctggataagaccaaggcctccataaacaagctgcaatcactgattgttgttacctctcaggctgccacaactacatcatcagccatcgttagagtccgtgacaatgagcttgcaccacagcttgttcagctctgttttgcgctattgggcatgtggaggtcaatgaaccatttccatgagatacagaatgagattgttcagcaagtccgtggtctggtggacagctccatggctgagtcaacatctgacctccacaggcttgcaactcgtgaccttgaggctgctgttgcggcgtggcactccaacttcgaccgcctcatcaagtatcagcgcgactacatccgctctctgtatggctggctgaagctcacactctgccaggtggatagctgtgtgccacagggagcccatgcctcgatgatctcgcgcgaactcaccagcttctgtgacgagtggaagcaagcactagaccgtcttccagacgctgttgcttcggaggcgatcaagagctttgtgaacgttgtccatgtcatctacgccaagcaggcagaggagatgaaggtgaagaagcgggcagaggcatactcgaaggagctagaaaagaaaaccaactcgctcaggtccgtcgagaagaagtactaccagtcctactcgatggtcggccttggccttcctggcagcggcgggcacggtggcattgacagccacgcgtacgacgcccgtgatcctcttgcggagaagaaaaccgagatcgcccagtgccgtcggaaggtggaggacgagatggcgaggcacgctaaggccatcgaggtcacgcggtcaatgacgctgaacaacatccagacaggcctgccgggtatattccaagccatagctggtttctcagggacagtggttgaagctcttgacgtggtgtgccgccgagctgggtcagtgcgaagtccgggttgtgcggtctgttctgctgcctgcctgcctgcctggactctcgag

SEQ ID NO: 29488 - DNA, 4208 bp, Zea Mays
ccgccgccgtttcttgattctcccatctacatcttcctcgcagcgccggcgcggcggcgctccatcttccgctccctcccttacttgcgcttggcacgcaggcgacggcggcggcgcccagtctcgtactctcagcggcggcgtcagtggcttcccctcccgcctctcgccagtcgcctcgcgccctcgcctccggtcctgcgcacgccggcctgttaccctgcgacattgttgaattctctgaagtgtgtgctcttgtaaaggcttgctaaaatggcaaatttaaacataaccaacatcttggagaagatgacagggaaagataaagactacagatatatggcaacatcagatctgcttagtgaattgaataaagaaagcttcaaagctgatcaagaccttgagccaaagttaacgattactgttcttcaacaacttgaggatgcttcgggagatgtttctggtttagctgttaaatgcttggccccactcgtcaagaaggttggtgaggacagggttgtggagatgaccaataaactttgtgataagttgataaatggaaaggaccagcatcgggataccgctagtatagccctcaagacaatcattgctgaagttactacaccgtcacttgctgaaaagatcttgctttctcttgccccgcaactcatcaagggtgtcaatactgcaaaaagtgctgaaattaaatgcgaatgtcttgatatattggcggatgtgcttcatagatttggcaacttgatcacaaaagatcatgagtacatgctcaatgcacttttatcccaattgggttctaacccagcaagcgtcagaaagaaatctatttcttgcattgcatcacttgctccaagtttatcagatgatttgttagcaaaggcaactttgcaagttgtccagttgctgaaaaatagaggtgcaaaatctgaaattacccgaacaaatatccagatgattggttctctaagtcgttctgttgggtaccgttttgggccacaccttgctgaaactgttcctttgcttataagctattgtacaagtgcatctgaaaatgatgaagagctccgtgaatacagcttgcaggctcttgagagctttatgctcaggtgcccaagggatatatccccatattgtgagggcatcttgaatcttgctttggaatatgtgagctatgatcctaatttcactgatagcatggatgaggatactgatgaggaagcgaaggaagaggatgatgacgatgagagtgcaaatgagtacacagatgatgaggatgcaagctggaaagtccgtagggcatcagcaaagtgcctatctgcaattatagtgtctcgtcctgaaatgttgtcgaagatgtttctagaggcttgtccaaagttaattgaacgatttcgggaaagagaggagaatgtaaagatggatatatttaacaccttcattgagctgttacgccaaactggtaatgttacgaaaggacaaggcgacatcgatgagtccagccctcgctggttgctgaagcaagaggtcccaaaagttgtcaagtctatcaacaggcagttacgtgaaaaatcaatcaagacaaaggttggggcattttcagtactgaaggagcttgtggttgtattaccagactgtcttgctgatcatttcgggtcacttgttcctgggattgagaaggctttgaatgacaagtcttctacctccaacctgaagattgaagcccttgtattaacaaggcttgttatggcttcacattcaccatctgtgtttcatccatacatcaaggctctttctgcacctatactgtctgctatcagagatagatattataaagtcactgctgaggctttgcgggtgtgtggagagctagtccgtgtccttcgtccaaatctcgagacaacctcagttgattttaagccatacattggtccaatctataatgcaatactgggacgtttggccaatcaagatcaggatcaggaggtaaaagaatgcgccatatcttgcatgagtttggtggtctctacttttggtgatggtcttgaaagagaattaccagcatgccttcccatactcgttgacaggatgggtaatgaaattacaagacttacagctgtcaaggcattttcagttattgcgaattcacctctacgtattgatctctcgtgtgtcctggatcatgttgtttctgagctcacagctttccttcgcaaggccaacagagctcttaggcaggcgacgttgggaactctaaattctttggttgtcacatatggtggtcagattggctcttcttcgtatgagacaataatcgcggaactttcaaccctcataagtgacatggatttgcatatgaccgctcttgcattggaactttgttgcacaataatggttgacagaaaatctattcaaaacgttggtttagctgttagagataaagttttgcctcaggcccttgttttgatcaggagtgccctgttgcaagggcaggcactgcaggctcttcagaggttttttgcatcacttgttcaatctgcaaatactagctttgatgctttgttggagtcccttatttctgctgctaagccatcacattcaggtagtcttgctaagcaagcactgtcttctattgctaagtgtgttgctgttctatgcttagcagctggtgaccagaagtgtgcatctacaattgaaatgcttaaaggcattttgaaagacgacagcactactaactctgctaaacaacacatggccttattatgtctgggagaaattgggaggaggaaggacctcagcaatcatgttcaaattgagaacatcgtcattgaatcgtttcaatcaccttttgaggagattaagtccgcagcatcctatgcacttggaaacattgctgttggcaacctctccaagtatttaccatttattttggatcagattgacaatcaacagaagaagcaatatctgttgctccattcacttaaagaggtaatcgtgcgacaatctgttgatcatactggccagagtgagctacaggattcaaacattgagaagatattggcattgctcttcaatcactgtgaaagtgaggaggagggagttcggaatgttgttgcagagtgtttaggaaaaatttctctaattgaaccaaaaaaactagtccctgctttggaggtacgcacgtctagcccagcagcaaatacaagagctacggttgctattgctataaaatattcaattgttgaacgacctgagaaaatagatgaaatcatgtactccaagatatctactttcttgatgttgattaaagacagcgataggcatgtgagaagagcagcagttctggctttgagcacagcagcgcacaacaagccaaatttgattaaaggtcttcttccagagatattacctcttctatacgaccaaactgttattaagcaagagttaatcaggacagttgatcttgggcctttcaaacatgttgtagatgatggtcttgaactcaggaaagctgcctttgaatgtgtggatactttattggacagttgtcttgatcaagtgaatccatcgtccttcattgtacctttcctcttgtctggtttaggtgaccattacgacgtgaaaatgccttgccatttgattctatcaaagctagcagacaagtgcccttccgccgtccttgctgtcctggactccatagttgaaccaatcgagaaaactataagccacaaacccaagggggatgcagtgaagcaggaggttgatcggaacgaggacatgatccgcagcgctctcagggcaatatcttctctaagccgcataagcgactacagcatacggttcaagaatctgatgaacaagataacggccacccccgcgctcgccgagaagtacaactcggtgcgcggcgaatgagacctgggttcttgtacatggtagaggaataggttaaacacccagagttgtcgcgcgctcgtcaatcctgttgccgcttccccgcatggttgctgaggcaaaagtctgtactctgatgatgacggtggttgatttttgactgctggacatagttgtcttgtacaaaatctggtggtaaattcagtagaattgccgccgatacatttacctggtggttctcttgtcgcagttcagtttcagttgacctatgaagcgctgatgcagatcagactattctggca

SEQ ID NO: 29489 - DNA, 3554 bp, Zea Mays
aaaattaaatgagtaaattgatgatacggctttatccaccgtcatctagttcgtgaaccttggttctgtcgatgcagctcatcaattccattcccagctccggaaaatcgagaaatttcgattggttatttgatttgatttgattctggccgtgccgaaccctagcttccatctcggtccaatctcagttccacatattgttactcctcggcagcagaggaggccgtcgtggaatgagttgaggatgacggcatactactcgtgctcctaggaaaggtcagggaaaggaagaattcgagccatggaggacgaggcggacggcggcggcgaatccttcgtgctgcgctccggcgtccgcgcgggcctcaagcgcgaattcgccttcgccatcgcctcgcaggccgtcctttcgtcctcatacgcacccctgggccgcacccgccgctcatcccgcatcctcaacccatcggccgcttcgaccccctccgtcgccggcgccgccgtctcgacatcctcctcctcaacccccgacacaaagccaaaagccaagcgcccgcgcccaccagatcctccccctccccctcccttcccccctccaccagactatgcccctgcccccggagaagaccatgacggggccgctgtcggccccgtgctcgccttgatggctgctgctgggcccagccctccgccgacgcctttgactccgcaaccccatgccgacgcggatgcggatcccgcacacctcgccaacatcatcattccgccggagtcgtcgcccaggcgcatcacgcgctccatgctccagcccaagtctcgccttcctaccgccgctcgttctcctgacaatgcggcaccgctcaaaccaaaactggaaccgccggaagaggaggatggcaagccggttccagcgttgaggcgcttcaccagatcactactggtcaaggacaaggacagcaacgacgacgacctctcaggcaccaccaccgccagcaatgcctcctccccttcgcccaaaaccaacaccacaagtaccagcaggagcagcaacaaggggaataagaatacaaacaagattcccaccaacctcagggagctgctcgccaccggcatgctcgaaggtcagcccgtcaagtacatcatgaggaaaggcaagcgagcggtactccggggagttatcaaacgcattggcatattgtgttcatgctcttcatgcaaaggccgaaaagttgtttcaccttactactttgaggtgcatgctgggagtaccaaaaagcatccatcagactacattttcctggaaaatggaaataatctgcatgatgtgttgagggcatgtacaaatgctacattagacatgttggagcctgcaatacgaaaggcaataggcccagcacctcaggagagaatattcagatgcaaatcatgcaaaagttcattcagtacactccgcagtgggaaatttgctttgttttgtgattcgtgtcttgagtccaagggagctaagaataatatcagttcatccaaagttgggcgaagtcaaacttcatctgccaaggtatataagagtgcatcaccaggagcaaagtcttcaagtgtaggaaggcttacaagaaaggataagggtatgcataaggtcgttttcatgagtggcattttaccagagggcactgatgttggttactatgttggtggaaagaggttactggatggatatataaaggaacttgggatctactgtcattgctgcagcacagtggttagtccttcacagtttgaaggtcatgctggtcgagctgctcgacgcaaaccttaccacaacatatatatgtcaaacggcgtttcactacatgagctgtcaatttcactcttgaaaggtcaaaagatgtcaaacagacaaagtgatgacttgtgcagcatttgttcagatggtgggcaactactcctttgtgatacctgtccaagagcttttcatagagaatgtgttggcttatcttctgccacaaagggaacttggtgttgccgatattgtgagaatagacaacagagggaaagttgtttggcatataacaacaatgcaatagctgctgggagagttgaaggagttgatgccttggaacaaatattcacgcggtcgatacgtattgctacaacacttgagactggatttggtggttgcgcactgtgcaagctccatgatttcagcaaaaagaaattcagtacccgaaccgtgctgctttgtgaccaatgtggtagagaatatcatgttggttgcctcaaggaacataatatggctgatctgacggcattgcccgagggagcctggtattgttctacggactgtgtgaggattaaccagacactgcaagatttacttaacagtggtggagaacctgttcttgccatggatttagatgtcattaagaagaaacgagaagtgaaaggttttaatgatgatgatgctgaccttgatgttagatggagagttttaaaggacaagagctcagacgacagcaaactagtgctctccaaagcagttgccattttccatgaaacttttgatcccattatccaggtttcaactggacgggacctcattccagccatggtttatgggaggagtgcaagggaccaagattacacaggaatgtattgtactgtgttaactgtgaacaatattgtagtttctgcgggtcttttccgcatcatgggtagtgaaattgctgagctgccgttggttgctacaagtagggatagacaaggcttggggtatttccaagcacttttttcctgcatagaacgtctgttgtcatctttggaggtgaaacattttgtgctaccagctgcagaggaagcggagtctatctggactgagcgttttgggttcgcaaagataagccaggatgagctgcgcgaatacctcaagggtgggcgaacaactgtgtttcaggggacgtcaaacctgcacaagctggttgcgaaacttgaatgctagttatgtgagaattgtatggcaagagcaaggacatgaagctaagaagcagctcattgtttgtgtgcctctgggattgatgcagacaggaaagaggcaccctgatccctttcttgtaaatgttggtgagcatgttggcattggcatcttgatctgtttccataggtaaggtgaagaggattgtgtaagataaaagggacaagctgtatgtaaagacaagccaaagctgagtgaatttcaggcaccttattgtgtggagggtcctgtgtttgttgagtaggcaacgctcgggctggtgtgagatgatgactgcatttgtgttgtgttggtggtattttcactgctgacatgactgttgtatcggatgacatcttttctgttttatgacagtggcagtgtgatactaggctgttaggaggggacgggggaggtcaaacccaacgtacatcatgagtggagctgctgtaatgtaacagaagtattgcaccccccccccccccccccccaataatatataacatgcttaatttggtgcgaattccttgccgcttgtggagcttag

SEQ ID NO: 29490 - DNA, 2373 bp, Zea Mays
tttcagtcagttcgctccgctcccacatgcctcctccgcctccctctcgccgtcccggcatacccaatccctaggcaccccgccgaaaccctagattctcctctcctgctccgatggctggggcagcggcgtcccccgtggcggcccacgtggtggaacggttccgctcgcggctgcgcgaggaagcgggcagcggggagccgggcgcctccgcggtcgtgcgcttgtacgcggaggcgctccgcgagcttaccttcaactgcaagccggtcatcaccgagctcaccatcgtcgcaggccagcacgccgcgctcgccgccgggggaatcgccggcgccgtctgcgcccgcgtcgccgagtcagcagctcaggacactaggcaaatgtctgatgtgcaggaggatctgataaatggactaacatcgaatagttcacaaggacggccttcagtgtttcagcatgttgacatttccacaaggagatatccaagcaattttggtgttcagaatggagctcttttggagtaccagaattctgaacatactctaaatcatgggagaattgctaccatgccagctccaccttggcaacagcctattggtcttccattgcgaatacaaggacctgaacatccttcagtacttggtagaataccacagcctgtcgacggtgaaatgccagtcaagaggttggacattagtggcacgtacaatggtttgaatgtagataaacccttggtgaagcataggtcatcacctgctcctgccccgacagaatggctcccccttcaccatgcccaatcacaaactttaccactaattccacctgataccaaacatgttagaagtgcatcagatagtttagaaattagttcttttgttagccatggaggtagttcatcagtatttgttccacggcatcagtatgatgccgtggatcggaaaacaggtaccagtaacttagctcaaccaccatcaccatatcagaaccaagatttgttgccatcaagtcaacaaaatcaaggtacaattttgggaaaccaagctcatcctcatcgtcccctaaagttacatccccatgctcatcctcaccatcaggagacctttagaagctttgcacctggcatgtctgtatctccattccaaggacaaggaggtaatgcaaccatgacaccagtttctgttctgccaacgtctttttctgtacctcctgctgtgccaccctatggcgtgctgtctgcacctgggtttcctatgccaccattaccgcctggaccaccagcacctgtctcactgcagatgggttcatcatcatcacaagttggtggcccccaaccatttgtctctggactgttgagtaaccttatgcggcacggtgtaatttcactggaaccacctagtcaatcccaggattctgttggagttgacttcaatgtagacctcaaggtacggaatgaatctgtcaccaatgctttgtatcaggatcttccaaggcagtgcaaaacttgtggtcttcgatttaaatgccaagaggagcatcgtgctcacatggactggcatgttacaaagaacaggaattcaaagaatcgtaagaaatcttcacgtaaatattttgtcaccgctgttgaatggttaagagcagcagaaacagtaggaaacgatggagttcctgcttttgtgctctcagacccagtcccagacagacaggaagagaaagaaattgctgttcctgcggatgaggagcaaacatcctgtgcattatgtcaagagccatttgaagatttctacagtgatgagactgacgagtggatgtacagaggtgcagtttatatgaatgcaccagatggtaatatcgatggtttggaatggtcacagttgggacctattgtccatgctaaatgtcgatctgggcccggcaatacttcttagggtgggcatagctgggatgatttgatagtttttttttcccgttgcggctgtaggcatgacctgtaaactaatggagactcagattttggtatggttagcttcttttccatctggctcccttaatagccagtgcatagaatgttttttggaacaaaaaggcaggagccagtgcatagaatgtcaatgtgacaatagtgtataactgtaaaatttttgtgtaattcagttgcacagtgctgctttttcattacaactatagtgtgatctatactgaagcttcatgtttagggtttctgcagcacagttgttgacaacggtatatgtatatgtaaccatggtttcactggacatgggaaacaatatatttcaatagtcctgttttcttccgttaatatcttgtgcagaatacatagcagttctctacgttggttggtagctttggaag

SEQ ID NO: 29491 - DNA, 1653 bp, Zea Mays
gttctttcccaccactcatcaaaactttcttcccctggttttggaaataggttctgcaaatcttaaaatttgttcgcatgaaggctatttgtgtgttagaagccattgtaaggaaacaggatactgatccttactctatcatcgcttcatatttcactgagaacacagcttctgttgttaaatgctctgagctgccacaggtttctctcagagagaaagcctcaaaggtcttgaatatgctgattggggaacaacctaccggaaccgcagcaacaaaagctgcgatgcccacacctgttcagatgcctgatttgatcgatacaggtgatcaagatgatctggcaacaagttctggacatgcaagcattgaacagaattctgggaacagtgcatatgtttcttcagttgatgatttgcttggtggtgaacctatttctgatacaagtgtcactgctgatagtaatggaagcgacccatttgcagatgtatcattccatgaggcagagactaaggagactaatgatctgttctcagggttgacagtagaagagaaatcatcaactaccatgcatgatagttcttcggacaaaaatgaattaccagatatctttggcagctcccctgattctttcaaccagggtagtgttactgaccaaggaactgtcaatgatttgattgctggcttgaaccttaatggaacaggccatgctcagtctgcagttaaagcagaacccaatagcaacagtggttcacagttctttgatacaaaaaatgagtccggccatgtgccaagtgctgcaacattgaatgacattcttggtcaaaactcgctttaccaacagcagcagactccattgcagtacagctttcctcaacatatgatgctcaatcaatcatttcctggacaacaattaaattatggtgccatggggattcttcttgctcagcagcagcagttactgcaaagttttggaaatttcaatgctggacttgggaattcttctttcaattcgatgaacggtgggaatacatctgtgcttccagatattttcaattcaagtaatcaacctcaaaatcatgttgcagtgatgagcagttcgaagaaagatgacaataaagcttttgattttgtttcggatcaccttgcagcagcacgtggttcaagaaagtgaaacaggaagcaatgaacatgtccagatgctggaaagagctcaagtatttgatggacacaatagctgggaattccaaaaactgcatctcgtcacagcctcgcagattggatgcgtgattcacacggctggtttggcattgtttgaacacatgagaaggaagggttgttccatacggttggaagacgagatgttgcgttgtgtactatgtatttagacgaagactgttcttttttacgctgaaaaataaattgcatcttccgtctttctttgtgttgtgctccttttctctatcctttttcttttctagaaaaaaaaagagtgagacactatacgtgtttgttacctgcaggttttatgtttcttttctgtacaagtatatggaggatttttttggtggcaattgtaaagctttggaacgtgaataagagggtgcagtatgatatgtgctgctacatgatcctggcaatgctgcctcgtgata

SEQ ID NO: 29492 - DNA, 790 bp, Zea Mays
gtccagcagcgtctccgtgggggcctccggcgctctcttcggcctcatcggatccatgctctctgagctcatcaccaactggtcactctacgcaaacaaggtggcggcgctgctaactctgcttctggtgatcctctccaacctggcgctgggcctcctcccccgggtggacaacttcgcccacatcggcggcctcgtctccggcttcctcctcggcttcgtcgtcttcgtccgcccgcacttggactggctcacccagcagcagagaagcggcggcggcgggcaagggcaacagcaagctcctccgccggtggcagcggcgaggaaacgcaagcacaggacgtaccagtatgtgctgtggctggccgccgccgcgctgctcgtggccgggctcacggcggccaccgtgctgcttttccgcgggtacgacgccaaccagcactgcccgtggtgccactacctcagctgcgtgcccaccaggaggtggaggtgcgacgggtcgccgaccacgtgcacggccacgacgcaggagaacaacacgctcagcgtcgtctgcgagggcggcagcaaccgcacgtacgtcgtggcggcggcgtcgcaggacaggatcaaggacctctgcaatcagctctgcacctagcactgcatattcttcgtgtacatcgatccatttttactcaccgtcagagtgaggtcctagctttacagcaagagaaagaatttgttcgatttacaggcaaatatgatatttttgaaatgcagcaaacaaccaaagatttaccatttattt

SEQ ID NO: 29493 - DNA, 2510 bp, Zea Mays
caaagggaaagtgaggccacgcactatcatctctgtctctccccctagctctctattggattggcttgctcccccaataggagaaaagcgaggattcagaatcctcctcttcctcctccccttccacgccatctctctcttcagctagatagcttctcgattcaccttctttccttgcactcgtctctagcagccgtggtgcagctaggtgattgagtatatacgagatgcagcgcacgaccgatagggagctgtagctagagatcgatcgagacatgatacgtaccaccacacggtcgcggccagcagcaccagcaagaggaggaggaggaggaggctgtcgccgccatggtcccaacaactaggaacctgttgttgcaccatgacgtcgacggcaagagcagccgcggcaggccgtgctaccacccggccggccaccagtactacgtcggcatcgccgcccaactggaggcctcggcggcatccgccgcgtggcagcaggaccaccagagcaagccgtcgagatcccctcggctgctgggcatggcagacgacgacgagcagccggacgcggcggcagggcccagcacgagctccgcatcaccgggcggcgccggcgcaggaaacggacgaggaggagactggctccagcttggcctagccgcagccgcggcgtcggcgtcgtcctccggcgacaacagcaccatggatccggatcccccggctcccacggagctggagctttccgcctatgacaagcggaacgcctgcaggatgaggcggccgccgttgttcccgctgccgcttaggagctaccacccgccctacggctacggacggtatcgaccggcggcggcagcagctagccggtccatgccgttcatgcctccgtccaggtgctccagcagcgatgccataataagagtcatcagcccgccgcggcggcggacggaggcgcccaggctgtggctgacgcttcaggcagctcccaaccaaagtagagagcctgttttgcctcagatagcaaagagctacctaagaatcaaggacagcaacatgacggtggaggtggtgatgaagtacttggccgagaagctaggggtcgcgcggtctcggtctcggtctcggtctcatcaggtatgcatcaactcctgcaccattacgttattattcggagtgctctaatttgcaaagcataataaacacgcgtcgtcgtggttttacgtattcgactaatagtcaatagcgaactaaacagtggtaattaataagcatgcactcttgctgaaatcgatctgcagcacaacttgaactgcgtatatttatttatttatttatataatcgtcatgaaagaaacattatacctaagcatacgtagggccctataggcttgttgtttctttctttttcttttttcccttttttgtttttgctttccaaatcacagtacgcggagggggactgaaggggctaaaatctccttattcaattttaaataagaaggtaattttagctccttaatctactccagcattttagtttccaaagtagccgttcaggtgaggtagtcgaaaactaacaccggaaacgtctcgtgcgtttaattccatatacgatggagacttgtaattaagagagttgaaaagggattggaaatggaccgagtatgtatatatatgttcagatcagcaaaggtaaccgttgaatcatgaaagaggctaggctatagctgctcatcaggtgtcttcaaaccatatcaggaggctataggccagcttgattattacatattatgaatgcattagttaatatttgtccgaagacgatatatgcctccaagaaccggttgtttacactaaagaagccggttcggattaaaaaaaagccaagcgaaggggccagcatgcaggggcgtccatgggcctgtgcaggctgggcgaccgcacagggcccccaaagttgaagggcccccaagttaatctaaaacatcaagccggcgggactgcaagaaccgagagcgcgcggccaaggccggaggccagagagactgcgggagcgggagcgcaccgtcaacccgtcgtgcccagtgcgtcaatgcccaccggccaccgccaaggcgacgtcggccagccgccagccgtagagcagacaggtggagctgacatgcagagggcaggtccttcctccctttctgctggtgagagacgtgtgggagacaatctggtgctccacggcggcggcggcggcgcctagggaaggagtagaagaagagacaccagccgacgaccacctgactgcgcggcggcgctcgtcagctgctactgaccatgtcatgacactgtgttacagcacaagtaggaacagcattgcaagctagctagcaccactagatctgtaattaactccacttattggccgacatgttctttgggggggttttaccaactccgatcactgatggctggctaaccgatgatgcgatgcttggacgttggaccaaccaaccaaa

SEQ ID NO: 29494 - DNA, 968 bp, Zea Mays
ctcaattttgctgcattgctgagacatgatacagcttaggtatgggccattttggacatgcaccaccctgattttcgttgctgcatctattgctacttttgtcacctacctatcccacaaatggcacaagaaggaatggaactatgatatcaacttggttacctggtctgctgggttattctatggctacgtgacatttgttcctcttcttttatatgttattctcaagtacttgtcagcacctgctggtttggtgcaattgtggtgcctatatggatattctctgttcatattcattccagcatcgcttctgtctattgtgccaatagaaatattcagatgggtgattgctggtgttgctggtttcatgtctgctactttcgttgctgtaaatctccgcgcacacattgtaaattccggcgagcgatggttcctgatcgttgcagggatattcttgttgcagttggggcttgctgttttgctgaaactatatttcttcacgataactgtatagggttatttacatctaatgatcgtactagtcaagaatacacacaattttccatgtggaatcacttccatgttcattgaacattgatgtaatttttccatgtatacatctttcttacacgtagaattgagaagcccctgaaattgaattacagcagccaaacaagtacacatgtgattgatatgggtgaagagtctgatctgtagtctattctgtgttccactgcttgaggtgaattttgaatgagaaatcgctgtgttctccactcgtcttagcagagatggcaacagtcacgaacctgctgggtattgttaacccaacttcatatctgcgaacataaaatctgttgactaaaaaaatccatgacctgtcgtgtgttttgtttttaggactatgggttgtttggttctgcttttagaacctgtttttcttaaaaaaagtagaaatctgaatcaaa

SEQ ID NO: 29495 - DNA, 202 bp, Zea Mays
ttgatgtagtcgatgccctgcttaattagttagtttattctaggtttggtgtttagttcaatgtcataagggtgtgcaaattacctcgagtaattaacagtgaatggcatcgacatattcatttaggataaaatttgagaatttcatgatgaaagggtatacatcaatatcttaaatctttagttgacaaaaaatgctctca

SEQ ID NO: 29496 - DNA, 1890 bp, Zea Mays
ccgccgccgcctcaaaaccctagctcgatggagacattgagggaggccacagcctgcaggtaggttcgttcgactagtcatgggccgcgaaccatctactgcaatttgcagcccatgagagacgatcgggctctccaagtgggcatggtgcagggtagctgggctccctgggctccaacaaggaacgaggcccatctataatgacggttagacaaagaagtggcgcagcggcactaggccatccgttgaagcgttatcccgcagcgggcaaccacggtcacgtacgcgaaatctctctctctcgtggtcgtgcgcttccttcccgagactccaatgcccctgcctcccctgctcccgcgcctttaccccacgccgcctccacttcgcgccggggacaggggtaacgccgtccctctctctcctggaagaagaaggccggcgcttctcgctgtcgtccgcgcaaagagaaaggacgaggcaagcttcaccgaccgcatccttgactacatcgagggagggccaaagttaaggagatggtatggagcacccgatttgcttcccaaggatggggctgcggaggatgaggaggacgagtctcaagatctggggtgacaaatagatattgaggagtctcgggacgctgtgctagtcaccaatggcgacagtgagattggacagatggtgatattagcactaattctgaaaagggctagaacaaaagcacttgttaaggataaacgaaccactgaagaagcttttggaacttatgtggagtgcatggttggtgatatcggagataagtccttcacaaagagagcactaaggggcgttcgtgctataatttgtccagctgatgatggttttttctctgaaccgatcgacctcaagggtgttcaacacattgttctgctatcacagctggctgtctacagaaatagtggtggtttgcaagctattatgaacagcaagctgaagacgctagcagagaaggatgaagaagtggttcttgcatctggcatcccatgtacaataatcagaacaggttctctgcaaagcactcctggtcgcgagagaggttttgattttactgagggcatagcaagcaagggaagaataagcaaagaggatgctgctaccatatgtgtggaagctctgaatagcattcccctaaagacacacatttttgaggttgcaaatggtaaggagaaggtgatagactggaaagcatggtttgaagagcagaccaaaagagaagaagaaatacagtaaaaaacaaattggaagtgtttttcgcttgttggtccatgagaaaggaaaatagaaaagagcaaaaaaaggagaggatttataaaaacttgatggctagtttggaaactcaaatgctcttcggaattgaaggggatgggagaggaaattagttcatttctacctcaatcctctccaattccgaacgagatttgaggttcccaaatagcctaaaggaaatgagctgaaggttacgtttgatcctctagccttgctggcaattgaatcatactagtatatccgatgaagaaacaaaagtgcgtggagaagtggaggcacgtctatgaactctacactctgcagttgggctgaagcccctgatccctcattgtttatcaactcattcattatcttatataaaatgcagttcaaattatttgattaaagactttaaccatccacgagtatttctgtacacatgtatctagcgtttctgccagtattgtttgttgttcaatttgaagattaggccatcaagttattacttcagggcaacagaagcctcaagtcaatgtcacatggtactggatttctgcagcaaacatgttaacatgctgccgtctttaagggtttgttcgctttcct

SEQ ID NO: 29497 - DNA, 291 bp, Zea Mays
tcagactcaaactcgccacctttgggaatttccagggcgacttggctataattcaccggactgtccggtgtacaccggacagtgtccggtgcgccaagggagatcggcctccggaactcgccagcttcaggaaacgccaacggctagtccgctataattcaccggactgtccggtgtgcaccggactgtccggtgcgactccggagcaacggtcatctctgcgccaacggctctctgccgcgtatttaatgcgcgctctgcgcgcgcaggagtcagaatcgcccatgctgg

SEQ ID NO: 29498 - DNA, 4883 bp, Zea Mays
atggagatgtgcagaggtgggaggaagggatcgcgggcggccgagaccttgccgatggccgccatcgcggggctcggccacggcgacgcgagtgcaggtgcgggcgccgatggagatgtgcagaggtgggaggaagggatcgcgggcggccgagaccttgccgatgtcatattcaccaacgagtcaaacattgtgcgctggaagaacaagcgacaacaagctgttgactccaaagttggccgccttgataactttattgaatgtgttaaagcccctattcaggaagtaggtgtccctaaaatccctatgatctatggaagggttggcgttattgcccttgacaatgcgcgccaaagtgctaagattattgaccaatctcttaccccaggaaagatttatgatggagatgggttcaattacatcaaagaatcttttgaaaatggtactcttcaccttattgggttgttgagtgatggtggtgtacagttaagttacaagcgtaccacaagatttacttttatttgctctatccagttacttctgaaaggtgttagtgagagaggagcaaaaaaaattcgtgtgcacaaccttaccgatgggcgtgacgttttggatggaagcagggttggtttcgtggagaccctagagaatgatcttttggagcttcgaggcaagggtattgatgcacagattgcatctggtggtggaaggatgtatgttaccatggaccgttatgagaatgactgggatgtggttaaacgtgactgggatgctcaggtgctcgaagaagcaccctacaaattcaaaagtgcacttgaggctgtgaaaacactgagagcacaacccaaggctaatgatcaatacttgcccccatttgtgatagttgatgacagcggcaaagctgttggacctgtattagatggtgatgcagttgtcactatcaacttccgagccgatcgcatggttatgcttgcgaaagcactagagtatgcagattttaacaactttgaccgtgtacctgtccccgaaattcgatatgctgggatgcttcaatatgatggtgagttgaagcttccaaatcgctaccttgtttccacaccagagataaatagaacatctggggagtacttggtgaagaatggcatccgcacctttgcttgcaggcaaccagggaagacaacgcgttcatcctcccacgcgcttcctccgccctattttagtctgctcgacacgccaccggccactgacatcccatatcgccaagtccccttccctcgcctcgcgttagtagcctgcttccgacccgcacatctccctccggttctcgccatgggcgccggcgccaacaaccacgaggagtcgagccccctcatcccagctgcggtcgccgcccccgcgtacgagaagcccgtgtcggcccacgccttcggcggcgtcccgcgggagagctggaactccgggatcctctcctgcctcggccgcaacgacgagttctgcagcagcgacgtcgaagtgtgtacgtgccgtgccccttgtcctcgaaatcgatactctttgttcgagtcgtgcgtaatcttgggggtagagatatgcgtggttttgcgcttggggatctcgaggaggaataggtggttgtattaccacgaattttgagttagatatcttcggaaatggctagatcttgtaaaaatttcggtagccttcgcaatgggaggcctagtcggtgttaggtttggtgcgcaactgaattgttagaacttctgatcagttcgtctgaattttatcgcctgatttcttcactaaattgaagttaggatgctgcacgtaatcggattgggttgctgtgaatttctgttaatttgaagtgtctcgcttattaatatgaaatcatggcacaacaaggcctcatagagtcatagtccacgtgattggttggtgtactatgaagcgcctggcccgagccagcctggtggagcagagaagctctttccctcaatctccacgtatgcaggctgaagggtgagaaatgtaactgggctgcatgtgcgtgtgcgagctcggatcattgcatgcacgtaaccaatcacaaacacatatgcggtcaacgcatctgatgagtctgaacgctgctgtcgcggtaaccaaacacgcggagtatgaatttgtgtatacataaatttcatgataatagacagacctaagtcttttcttgttggaattatcctttctagctagcaaattgtttcctgtaaaggtgctatgactactagactctgtatgattcatttttgtattccctcttgtacaatctttcaggaacttgtaaaaaaatgtatgatatctctagcctgaaattcgtcatcattccaaaggcagtctagacaagctttacatcttagctctaattattggcttgttcaggatgagctgaactttctacagagctatcatatttaacatgtacagtatttgatgaattaaatgttatatttaggcactgctgtcttaaatggctcaattaaatgatgtgctagagttgtctcttgaaagtgctgttctaagttctaaccagccaacgacagctggtttgttcttctaaaagttgatgtaatagttgattaattgtgattgctcttgtttgatccacgttgaaggattggcaatttcctcttcattttttccacgactgtaaaactgaatttcgttatgatagtaacgaaattacaaagttcaataatttaaagagacagcacattaaccttacaacccagctccacaattctgatcaccaagggatgagccattgatgacacgaagtgtgctaccaaactaaacacgccagcctgcatccagcgttgtcttccagcaaaagcaacaatatgagtcatttacaggctagtgtcctgagcagtacggactggtctggcatccatcctgatctagtctcaatgcccttgtggaaatagagagcgatcgtcttcacactctccgctccctggattacctgcttctccacctctgccttctgtaaacctgcccaataattgaaggaacaggtcatacaaacaatctcagcaggagatttgactctcttatcatcaaaacacacagcatttctagtgcgccagatagcccaataaatcgctgcaaatcacattgcacacacaggtttactcatcctgatcattagtttctccatctacctactgtttagtttgtttcttctagctctgtttcatactccagggccagagtcttgctgtatatttgttgagtaatagccatgtttgtatgtggactattccctgaaggttatccactaaattgttcatttccagatttagataccatgcctaaatgtagtgccctgataccatgaattagctgagatccaacacctattttattgatcacaattgtacttttatgtatacaacggcacatgatgctcttgatctgctccataaaaagctaaaagtgcatgatctaggaatagaaggagcgggtgcctttgttaaccatagcattttgcaaacttttaccatgaatttatgattgccgaacttgttaactgaatttatcagttgaactactttgcttatagcatacacacttaacacaatatcagcctgtgaaattctgggaaggtggattttgctttttttcccttgtaattcgcaatttcacagatgatcttgaattacttcatttttttaatttagatgttgaaccaagaactaactacatattgtttggatgtatcaggtcttcttggaacggtagcaccatgtgtgctctatggtagcaatgttgagaggcttgctgctggacaaggcacatttgcaaacagctgtttgccttacactgggctgtatttgcttgggaactctctctttgggtggaactgccttgccccatggttctctcatcccactcgtactgctattcgacaacgctacaatcttgaggcaagtgttctgtgcacccagctttttgtacggttttcattcgtcagtatgtgggtatccatctctgtttgaaatttgtacatggtagtaattgaattgagactagcatatttgcatcagtttgtattgatttttgagtttatatcgattttcatcctctatctatgtttgcttctaggacttgctctagctctgtgtcaaagtaaattatgacacggttctttgaatccttctctgttcagggtagctttgaggctttcaccaggcaatgtgggtgctgcggcgatctggtcgaggacgaggagaggcgtgagcacctagaggccgcctgtgaccttgcgacccactacctctgccacccctgcgccctctgccaggagggtcgcgagctgcgccgcagggttccccaccctggattcaacaatgggcactccgtctttgtcatgatgccgcccatggagcagaccatggggcgtggcatgtgagctattccaccaccttccctaccctagttttatctgtgcttcccgtggtttatcatctgctgctgttggccttgatgtgtgatgtgtcgccgtcagtaaatacgagtttgtgatatgaggtcgtgctgggaactttggattgtttgcttcttatcgactgcagtttggattctggacagtcacttatctcctgtgttactgtgtttgtacggtggtcctcgatgggcctgtcaatgtgaaatgcatttcgtcgtaccttattctgaatgtttttccctccaaaatatgagccccatacactaatatggcggtagctctcgtcacaaaccctcggatacagcagcgtttgtgcgtggaaagaaaaatcgggtgtcttaggtatgttcggttatgtctggattaaagtagattgagggtccgttcgttaaac

SEQ ID NO: 29499 - DNA, 3515 bp, Zea Mays
cgtgcgcggcagcgagcgtgcgtacacgtcacgcaccacgtcagaagccccccaacccaccggtcccccactcagaccgtccgacgaacgactcgacgactgtcgactcctgcacaggcaacacctcacctcgatgatgcatccgctccgccgcatcctcgctctcttactcgtcggcctcctccccgcggccgcgtggtccttggcaccaccccgcttcccgaggccccaaccccgctcgcggccgggagctaatggggtgggagactacgagtacgagacgcgatacttccggcagcggctggaccacttcagctttccaggggtcggggacgaggacgaggacgaggcggctgcgttcttccagcagcggtacctggtgggccgcggcggtgggtgggctggacccggcggccccatcttcttctactgcggcaacgagggcgacatcgcctggttcgccgccaactccggcctcgtctgggaggccgccccacgcttcgccgccctcgtcgtcttcgccgagcatcgctactacggagagtccatgcctttcggtagcaaagccaaggcgtacagcgactccaagtccctggcgtatctcacggccgagcaggcgcttgctgactttgctgtgctgctcactgacctcaagaggaacctatcggcagagggcagccccgttgtgctctttgggggctcatacggtggaactgcttggatgagactcaaatatccccatattgctattggggctctcgcatcatcagctccgatcctgcagtttgaggacattgttccttctactatattctatgatctcgtatctgatgattttaggagggaaagtttaagttgttttcttacaataaaagactcctggaaagaattagatgaccaagcaaacgagcaagatggtcttctgaaactaagtaaaacgttccacctttgccagaccctgaaaacaagtggagacctttcagattggttgagctcagcgtacagttatctggccatggtggattacccacttccatcagaatttctcatgcctttgccagccaatcctattaaagaagtatgcagaaatatcgacagtcaacctaagggtactggtactctggaacgtatatatgcaggagtaaatgtatactacaattatactggcactgttgactgctttgatctaaatgatgacccccatggaatgggtggatgggactggcaggcttgtaccgagatggtaatgccaatgtcttacagtgaacaaaggagcatgtatccaccttataaatttgactacgcttcctatgctgaggattgcatcaaaagctatggtgtcaggccaaggcctaagtggattacaacagaatttgaatatcactaaggtcctggaaaattttggtagtaacatcatattcttcaacggacttcttgacccatggagtggcggaggtgtcctgaagaatatatctgagagtgtcgttgctattgtggctccattaggagcacatcacatcgatctgcgcccggcaactccagatgacccggattggctggtggccctgagagaatcagagctggagatcatatctggctggctatgggattactacggggctggaggagcactcttccagcctgtagctgtgaagggctcctcttcatactgaggaaccgcaccctggctaataactcaaatgcttggtctcagaaataagagggccctgctgcaagtgccaaccaccgttaatgctgctgcagtgctgcgtcatggagaaggaagatcttcatgttgatgatcgggtccgctcctgcatcatgtgccatatcagtagcatttggtctgtgtatcaaatgggacatgtacttggctgatgaggtgaggaaaacactggataacgtaacgactctttcgcagtggtggtggcggtcagcaggtgctctagaggcttgatatcacgtgcatgtgccgctgtaaataacataatgctctatgtacgtgtacatctctactactctataagcctgtagtgtaggcgtgcacaccccgtgcaccgtgttctgcctccaacgtcctctcgcccacgcgctccgtcaatcacgcaagttatgccaccgatgtcgcccgaccgccccatccgcattgcccccacccccgtccgccgctagatgcggatcccgccgcttccagcatccagccaagcccgtgagccgcacgccgctcctgctcccgctccgagcgccttaggtcaggcggcgttggcccgacggcggggggaggcatcacgctgccatccatgggcgcgcccccgccgccgctgcacccgacgcccacctctcccacggcgcgcccgcaccaccaccactacctcttctccatcaagcagctcaacacgctgggcgcggcggccgtgctcgccttctccaccacggtcccgctctcggagactgccttcgcggtgctcctcccccctacctcctcgtcctcgcctggctcgccttcccgcagcgcccaggccgctcgagacccggatcccgcctctacccctcggcaccatcgtcagtgtcttcgatggccacaacggccccgacgcccccaccccgacagacactgagccctcttccgctcgcgtgactggtgccccctcaaccctcgactctcctccccaccgtggccccttccccagccccagtgaccagcgcctcccttcctaagtgcggccatggcgaccatcgtgccctagcccgcccctgcaccatggcaagcacaccccttctactcctctcgccccaacccctgtgcagcccagcgcggtggcctataacccacagcaaggcgcaactagctggctggtggccctgccccggtgagcccctgctaggcgcggccagcaacccccgtggtctagcccctgcctaggcacacccaaaacccctgcccttgcaacttgtcctcggcgccgccccactcgcccgagatctgccgcgacaacaggaattggacgtacattgggactttgaagtgcagctaaggctacctggcgattggtggaaagagatctgatgacggcgatcatggtcgaagagtaggagaggccctagaagaaagcggaataaatgcaccgagctgagaaaggacagaacaaagaaagatcttaaaatcaaagctaaagaagtggagattcaaaatctaaaaaaaagctaatgtcatggaataaatgaggttgatgtggagctaaaaagggaggctatgtttttttgggtgaggcggttatcattggcttgttatgtgaacattattgtgatgtggtttcatgttgtccaggtgccagtttaacaactttttgcaccaccatgtcgagaatatcattgggtcatgtctggagagtaataatgatcaactgatgggccatgtccttgatgagtgtaaacttgttacaagaattttggaagcagagaagaactctgctctatcgtcagcatacattgtcttaagaggtaatgtgtggacg

SEQ ID NO: 29500 - DNA, 739 bp, Zea Mays
tccagttctaggtggtgtcactcatacccatgctgacagtgtacaccgaatatatggcctagacacaaacacggtatggaacatgccagaccagaccagacccgtgccggtccagcatcggtggtgttcgagtgcgatgcgagacccctgccgcactccaaatttggtcacgccgaccgtcgtcctctccgctctacctgttcattctctcttctgttccctcctccctcccagtcccagctggcagcagcacagcagacagagagagtgagctttgccgacaccacactgcatcccattccctcggctgtcgctgatggatgatagatagagctgcggaggagcagggtgagggggaggtgctgccgcccacggtgatcatctctatggccgtgtagaggagcactgcagccggaagagattattcagagagagagagagagagagagagagagagagagagagagagagagagaagggaagcatgaagccaagaaccgcgacactggccgccggcctcctccagctcgtcgcgcttgcggcggtggcggaagccgacaccgacgccggcgacgttgccgccctggggaacctctacagctcctggaacagcccggcgcgcctcgccggctggtccgccagcggcggcgacccctgcggcgccgcgtggacgggcgtctcctgctcgggctccgccgtcacctcaattcacggctatttgaattcacctgttaactgg

SEQ ID NO: 29501 - DNA, 1047 bp, Zea Mays
ctgattgtttcgaacaaaacggatcttcttttctgtacaagtacacggataagagtgatgtgtacgcccttggcatgatcctgggcgtgctgctcactgggagagacccgacagactctttcttctcgggagagagtaccgggcagggcggcctcccaagatggctccggcacacgcagcagtccgcggacccgaaagaaacgctggatagcagcatcctgggggacgagggagaagaggaggagatgctgatggccattcgggttgccattgtctgcctctcggactcgccaaccgaccggccatccagcgacgagctcgtcgccatgctaacgcagctccacagcttatgattaatcaccatatatcgcaaatttcttgagcggctgccgctgcgcatggccttaaaaccatgggggggcgatcatgttggatcagtgcttcctgtttcacagctagcacgggggagtgtgcagcagatctcattgtgtggtgcttgtgagtcacaagcgctgaaatggtcgacaagggaactgacagttcaaggccatataggacaggcgcagtcgctgtgttccctgtacgattcatcagtgatgtagtagctaggtacaatacaagatggtggttgagcttcctgggttgttttgcgcgtgggctgtgaatatgtcttggtagaaaaaaagctctgtgccgtggatctgatctgttggtgttagctgtagcctgtgtatagcctgtagaaagacgtgcttgtgctgtgcactgagacccatcatgtacacccccccggctccactccaatttgcctgagagcagagagactatgatgccgagtatttaacaggctgctggggccaacggtttccatatcatttctctgcgtctcatgagctctcccacatgtttgcgaggagaggtcagaagagaactgccgcggtcatgcatcaactgctggcccactgtgctcgcttgattgcctccatgtgcagcctgttcttgtagactctttgactctgtcagacgctggaaataacaagaatccca

SEQ ID NO: 29502 - DNA, 3984 bp, Zea Mays
gcgtggtgcagcctgcaagtgtaggttctctgcgtgttgctgcttcagaatgctggattgaaatctaaggacattaatgctcggtgctttgctattgatcttcttggtggtattgcatcaagattaaagcgtgattctgtcgtctgtagtgaagaaaagctttggatattgcaagatttcactgataaaggcagtgacggctcaatttttttgaaaaacaagtgttgcgtttgtcttggtggaagaggcataaatatagcctgtaatgaatgtggaagatgtttccattcagattgtatgggggctggtagtcaggataacttacagcgtgatagtgtctgccccttgtgtttttgcaaacaacagctcaatgtgctacagtcgtactgccagtcacaaattaaagaaaatggcaaaaaaactgctgcctctgccagtaagaaatctgctaaaccaactgaggtgtcagcagtggaaattgttcaacaaatactactgagttatctccaagaagctggttcacaagatgatgggaacctgtttactcgatggttctatctgtgcatctggaacaaagatgaccaacattctcaggagaagatcatttactatcttgctagattaaaatccaaggagattctgcgagattctggcaatggtctggcaatttccagagattcagcaaagaaaatttgcttggcacttggtcagaagaactcattttgtaggggttttgataaaattcttgcccttcttttggctagtttgagagaaaattctcctgtaataagagcaaaagcattacgtgcggtcagctgtatagttgaagctgatcctgaggtcttgggtgacaaacgtgtccaatatgctgttgaagggagattttgtgattcagctatttctgttcgtgaagctgcccttgaacttgttgggaggcatattgcttcacatcctgatgtgggcctgaagtatatagaaaaagttgctgagcggataaaggacactggagtcagcgttcgcaagcgtgcaatcaaaattataagggatctttgtgcttcaaatccgaacacggacacaactcatgcctttgtggagataatttctcgtgttaatgatgaggagtccagtgtacaggatcttgtatgtaaaacattttatgaactatggtttgaagaaccaactgggagtcataagcacttggttgctgatggaagttcagttccaatggagatagctaaaaagactgagcaaattgttgacatgttgaggaagatgcccaatcaccaacccctgattaccatcataaaacgtaacttgactcttgatttcctccctcagtcaaccaaggctgcagggattaactcatccatggtggcatcaattcggaagcgttgtgaattgatatgcaaacgcttattagaaagaatattgcaggttgaggagggagctgctaatgagatggaaatccacacactaccttatattgttgccttgcaagcattctgtattgttgatcccacactctgcattccagtaactgatccttctaagtttgttgtgacactgcaaccataccttaatattcaggttgacaataaatcatctgcccagttgcttgaaagtattatttttgtgattgatgctgttcttccactcataaggaagccaccacaaaatgttgttgaagaacttgagaaggatctgaaacatatgatagttcgccattcgtatttgacagttgtacatgcctgtatcaagtgcctttgtgctctgagcaagtcagcaggtagaggtccaggattagtggaaaaccttgttaatattttctacaagcatctgtgtggagctaattcagatagtcagctgttgggtcgatcactgttttgtcttggactcctccttcggtatggttatcaattgatgctaacatctgaaaatcagcttgattttcccaagatcatcaacttgctccagagaaaatatcttctcaaggatgatttcagcttgaaggttcgagctttgcagactttgggatacatacttattgcgaagcctgaatttatgctacaaaaggatatgttgaatctcatagagacagcactctcttctgaggttgattatagattcaagattcaaggacttcaaaacctctacgagtatcttagagatgctgaaagccaacttactgctgagagtactgcgaaacctcctgggcagtgtgaaataaatggcagaagtgaagtgcctgttgctgctggtgctggagacaccaacatatgtggtggtattatccaattgtattggagttctattcttgaaaggtgcttggatacaaatgatcaagttcgccagagtgcacttaagattgttgaagttgtacttcgtcagggtttagtccaccctattacctgtgtacctcaccttatagcacttgaaatggacccgctggaggggaattcgaagttggctcatcatctcttgatgaatatgaatgaaaagtacccttcattttttgaaagtcgcttgggtgatggactgcaattgtcatttaaattctttgaatccatagtcagcaaccataagatgtccgcaaacataaaatcaaatccaattgcatttgtcaaacctggcatatctagaatataccgtcttatccgttcaaatcgaaattctagaaacaaatttgtccactcgatagttcggaaattcgagtctgatagccggagtcgcagcacagttagctttcttgtatactgtgctgaagttctcgcctctctgcctttcacatgctctgatgaaccactttacttgatctatgatataaatcgagctattcaccttagagctggaggagtcgagggcaatttgaaaaggtggacttctatgtctcagtctcaagagatggcgggtatgccaaccttgccaggagagagtcatgttgtcatgcaagaagagcctggcggatattatgataacatgggagatgccactgaaagggtgaatgacaatccttgcagtacttcagatgtggacattgccaaagttcagggagattgccatgatgcaatagccctccagctacttctgaaattgaagagacatttgaaagttgtttatggtttagatgatgcccgctgtcaggcattttccctgaaggagcccccgaaatctggagaaacattctccaggcagaatgtttcttttaatattggcaacactaacctcagtctgccgagctgcctgcaggacgcagcctctgtttaccaggatttcaagacagtgcttcgcgaagattccatggactttgctgtgttcgtcccttcagtccagactaggaagcgcccaaccccaagaaatacaacgagcccaaccccaagaagtatgacgagagtcaggagaacggctgccccgagtgttacaaaagcccgtggtggtgcacgtggcgacgattccgacgataccgatgacgacgactggaccgggggtccaagagtgctagacttcagtgggggcggccgcgtgacaaggcagagggtccaagtatgatgtttcttttttgcgtgcgtgcgtgtgtacattatagggaagggaaacctatagcaggcttagcagctgacacgagagagttaggggttgaattttaggtttcaggtcgtttattttagggtacatagaagcagaaaggaaaggaagatagccttttacttagatgtcattaatttggagcactccttttcttgctctgcccctgtcctgtttgtaatttccgtggggcttcggcaaaaaactgacaaaataggttgtgctccggtttctgatctctgattcaatgggaaatggaattattccttttgctttgcctgtgtaagcagttagcgcctactccgtctgttccaatatacaatttgttttagcattttatttttgtgtctatatttattcgtttggctttaatccgtatcggtttctatagatgtttttgtc

SEQ ID NO: 29503 - DNA, 619 bp, Zea Mays
gaacccgcgccagcccgggtgcaggccccgcccccgcccctaccccgaggccgcccagcctcgtcgtcgcggccggccgccaacagcccgccaagatatatagaagcgcttggtgaaacttgggtcggggcgctgctagcgctcgcggacgccgtgtgccaccgcggcgagccgcgcgagatctcccgcgtcctcccggttctcagggaccacggtgtctgcgccgacgcgcacctctacaacgcgctgatgaaggcgagcgtcgcggcgtacgaccctgggccgtcctcagggtgtttcggtagatgaggagcaacggcgtggaccccgacctcgtcacctacaacatgtgtgatttgaggtgcgcgtagtgtagtagtccgagctgaggaactaacgaaaaaagaactgtttcctggcatttgagggcaacttggtgtcgagactattaccaattgtcatacaaaaaataaattgtccatgcagtgcaacaatggactgataaaatgcatttcagagagcaaacgagacattcagtggtggttttcagcaggaagcaagggtgaagatgctacaggtatcatttgttttctggcatgatatagcaggaaaactaggc

SEQ ID NO: 29504 - DNA, 251 bp, Zea Mays
tttattgcctgcactgcaccaaccactgatgcgacatctcggtctcctaccacatagagatgaaaaggaggaaaaagtattttagacgtcggcgctcgtactcctgactcgatgacgacgatcattgttgacttgttgtccttcaccttgtttcgaaggtatgaagcactattgctttcatcgtatctctctcaccgtagcagtaatatatgtaaataagacacatctcttactaagaatatggacggaga

SEQ ID NO: 29505 - DNA, 705 bp, Zea Mays
gcgttcacacctctggctgccttcatttcctgttgacgactgagcgggcgagcgccggcgccctttgccaggtccgtcggcccgttagccggcgactagcgcctccctttgccaggtcttcgacgtccccttcgccgtcgactggcgcccagcagccagcaggtccggtcgccccttctcgtccttcctgcagttcgaaagcgagcatcgaaaccctaaaatccttttctatctgtcgtgttctgtctgcctggtacatttggaagaatgggggtttaccttagcactccgaaaactgagaaggtatccgaagatggggaaaatgataaacttaaattcggagtttcatctatgcaagggtggcgtacaactatggaagatgctccttatgcgtcttacctggatactgacacaccgacacaagtgatggaatccgactcagactcggatatccaactcagcatgattttactcaacttcccaattgtgacttggaatccaattgggtgtgaagagtctgattcgccaaaaataaatgtgctttcaatgtccaggttactgggtgtgcttatatggaaacttgtagaatgtcctaggaagtagagaataaagaactaccaaatattggtgcaaagtcttttcacaaatagtactccctccgttcttttttatttgtcacggtttagtgcaaaaatgaactagcgg

SEQ ID NO: 29506 - DNA, 3403 bp, Zea Mays
ctcggcttaaacccctcttcaagttccaactccagatgccccgggcatccccgtagcctcgcggcctcggcgtccccgtccctccatggccgccccaccgccttacaccccgccggcggcggttccccagcccctcgtcctcctccaccacccgccagctttggtcctccacgtccgcctccgaccccgcagcctccgcctcgcgagagcgcccgccgccacggccaccgcagccgcggcctccgtcgcccccgacgacatctcgcagctcaactaccgcctccgcgccatagttcgccgccgcgaaggcgccgctgcccaaggcgccacctcgtcctcccccgtcgacccggcccaggccgaggcgtacctccgcatgatccgcgaccagcagcggctcggcctgcgccagctccgccgggaggaacaggaaggagagggcgacggagacgaggaaggccccgacggggagcgagccaggaagggagtggcggcggggagctcgctggggcatcgggtggacccgcgggagctggagcccggcgagtatgtcgtgcacaagaaggtcggcgtcgggaaattcgcctgcatcagcgccgaggacggcgccgactacgtcttcattcagtacgctgacggcatggccaagcttgctgttgaccaggccgcgcgcatgctctacagatacaacctgcctcacgagaagaggaggccacggaatttgagcaaactgaacgatccttccacctgggagaagcggaggctgaaagggaagcttgctgttcagaagatggttgtcaacctgatggaactgtatttgcaaaggatgaggctgggaagatctccgtacccaaagcctgcatccatggatgactttgctgctgaatttccttatgagcctactccggaccaatgccaggcctttatagatgttgagaaagatctgacagaaagggaaacaccaatggatagattaatttgtggagatgtgggctttggcaaaacagaagtcgcaatgcgtgctatattcattgttgtgtctgcaggatttcaagctatggttcttgctccaacaataatacttgctaagcaacattatgatgtaatgactgagcgctttgccaactatccagagatgaaggtcgcaatatttagtggtgctcagagcaaagaggagaaagatgagctaataacaatgattaagaatggagatttacacattattgttggcactcatgcccttcttacggaaaggatggtctatagcaatcttggtctcctagtggtggatgaagaacaaaagtttggtgtccaacaaaaggagaagattgcctcatacaagtcttctattgatgttcttacactttctgcaacacccattccacgtaccctgtatctggctttgacgggtttccgtgatgcaagtttgatgtctacaccacctcctgaaagagttgctgtaaagacatatgtgtcagcatttagtaaagaaagggccctatcagctatcaagtttgagctgcaacgtggtggtcaagtcttttatgttgtgcctcgaataaaagcaatagacgatgtgttgcagtttctcaaggactctctgcctgatgtaccaattgctgttgctcatggaaagaaattgtcaaagaacatacaacttgctatggaagattttactagcgggaaagtcaaaattcttgtctgcacacatatcattgaaagtggaatagatattgcacatgccaatacaatgattatccagtttgctgaactatatggacttgcccagctgtatcagttacgaggaagagtaggaagatcaggtacagaaggcttcgcataccttttctacactgataagtctttgctctcaagagttgcaacgactcggagctattgaggagcattcagagcttggccaaggtttccatgttgcagagaaggatatgggtatcaggggatttggaagcttgtttggtgagcaacagtctggagatgttgcaaatgttggcatcgatttattctttgatatgctttttgatagcttgtcaaaggttgaccagttttgcctagtcccagtaccatacaaagatgttcaggtgaacctgaaaattcttctcaatttgacttgcaagctttctgatgcgagcactaaatagtgatattttgcaattttgtatgagcattgtttgagtgaatcttttcttggggcagctggatataaacatttctccacgtctctcttctgaatacataagttatctggaaaatcctgttgagttgctcaatgaagcggcaaaagctgcagagaaagatctatggaccttgatacagtttacagaagacctccgtcgacgatacggaaaggagccccgtgatatggaggtgcttgtttatgctataatcaggactcatgaatcatgattagtggtttactctgttgtgttatttctttctcttgcagttactactgaaaaagctctatgtaaggcggatggctgcagatcttggtatcagtcggatatatccatctggcaagatgatattcatgaaaacaaacatgaacaagaaggtatttaggctcatgacagaagcaatgacttctgagacacatcggaattccctatcatttgctgaaaaggaaattaaggctgaactcctcgtgaatttgccagataccctacttctgaactggcttttccattgcttatcggactgctatactgtaataccagcccttgtgaagtactagattattgttactatttcataagaactgaaggcttctgctgcccaccatgaaaggggacaatatgtccatgcttgaagagaatgatctatcagagaaatcagtcttggctctttgattcatctgtgatggatgactcttcgttatgttggtattggcagtcaggctctggcaggccaaagcaagcccatacacactactgctttaggaaaaggtccgccaaaattgtcaacattacaagcatacttcaatgctatacacgaactggagaatgctccacagacacattgcagttttctacattcgctaacatcaataggatgagtgtctgatgcataattgctaaattcaggtgcaatgcaagtatgaaacatgaaatcaggaagctcagaggacctagttcagatgtacctgacaatagattacatttcaaaattcttctaggtttttttgacatgaactatcaaaatattgctcgagtagatagggaactagggatggcgttaacaatagaccatttgtttgacaataaaacattaggaatttttgaccaattggtcagagttaatatttgttgtaaatctattcaaacagattgtgacattgacaataactataatagttgaaaaaaatcacggaactacaaaaaaaaaa

SEQ ID NO: 29507 - DNA, 1218 bp, Zea Mays
atggtggctcgagagattgctccatgcagagcgaggaactgctcgacagcctgctgtgggttctgctcctccgccgacgagctcacctccgcgtacgagctggtcagagcaatacagcggtcagacaaactcaaagtgcatcaacgcttctgatagcgaagcgcatctatcgactggagagtgttgaaacggtagcagtttcggatgccttaaaggcttaaactacagataaatctgtagtggcaagacaatacaggtaatgtgcttggaaaaaattaccttaaacatcgaacgatgctctctgccgcagaagcttcttgcatggcttcaacagcagccatttgtgctgcatccctgtacttcagaagctccttccctagtttaacgagtgatggaggaagcgttgtccacgaagcgctagcatctgagcactcgctgagctcttcctgggtggagtcagaatcttactgtcatccttattcgatggtttctcttctgctaatgattttcgtctgggagtcgaagagcttcgattttcagacttcttttcagctttggcaggctttgaatccgaattgcctttgtcctttgcatctgctttcccttcccagcttcttctcaaggccttgggcccagattcgaagctcaacaaggtgttactaatggagttacccagggaggacttcctccctgccgtagtggccttcaacacagacgcagccttttctagcaaggacagccttgacggcggcgatttctctgctcctttggttctcactctctgtttcatgtcactcgagaatttatcgaacgacgcaggcagagaatgggcgctggtcggggaagacggcgtcgacctagcgctggttgattttgccttcgagctaaccacgtccttcttgtccgagaggaggccattgagcgcctgtttcgagaggttggagttcgacttgcgacagggcaccggcatccttggaactaccattggtggaggaggcttgggcggccttgccgctgccaagaagaaaagtggaggagctggtcaccacaagatcctccgggctgccgacgcaggcatggcggcccgggaccggcctgacccccctgaggatcggcaccggggtggctgcctcgagacggtcgacatggacgaactgccccagctggatgacgtcgctgaggatgaggtcgtgctgctcgtccggcagcgacacgtag

SEQ ID NO: 29508 - DNA, 1556 bp, Zea Mays
ccaaggccaggttctagagcgaacaaggcccacgtcacccgtggcccgtcaggcgaagcaggtcttgtgtagactttgagagggattggatattaacggaaccaatcacgcacgggaatgcgattcccagcccacctgtaacgttccagtgggccatccttaactccaagcccaacggccctaccccatctcgtcgtgtcatccactccgccgcacaggcgctcagctccgcaacgccgccggaaatggtcgccgccaccgccaccgccaccgccatggccaccgctgcatcgccgctactcaacgggacccgaatacctgcgcggctccgccatcgaggactcagcgtgcgctgcgctgctgtggcgggcggcgcggccgaggcaccggcttccaccggcgcgcggctgtccgcggactgcgtcgtggtgggcggaggcatcagtggcctctgcaccgcgcaggcgctggccacgcggcacggcgtcggggacgtgcttgtcacggaggcccgcgcccgccccggcggcaacattaccaccgtcgagcgccccgaggaagggtacctctgggaggagggtcccaacagcttccagccctccgaccccgttctcaccatggccgtggacagcggactgaaggatgacttggtttttggggacccaaacgcgccgcgtttcgtgctgtgggaggggaagctgaggcccgtgccatccaagcccgccgacctcccgttcttcgatctcatgagcatcccagggaagctcagggccggtctaggcgcgcttggcatccgcccgcctcctccaggccgcgaagagtcagtggaggagttcgtgcgccgcaacctcggtgctgaggtctttgagcgcctcattgagcctttctgctcaggtgtctatgctggtgatccttctaagctcagcatgaaggctgcatttgggaaggtttggcggttggaagaaactggaggtagtattattggtggaaccatcaagacaattcaggagaggagcaagaatccaaaaccaccgagggatgcgtaagagattgatgcattttctttttgttccgttaattggctgttctgccatattgatctgttttaacctcttttagccgccttccgaagccaaaagggcagacagttgcatctttcaggaagggtcttgccatgcttccaaatgccattacatccagcttgggtagtaaagtcaaactatcatggaaactcacgagcattacaaaatcagatgacaagggatatgttttggagtatgaaacgccagaaggggttgtttcggtgcaggctaaaagtgttatcatgactattccatcatatgttgctagcaacattttgcgtccactttcaagcgatgctgcagatgctctatcaagattctattatccaccggttgctgctgtaactgtttcgtatccaaaggaagcaattagaaaagaatgcttaattgatggggaactccagggctttggccagttgcatccacgtagtcaaggagttgagacattagattgaatccaagaatagataatga

SEQ ID NO: 29509 - DNA, 3491 bp, Zea Mays
ggaatacccatcgccgcgcctgcgcgtccgtccagccgagccgagctcgtcgcgtcggttgctgctccgtgcaggactgcaggccccagcgagtcctcacttactcccagaccggcgcccctatatatggtgctgctcccaccgcgagcaaggtggtagctcgcgccactgcacaaacagagactagtccaaagcaccataacgagagagagggagagagagaaagagagaaaaaaaaacactcggaaacgatccgcgaactagtccaccggcgatttgttgttttgttcttcagtgcgtcagccaaccttaactgctacgatcggtcgatcaagggggaggaagtttctggagctctgcccatggcgtcggcgatgaagctgctggggagatcttccttggcgagccctgctgccgcggcgcccggacgggagcggcgaggcgggccctgcttcgccgcggtcggaagggaggggagcgcgcacaggaggaggtcgtcgctgaggtcgaccgcgccggtgggcgcgctggccgagcgggtcgtggtgacgccggcgccaccggagagggccggggcgggccccccggagccgcacccccagagcgtggccgcgcgggccgtggtcaccgtgcggcggaggcggaaggaggacgccaagcgccgggtcgccgagcagctggacgcgtacgccgaccgggttggccgcagtgtcctcctcgagctcatcagcacggagaccgacccaagaaaggggggccccaagaagagcaggcgctcggcgctggtgggctggttcgagaagaaggacgtcaagacggagcgggtggtgtacacggcggacttcaccgttgacgggtccttcggcgagccgggcgcggtcaccgtgctcaaccggcaccagcgcgagttcttcatcgagagcatcgtggtggagggctttccctccggccccgcgcacttcacctgcaactcgtgggtgcagcccacccgcgtggaccgcaacccgcgcgtgttcttcaccaacaagccgtacctgccggccgagacgccgccgggcctgcaggagctccgccgccagcagctcagcgacctgaggggcgagggtgccgacaccggcgagcgcaggatcaccgaccgggtgtgggagtatgacgtgtacaacgacctcggcaacccggacaagggcgccgagttcgcgcgcccggtcctcggcggcgagcagcagctgccgtacccgcggcggatgcgaacgggccggcccaagaccatcacagacgaccgcgcggagagccgggtggagtacccggagcccatctacgtgtcccgggacgaggagttcgaggacgggaagaacgagatgctgtcggagggcgcgctcaaggcgctgctccataacttcatgccgctgctggtgagctccgtgtcgcctgacatccgcgacttcgccggcttccacgacgtggacaacctcttcaaggagggcctccgcctgaagcaggccctgcaggaccagctgttccagaagatccccttcgtgcgcaagatccaggagaacagcgagggcctcctccgctacgacactcccgacatcatcaagaaggacaagtttgcttggctgcgggacgacgagttcgcgaggcaggcgctggctggcatcaaccccgtcaacatcgaacgtcttcaggcgttcccgccgatgagcaagctggacccggccgtgtacggcccgccggagtcggccatcacggaggagcacatcatcggacagctcgacggcatgtcggtgcagcaggcgctgcaggacgacaggctgtacatgctggactaccacgacatcttcatgccgttcctggaccggatcaacgcgctggacgggcggaaggcctacggcacgcgcacgctcttcttcctgacggccgcgggcacgctgaagcccatcgcgatcgagctgtgcctgccgccgatgaccgacgggtgcgcgcgcgccaagcgggtgttcacgccgcccgccgatgccaccagcaactggctgtggcagctcgccaaggcacacgtctgctccaatgacgccggcgtccaccagctcatcaaccactggctgaggacgcacgcggccatggagccgttcatcatcgcggcgcaccggcacctgagcacgatgcaccccatcttcaagctgctcaagcctcacatgcggtacacgctcaagatcaacgcgctggcgcggcagatcctcatcaacggcgacggcgtcatcgagtccgggttcacccctggccgctactgcatggagatgagctcgttcgcgtaccgggagctctggcggctagaccaggagggcctccctgccgatctcatcagaagaggaatggccgtggaggacccgacgcagccgcacggtctccggctgctcatcgaggactacccgtacgccaccgacgggttgctgctctggtcggccatcaggcggtggtgcgacgcctacgtggccatgtactacccgtccgacgagtccgtgcagggcgacaccgagctgcagtcgtggtacagggaggccgtgcacacggggcacgcggacaagcgcgacgcgccgtggtggccgcgcctgtcgacgcccgcggacctggcgtcgctgctgacgacgctgctgtggctcacctcggcgcagcacgcggcgctcaacttcgggcagtacccgctgggcggctacatcccgaaccggccgccgctgatgcggcggctggtgcccgccgagggcgacccggagtacgcgcacctggtggccgacccgcaccgcttcttcctgtcggcgctgcccagcctgacgcagaccaccacgttcatgaccgtcatcgacacgctgtccacgcactccgccgacgagcagtacctcggggagcggcctgatgaggcgtggacggccgacccggcggcgttggcggccgcgcgcgagttcgcggacgaggtgcgccgcgccgaggaggagatcgaacggcgcaacgctgacactggccgccgcaaccggtgcggcgctggcgtgctgccgtacgagctcatggcgcccacgtcggggccgggcatcacctgccgcggcgtccccaacagcgttaccatttagcctctcagtaccgacagacagccatgggcgcatgacagagatgatctgaaaggagaatttttttccactcattatagtcgggtggggagaaatctaagcagaagcaaatgaattttgcattatttctccccccattgccaaattgccattgatttggtggtccgaacaggtaaaatttgatttttgactaggggcaagactgtgaggaactgaatgggtgtaaataatttgttatatacaaaaatcaatggaatataatcattatagagttctctggataaagcaatgtcgttatacagaaatgtttgctatgctttgtattgctcaacctgtgttttcttcaaatactacggcattcttaccggcgacatt

SEQ ID NO: 29510 - DNA, 2027 bp, Zea Mays
gggtaatctaaatacacgaaatagaactgtcgtatgtgagccattgtctattagacctatagccgtatgtcgccgttaccagcagcggccacatgggcggggcaggtgggcttatgttgctgcgcgcgcggtgccgtctccaactctgtctcggcctctcgcgtggaggtggaggtggaggcggagccgatgagatcgatcgcccgacccccgtcacgtccggggtcgcattctctttccgtcccggggaaaaaagaaggaaaccgaaccttggcagcggcgtgccggcaggcatgtcagcgacggtagccggccacaggtccagattccggaaccgaaccaccgtcccccgcgaaccacggaacagcgaagacacctgggccagggctagtgaggccaagccgatccgaaacatcgcgttgcgtcccgcacaatcccgtcccgatctgggccgggggcacgcgagcgacgataaacttcctcgtggcggtgagggccggcttggagtcggcgcagagctggacgagttgcacttgcaccttgcacgcgacagccacgcactagcctgcagctgcagggcaggggcggagaccatggggagcccgcaccatggacacggcgttgacggtggcggccgcagcgacgacgaggagggcgacgccgggtcgtggcggctgcgcatggacagcggcttcagcgtcccggaccggttccaccgccagccgcccttctacgccaggatcttcggcggctcgcacgggaagcagaggaagatcgcgaagtactacaagaaacaagagaatctactgaaggatttcagcgaaatggagaccatgaacgaaatgggtggcctagatcagaatgctcctaccgaggaagagcagaagcagttggcgaagagcgagaggtttgccatcaacctgtcgaatgcagtcaacctggtcctcttcgtaacaaaagtcgtcgcttcagtcgaaagcgcgtccatggcggttatagcgtcgacgctggactctctgttggacctgctgtcagggttcatactttggttcactgcgtacaagatgaaaaagccgaacaagtacaactatccaattggaaagaggcgcatgcagccagtgggaataatagttttcgcatcagtgatgggcacacttggcttccaagtgctgatcgaatcagggcgccagctcataactcagcatgtcctctgttgcggtcgtgagttcttcctcatgctctactgcagaacgttcaagaatgagatcgtgagggcctacgcccaggaccatttcttcgacgtaatcacaaactcggtcggcctggtctcggcgctgctcgctgtccggttcaaatggtggatggaccctgttggcgccatactgatcgcgttgtacacgatcacgacgtgggcgcgaacagtgctggagaacgtaggcacactgataggcaagtcggcgccggcagagtacctgacgaagctcacgtacttgatctggaaccaccatgaggagatccagcacatcgacacggtgcgagcctacaccttcggcacgcactacttcgtcgaggtggacatcgttctctcgggcgacatgccgctgagtcaggcacatgacatcggcgagtcgctgcaggagaagctggagcagctgaccgaggtcgagcgcgccttcgtccatgtggatttcgagttcacgcaccggcccgagcacaaggccgaggtctgagtgcgtggttagtggttactgcagagttcagaccagctgtagcgctactgcagatttgacttcatatgctattagttcgtaagatgaatgctatattcatttcccacaactcttcaaaaagaatctagatattttttgtcatgtacgtgcagactggaataaaattttgtatagtcgttcatgaaccggtgaaaaatatattttttaatacatttgactaataaagaattattcatattagtttctttttattttctataaaacaaacataatagatatccaaagtgtatattttaa

SEQ ID NO: 29511 - DNA, 1106 bp, Zea Mays
tggcgatagtcatcacaaatgttcttctagtgttgcttaatgcacagtcacatatatgtcacctgagagaattcgtaatgagaactattcttatgctgctgatatttggagtcttggactaacaatattggaatgtgctactggaaaattcccatatgacgtaaatgagggccctgcaaatctaatgttgcagatacttgatgatccatcaccaacaccaccagtagatacttgttcattagaattctgctcattcatcaatgattgcttgcagaaagatgctgatgcaaggcccacatgtgagcaggaactgaagtggacttggcagcatatgtcaaaagtgtagttgacccaacagaaaggctaaagcaaatagctgagatgcttgctatacattactacctcttgtttaatggacctgatgggatttggcatcatatgaagacattctacatggaacaatctactttcagtttctcagagaacgtgtatgttggccagaatgaaatttttgatattttgtcaaatataaggaaaaagctaaaaggtgataggcctcgagagaaaattgttcatgttgtcgagaagctacattgtcgtgcaaatggtgaaactggggttgcaattcgtgtgtctggatctttcattgtgggaaaccaatttcttgtatgtggcgaggggataaaagctgaagggatgcctagcttggatgagctctctattgacattccaagcaaacgcgtaggccagttcagagagcagtttatcatgcaaccgggaaacttaatgtcatgctattacatatcaaagcaagatctgtacattatccaatcctgattgaacatattatttgtaagattattctctgaagcacatgtatagaggatttagaagaattcctttcggacctggttttgaatcttatttactttgtggaactgaaattttgggccaaacctctgacaagaattgaaaagtttaagtcttcaactatattcatgtttagaactgtttttatatttggttggtattgataattttcgttttgtcgtgaggtcccaggaggatgtgtgatttgagtaatggctgaaatttatcatttttta

SEQ ID NO: 29512 - DNA, 480 bp, Zea Mays
ggcacaaggctcgacttgtttacaatgttacaccgctgcaccaggctaattgcaatatctgcgttgcaatcagttctccaggaagatttcaaggccactgagatcgaagttggtgttgtgagaaaagatgaccgcgttttcagagctctcacgacagaggagatcgatcagcacctgacggcaattagtgaacgtgactgagatgtcatatgctgcacatttcagcgctgcacacactgcgccgtgccattgtgcttcggcagtcattaagtttcatagtcatcaaaggaactgagtgtaccatttcacgtttaagaccgaaaacaagccccctctcgatgtactcgtttcatatcgttctgtggttgattgaaattggcacggtttggttttgggttgctaaaatgctaactatatttgcatgtggccaatattttaaccgtttatatcagtgtttgttctgagtccataagatttaag

SEQ ID NO: 29513 - DNA, 1583 bp, Zea Mays
  misc_feature (1)..(2): n is a, c, g, or t
nntatgttctaccaaaggtaatgtactgatgcccttgaagaatggcaagactgcatcaggtccacttatcaagccgattcactttaagaacagtgcagcagaaaaggttatgtcaaatggcaaagtaaacctcacttcaaaaaacaatccagaggttaatggaactgctaaatcatcagaatcaaacagatgcaagactggacaatttgtgggacccagtaaaaataatgctgataatactatttcttgtggagagagaggccaacagtcagaaagaatacatgatgcaaatggaaatggccagtcaattcatcattcacagtattttggtgagatcagtaacggcaatgctatgcctacatctgctcaacaagagaccagtcatggcaatgccacgcccgcccgacaggagaccaataatagcaatggcacgcccgctcaacaggagaccagtaatggcaaggcctcacatgctgaacattattctgagcggtcatctcaccaagaagagcatgcaaacttctcaggaaacaaacgccgacttgaagaagataagtttcaggaaatcctctggtctggtaacaaatatgcacaagagctgcgccattccaataaggtgtgatgatcaagtggtgcaagctggatgcaatgtgttgtgatgcagtcctgcttcttttccttgcaagtatctggggctgcccatctctgataagaagttgaggaagtgtgatcttattttgtggattgagaagattgcagaaggctcaacccctcaatctggctggacggacaatattggcttgcagagttagctaattctgagcttcggatgtctgtatggacggatgatgtctacagctttatgcgctcgcaaaagaggcgtcgaattcaaagttctgacatttctcaagattttgatgcaatgagaaagcagctagtatcagatgctgcaagagtatgtaggtcaaaagttccggagtcgctgatggaaaatcttattaaacgcctgagatcatactttgaggacaaatatccaccaaaagcgtagtttttcatgcagcagttctttagaagctacttaggtgtcaattggatcttggtggtggtcaactccctaactcctcgcgcggcttaattttgaggacatttttgtattctttgctgagacagagacgaggtgttctaaattgcatgtacaaatatacttttcgttgttatccctgatgttataggtaccacaccaccatccccaccacttttctgtagaatgtagatccctttttatcctggcagattaaagcatgagtttatggtgtttttgacacgtatttttgccccgaccagacccagttttagtcaatgtttttcttttcattcttttttgtcctgattttggtttctgtctggccttgctcagcatggccttcttgtaaatatctttgctttcttcctatataatgatacgcagtgctcttgcgggatcgaaaaaaaatgttttgttatgggggttgattcaataacaacattttttagtttttggagcgtaatctccggaagcaaattgacttgacagtatatttatt

SEQ ID NO: 29514 - DNA, 1381 bp, Zea Mays
gggacatggtgcacacataaaacatcacagcacgcatcactatagctcagaagatccggtccattttccagctctaaaactaaggcatagcggtaaacaccaccgaagtctcagcttctccgaggaaggggagcaattgttgaagcagccacttcaccttggggccatacagaaatggcggcttcttgcgcctccacactccctccactttccttcgtttcctcctccagttcaccccgccgattcaggcgctctggtgtggtggccatggccagcgttgggcagaaggtgtatgcgcccggtgtggcggtgtcggagggcaatggcgggctgccgaaaatcgacctcaaatccccgcacgggagcgaggctgagatttatctgtttggagcgtgtgttacttctttcaaagtccctaatggcaaggacctgctctttgttcgaccagatgctgtgtttaatggacagaaacccatcagcggtggaattccacattgtttcccccagtttggcccaggtcccatgcagcagattcagaagtcacagaaggagatccagctgtaactttggaactgaaagatgacacttatagccgttctatgtgggatttcagcttccatgcactgtacaaggtttccctgcactctaaaagcttgtcaacaactctagcaataataaatacagatgacaagtctttctcattcaactcagccctccacacttatttcagtgcttccataactggcgtttctgtgaaaggtctaaaaggttgcaagactctcaataaggaccctgacccgaaaaatcctttggagggcaaagaagagagggaagaggtgacttttccaggattcgtcgactgcgtctaccttggtgcaccaagtgaactcatcctggacaatggattgggtgacaaaattgccattgcaaattcaaattggtcagatgcagtcttgtggaatcctcacttgcagatggaggcctgctacaaagattttgtctgtgtggaaaacgccaagattgaaatggtacaactggagccaaaacaatcttgggtggcagaacagaaaattgaactagtctgatgataatgtcttgcagcaactgcatcaagtagagtgagacgcaaatggcgctcccccagtgtcattcttcatggcacatgtcatcacaataactatacatgtgatgttttctgttaaaaagaataaatgatgcaaatcatgaatttttttctagcagtctgatgtgtactgaattgcaaatgtacaatttgaactgcatggatctgttgaaataaagggagtgcccatttgatctttgacatatctaatagcttttgcttatgctactgaaatatgtttctccagttcgctggcaa

SEQ ID NO: 29515 - DNA, 1990 bp, Zea Mays
cattggaaacataccctcctctccccgcggggacatgatactcctgcaaaaccctcgacctagacggtgcagcgccgccggcccgccgccgcggtctctgcctctgcctcgtcatggcgcggacgatgctgccgtctccttcgcctcacaccgccgtcaagagagaaatcgaggacgcagagcccaccgctcacacgccggcgtcactgcctcgcaagaagcgccgccgtggaggccgcctcccagtgactcccacccagcttcccctaagccctcccctcgtcacgccccagaccatcccatcggtggcatcaggggacgcgtccttcgccggcctaacgccgacgcccgtgttctctgccgtcaaggacgagtccggcgcggacaccggggtggggagcaacgggagggcgtccgggaaacggaatgactcgcaggacctccgctccgtcccgaggcccgcggcagcggagcctcccactctctggctcaaccgccggcgtctgggcctcatcctccacgagctcgcgggagcgcaccggtggcgcgacgcggccagcgtcgtctcgacgctccttagcggcaaccgaaagcccgactcctacgaggagacgcgcagaatgttcgtggtggccatggagattcataagcggcttgctgaggacagcagcgtgcagtacggtggcaggagcagctactacctcagaacgcagaagttgttcaatgtttggatgcgaaagctgatttggtttccttcttgcccaaaaaaaaacttggttacacttgaactggccctattttacctttcacaaggcaacatcgacaatgcacacatcgcaacaagaacccttatcgccaatggtaaactgcagacagaaccaatcttaaatctcgttcatggtttaatatcatttgataaatggtactctggcttgcctaaagatatgcaagttgaggattttgatgtttatgatgaatcatgcggtattccgatgaagtcaaatggttctgcaggaactgatcttctggttaattcagatgaggatagcatgaatattgatgagtccagtttggctacttgctcttcagaaagttctatcaataatgagaatatagacaaaaaaatgaataacaaacctggttttcttcaccctaaagaggaaatggatccacttgaatcacaaggaaatgaaaacttgcgaagcatatttttggatacctctgatggtcctacttgtggattggagcagagcttgctgcctttaaagctgaagttcgctactggggcttccaatgattgttttgataaatatatgaagtacaagtcagtgcctaataccttgtatgaagatgcagaaaaatgtctaagattggctctttattcaaatccgccagtgatggctgcattattgccactaatacagattctcctcctaggtgataaactgaaagttgcactaaatgagcttgagaaggcctgcctcagtttagctacagccctccctttcaggttgagaggtaggctgctggaagagtatgaccaaaaccaggtatcaaccattttctcttgctatgaggaggctttgagaagagatcctacatgtagctactccatggagaggctaatcaaaatgcataaaaaaggatattataacaccatccaactacttgaggcaatagctttacatttagattccgtcaatgggaaatcctgcatctgggaagagcttgtatcatgtttccttcggcttttttctgacaatactgctgactacgaggattgcatatcatgtactaatacccatgggggtgaatcattggaggcttccagtaaattttcttcagtcttttttgagcagtttaccagagaatcatggaaggcccgatgcagatggtgggcacgccatcatttcagccaaaatgcttatacatcagaagctcagtcagggttgctgttttcatgaaaaagatgggtatctgtttgcagaaa

SEQ ID NO: 29516 - DNA, 2742 bp, Zea Mays
cctgctggcctggaacaccgtcgtctactcgctcacgttcctgagtgctgcatctgccttgcgtagtacggggagaaggaggaggttcggcagctgccgtgcacacacgtgtttcatctcaagtgcatatacaggtggctcaggatcatctcctcttgccctctctgcaagcaagagctcaagtgaactttatattcattacacacatgacattctcgcttattctttggatcaaggtgttagtatcctagacacaacagatattttccagctaacaagggaaatcaaggaagaattgatctttatattagcaggcggatgcaatcactaatcaaaaccacgatgcaaggtaacctaaatggattttaaattttattttggattgttaaatctttatttctgactactattgttttatgtcgtggatgccctcgtgaggttctacgccgacgccttcaggagggattcacagaggccatggtgaggatggccagcttgagtcggctcaccgggagcagcgcgagatccgctacaactaaatgataggaggtttcgctgccatttgcagcgactgtgttccagttcgaccgtttggggaaaaggtgagtcctcccatttcatgtagatgcatgggttgataaacatttgggagaaatgtcccctctttaattcgaaaaatagttgtgtatttgttcgacttatctgcggcgatgtacctttgtacgcgtacaaacatctatagacaaaaacaaaatgacacttcatggatgtagcaagagcgggctacgagaaactagcagatcatgcctaaaattcaattagcattagggtcagacaaaatactacattttctggattacaataatgtataggtgcatgaaaaaaacttgattccaatgtgtgacaaagtgtgaagatgaaagtgcactttcacgctgtcataacgcggatttgttttccttgctcatggaatgtgcatttgtgtgtttgcgtctactgtgcggctacaggcaaggaaacaggatctgtcacggaaggtatgtacacattacagtaaacgttgttcgtagaacatgcactttgtggagtggtctttgaatgagatgcgtttagaattaccttttcatgcagatctcttgttcagaacctggttgcttagtccattcttgttttgggttgctactacaaaaaagcggcaatgctttatatgaatcgcctcttactaatatccagggtcaaatggtggtccttcagtgaccagactaatatttgagcattaatcttatttgtttcacagtcatttcttgtttatcaatatgaatgctatttttttgcgagtggacttgttaactaataagctcatagatatttgaacaaaaaatagtgttttgttctaaaactgtcataaagagtgcatacatcatagctatggtttcaactgtgatttgatgtcctataatattgagtgtcctatagtgtgttgttctgaaacagtcacaaagagggcctaagaagctgatggaatcctcattcaccgccgctaaggagtttgagcgggatcggagaggagacgcgattcccatttctcagtgatgtcgatgtcctgtactcctgtatatttggattcaacaatatgccattagtatgctgtcaagcgtcctatttgcaagagataaatggcttacgcccgaggggcttattcttccttatcatggtcggtcgtgactttggttatccactgaaaagatatgcttggtggtgctttcttgtgttgaagaacaagtatcccacggaaccacaaccgtttgtattatctggtgatttcctacattattagctggcctaactaaaccatgcgctcagaccctaaaccagctgtaagtctgtaacttaaaagcacagtgcactagcggaatggggttccttgctttttggagcgtttccccagtcagatcggcggcagggcaggtcacgtggacggggctccttgttgctggaactaaataccgtggagagtttgaagtgagactaaagaaacttatggaggaaattaagcaaaatgaagacattattctctttattgattaagtgcacacactgattggagcagtgcattggtgccacaacactggatgagtataggaagcatatagagaaagatcctgccttggaaagaaggtttcaaccagttaaggttccagagcctactatggatgaaacaatacagatcttaagaggacttcgtgagagatatgaacttcatcacaaactgagatacacagatgatgctttaattgctgctgcacagctgtcttatcagtatatcagcgatcgttttctgcctgacaaagccattgacttgattgatgaagctggatctcgtgttaggctgaggcatgcgcagctccctgatgaagccaaagagctggacaaagagctgcggcagataagcaagcagaaaaatgaggctgtacgtggccaagattttgagaaggtatactgttgtttggcacagcggtgacaaagccgatccgctcccacctctctagcaacgtcgatatggttaataccaagcattatgttgtttccttttgagataaatattttgttactgattttaccttttgtctcctcttcttgttttttgttctagaatctgtagcaaatggctaacgatgaggatatccattactttgtttatgacaataaaactgatatgttcaagattccgtagcaacgcac

SEQ ID NO: 29517 - DNA, 1307 bp, Zea Mays
cgccttgtccggccgccacacgacccggacctccactgacagtcacacacacaggtgagatgagacacgagggtgcatctgccaccgttccttccaaaaaccatggacgtttttttcatcagctcctcacacacggacacggcacaaatgtctaacacctaaaccaagcaatttacatagtacaaaacattcatcacaatggacgtggatcggtcgccggagaagggctcagaactcggcggtgttgccgagctcgcgctgccggcgcctgaacgacatgagcccgtccgacacgatgctcccgccgcagtcctcgcactcggcgctgctgccggtcaggtcgttgttatactcggtgccgccgtcgtcgttgtcgaggtcgccccgcatggcgcggagggtcttccgagccatctcgcgccggacgccgccgccctcgtcggccaccacgcgccggagcgcccggtccgcgccggccgcgcgcgccaggccgcggaaccggaggctgccacggctcatcgcgtacatcgccgacacgcaccactcctccaggcccgccgccgccgccgctgcgccgccgtcggagaggaggatggcggagacggacgccacggctcccgcgtccatgagcgcgttgcggccctcggcgcaggctgccacgttgcaggccaccatgagcgcaagcctccggacggggcccgggtcggcggcgcccgaggccacggcgagcagcgccttgggcgcgccggggaagcgcgcgaccttggactggttgacggcggcgagggtgaggtggtagagcgccatcccggcgtcgcggcgcgcgcggggcgggtgggcgcgggacgccagcaggtccaggagcggcggcaccgcgcccagcacgccaatggcggcgcggttgtcctcgtggatggcaagcccgaagagcgcccccgccgcgtgctcccgcgcctcgggcgccgacgcggccgaccgcagcacctcgacgagcgccggcaccgcccccgcgcgcacgatgcgcaccttgttgccgggctccagggacaggttgaccagggcgggggcgagcacggcgcgctggtggtgcggtggaacgggagcttccagcgccgcggacgcgccgcacccatggagcggcgaactgccgcgaggggggggtggggggtatacgctggtagtctctggtagattagctagcttggggaaggcggtggagggacgatgtgtgcttttgctacagcctcgggcatgtttttctggttgtgtgtccgctgcttttggggcttgggggtgctacttcgttc

SEQ ID NO: 29518 - DNA, 597 bp, Zea Mays
cagcggttccctcaagtgtgcgagcggtggttgcgccccaaagagggcgattggtggcggcgctcccaaggcgggcggggaagcggcagcggcactccccctggaccgagcgatggcgacgctcctggagcgggcgaggcaagtggtgatggggctcccaaagcggacgagcgacgccagcgcaccctaggcccggtggtgatggcagttgtgtgaggcgcggtaggctttggcagtggcggccatgggagaagtgagtggctccgacgatcgtgcgtggagcggtcgtctctggtgatggtggccacgcgaggagtgggtggctccggtgtccttcgatgaccaactcctccaatccgatggcctcggcggcgtcctgcggcgatgacctcctccaatcctttgtttatgcatgtgactgttggttgagtcgatactaactttttcataaattacgatgtatggtgtaggtatttatgtaacattctgtaacgatttatgctttgcgccatattagtcatccaacttttgcatgtatgatgtggaaatgaaaatgcattcaaaatttgtgcacgtgtaatgaaaactcccacgaac

SEQ ID NO: 29519 - DNA, 1169 bp, Zea Mays
ccagttctgtgccaagatccagcaaccagagttctccaaagcgcgaagctccagctccatctccaggcagccgtcaccgtcaccgtcagggaacgcgcgcagcaatggccttctactacggcgtgggcggacagtcgtcggcgtgggcggcgccgggcggcagcaggccatggaccaaggcggaggacaaggtgttcgagggcgcgctggtgatgttcccggagcacctgccgaaccggtgggcgctggtggcgtcccggctgtacgaccgcacgccgcaggaggcctgggaccactaccaggcgctggtgaccgacgtcgacctcatcgagcgcggcatggtggaggccccggactcctgggacgacgacgcggctgccgccggagggggacgctcgggccgcggccgcgggggcggcagcggcagcggagaggagcgccgccgcggggtgccgtggaccgaggacgagcacaggtacgcgccgcgcgccttcgaacactcttctgtcttgagtgacgtatagcagtacatactcctgcttttgtccttttccccaccctgtcattccacctacgtgccttctcttctctgaggtcgtcctagatccttccgagtacctttccacgccggacgcactcctctggcccaccggacctttatctctctctccctctcttcgctgctctgctggtatggtaggtaaactgattccgtgttctcctcacaacgacgcaggctgtttctggaggggcttgagaagtacgggcgcggcgactggcggaacatctcgcgctggtcggtgaagacgcggacgcccacgcaggtggccagccacgcgcagaagtacttcatccgccaggccagcgccgccagccgcggcgacagcaagcgcaagagcatccacgacatcaccaccccgtgatgcctcctgctcgtggaggacaaagctagcaccgagatccagccctgcctactgctgctacctgcattttatctttacctttgcgagacgggatcaaaaaacaaacagccgtccctgtggttgtagaaatgtaggcaaagctaagctagcctggctggtatctggggtctggtataactgtattaagcgacactacaatgaatattgaataaataagttttgcaagtttaaaaaaaaaatatcaaa

SEQ ID NO: 29520 - DNA, 2297 bp, Zea Mays
ttgagcttctaccggctccaattccacccctcgccgccatctccgtctctctctctcccgcaaccaagcagttcaactcacacccgaagcggcgccgctagggtttgctccgacagccgcgaaacctagtccttactgcgccctcccacagaggccgtcattcactaatctacctgctacgcttcgcttcccgctccgattgggagctagggtttagcttatctccgagctcagcttcgggtcgcggcacgcggcatggcggggtacggggaagagaaccagaacgccatgaacgggtacgaggaggaagaggaggaagaagaagttgaagaagtcgaggaggtgtacgaagaggaggaggagggggacggggagggggaaggagacgagggggcagccgccgaggcagcagcgatggcggccgagacgagaagtgtcgatggaggccggggcctagcggaggccgttgggaatgttgatgccggaggcgaggatgagagggatgcagattctagcggcggtgacgcttcggggaaggttttcgtagggggtgtagcctgggagacaactgaaggacaagcatactaggatgcctcgtggatttggatttgttacattttccgatccgtctgtgcttgacagggttctagaggatgaacatgtcatagatggaaggacggttgaagtcaaaaggactgttccaaaagagctgtcgtcgaaagatggccctaagacaaaaaagatctttgtgggtggtatcccaccatctcttactgaagataaattaaaggagcacttctcatcgtacgggaaggtggttgagcatcagattatgcttgatcatagcactggacgttcacggggctttggatttgtcacatttgaaagcgaggatgctgttgaaagggttatgtcagaggggagaatgcatgatcttggagggaagcagaaatcagcattcaatagttgaagcacatccagtgtacgcctgctgatggggcggggctgaatggggttttttgggggcgggttctagtatggtttacgtcgattgggggcaccatatcctcaaggctgctgacttacgcaggcgacatgcttcgacatgttcaccatgctgccacagggtgatggctgggcacgtagaccagaagctccccacagtggtaactggtaaacgtccgtggcggagatgagttcactggggatgggtatggggtggtgcttggcgtcaggccaggccatggaagtggaggccacacacgggaacaggaaagcgtcggcagagaggcgctgaggagaaacggtggtgctcgcggaggagaggaagaggtctgggcgtgcggccagcactgccatcacccgacacgtgacagagcatgcgccatgtctctaggtccacggcgagcccttggaggaccaatgttgctgaggttgaaattaagaaagctgaaccaaagaaacctggcgctggtgattcaagctcaaacggaagacacagccgtggtggtggtcatcgtgattcataccgtggtagtggtgtttctgtgaacagcggtggcggctatggatatggtggtggttaccgatcagctgctgcagcatattatggcagcacagcatatggtgcctatggcagagggtatggatatggtgctacttctggctatggctcaggttatggctctgcatatggtggctccatgtatggaggtccatatggtgcctacgggtcatatggtggtgcctatggaggtggtgcgtatggtgctccaggagggtatggtgggggaggatatggcagctacggtggtgctggaggcatgggtgggggtggcagcgctggtggtcggggctccagcagataccacccttatgggaaatgatcatccattctgtgtttctctaggatctgataataaagccatacctttcctcgtttctgctactgagaaaatggaacattccattcgtcttgttgaatcagcggcatctggacatttttttccttggaacttgcattgcacatcaacgattctatagtctatagtcgctgaaccctgaaccgcccccaccccgagctttctgtagaagctgcagctgaaattctcgtagtctggcatgagccttagaatgcccttgaaactattatctttgtggtagtaacattatggtgtaatggaacagatgtacgttgttgtaacattcactcactgatcagagacttgctatctctacatatgtggagagaagctttgcaaatgattgactgatactattaaattgtgtgggttgct

SEQ ID NO: 29521 - DNA, 880 bp, Zea Mays
aaagaatgagccctagcaaacggacgtaaacagaggataagctgtagagagcgtcggcttctgttcgctcaccaactcgcagaatcgcgcgggtcgcaactcgctacatcccgcgggtgccgacgccgccgctcgcgttaggccactccgccgttcgcgacctgtcacttcctgtccgtccccctgccgcacgccaccggagctcactcaccgattagtccccacctcagaccctctccgcgcgcgcccagtccggcggccgccctgcccaacgctagggtttaggtggcggctgcagggtcacgccggcgccctccgccctccaccggccgccgacagaaggggtgacgtaggtcacctcgcttttccttggcgagccgtctgtctgttggtgtcggcccgacaaacgccgaggagggagacagcgagatgccgcaccgagcgcgcccgatgacggggctgctggtgttcatgggcgtcaacctcgcgctcttcaacaccatcagccccgtctacgacttcgtctgcttccacccctactgggaacgaaggagtcggcatcggagatgatgtctttgattttatcggcgtcatacaacccttgctccttcaaggcgtgctcaagctcttctttagtaatgtacctgtgagataaacgaattatatatgtgtcctgttatgatatgtgtcgtccagaattcaggtaccagctgtatcattttaacgttcaacttacccgctgttgtccttgtcgaaatactggaatgctgtgtaaaggtgctcttctctatccagtttgttcatatgcactgttgcggtgacgaattcgtcgtagtcaattaacccgttgccgtcagcgtcagcctggaaatgtataaag

SEQ ID NO: 29522 - DNA, 492 bp, Zea Mays
cttaggttcttggacatgtatgttatcacatcatagcagctggtttgaacggctacatggcaattgtgaccaaccttaacagtccggttggtactacgtctctagaaccctcaggctgctgtgggaggatttcatcacagttgacggttttgtcatgctacctcaggtcatgtggttaacgtttgttcccttcatccacaatagcttactgcatggcataatttctggttctttggatgttgctgatgttgcgatggtttcaaagcagccaacgtattaggagagacattgttctaagtaaatcatgtgaacaataatgaagtttggttccgtaataggatgttttcttattttaagtgcctcgtgtttggttggatttagttatacacacaattatacgtaggatgcactttcagtatgtttgtttggtttgcgcacattgtaagtagctttggttgcttgtaagagaacttgatttcttgccctttaaaa

SEQ ID NO: 29523 - DNA, 1332 bp, Zea Mays
cctttgcccacgacgagcacctgccacaccaagaatcccattaagtttactgctgctaccatttaaagggcagaactgccggtcttcaagctctttgttactcctgatcatctgtggcacaattgtcatcgggcaaaatgccatcagtttatctctacatccctaacattatcgggtattttaggatcatcataaatttcattgcatttgcggtttgctattccaacaaggctctctttgctgtcttgtacttcttcagctttgtccttgatggtgtggatggttggtttgcacggaagtttaatcaagcatcaacatttggagcagtgttggacatggttacagataggtactccttgaatgaatctttaaaatctgcaggttttacagacctggtttagtcttcttgatattgctcgggttggatattacgagccactggtttcagatgtacagttctttcttgtcaggtaagactagccacaaggatgtaaaacacacaggcaattggcttctgaaattatattatgggtacaggccattcatggccttctgctgtgtttcttgtgaggttttgtatattatcctctttctctttgctgatgagaagtcaacaagcttgcttagtgcatgcaaaggtctcctgaaccaaagccccatcattatcttggtgtttatttccacattagttggctgggcagtgaaacaagtcaccaatgtcatccagatgaaaacggctgcggatgcatgtgttgtgtacgacctgaagcgcagcaaatgaaaagcatgaagggaaaactctacggtttaactcagtcctgtgtggacgtatccaaagggaaaaactctccgaggggatacgtcttacgttccttgacatctttctgatgatgccttacgtggggccagaggatgacatgccgtgggaagagcagcatgtcataaagagaaccaacgcaaacaattgttttgtgaaggcggctattgatttgttgtcaagagtgttttattatgtcatacaaatgatgaattgatgatggtacctttgttacctgggctagccctttgtgtcaacatgaaagatgcttacgagccacatgttcccttctgaaatgaaggttttgagttgcaaaaatttacatattcccttctgaaagccagcaactgcacctcgagagggtttaatggttacttttaccccccaaaataggcactagctattattcggatgatttcccttttgctccttattaaacatcctttggttcagttttattgatagttttaatttttttacatgatctcccttagttcaaaaaaataaaattaaaa

SEQ ID NO: 29524 - DNA, 971 bp, Zea Mays
cccgagcgtgaaataatcaccaagtgtgctagtatcaagtatcacacatacaatgataaatggtacagaaacaaatgtcacatctttactacataatagaagttttgtacaaaatagttaaacaattacatcatacgaagacaaagatcgagcaaccaaagttgactaggagacgacagcctagacctctcaccatctcatcgcagcatcctccatgcgcctcatcctgtggtacctgtttttgacctggaggatgtgagtacaacaagggtgggctcacatacgttcatcactcaacaagttgtggggaataatgtgcatgaactcaccaaaggtgggagtccatgtgaagtgtaagacttatcaaaggggatggttaaagctgaacattgcttttaaagttggtcaaaattttattagcagttactaggtataagtagataccaacccaattaaataagagatcaagattaataacaacacccacaatgcaatgtaaataacaaattgagtttaattccataagttaatcatgtgagcgtccgagccgctcatgaccgtgagcatggcaaatataccattttacattctgtagaggttgcacatctttacccacaagtcatgttacccatttgccacagagttgtacggaccccatacacatctaccaaggaagcgaggcagggtagcactacgaggcctttccaaagttccactagttcgagaaaacctgctacggatttaggaagaaggaagcatagaaatccctcatctaaaaacctttacagacagttcgacccgaggacctccctatactctgtagcgacgcctccccgcttgcccctaaccaggtaaggtaatctctccctagctttcctaattacttggtcaagggcgtcccattccacccttgtggtagcactgttgtcccgggtgattctccatgttctaattaacaatatgatattatc

SEQ ID NO: 29525 - DNA, 3090 bp, Zea Mays
acaacttagggattatatagaccttgtgtttttggtggctatgatgctcaactttgtaacctaccaatcaggtttgcccgcgcgccccgacgatggcggaggacgcaccgcctgcagctcctgcgatgacgccggaggaagtgcaggctgagaccgagttgcggatgcgcgacataggccagcgctttggcgctatcccggaggaccacgacgagctgctccgtttactcgaggaagccgaaacctggctgtccagggtggatcaatctccgcccgagggcatgtacaatgctcttcgccccaccatggctgttttgattacaaatgagctactggagcaccctgatcccaacgtgaaggttgctctcacctcttgcttaactgaagttaccaggattactgcgccagaggccccctatgacgatgatgttatgaaggatgtgtttaagagaattgtggagacttttgctgagttggatgacatgaacaacccctcctttgcaaggagggtttcaatccttgattctgttgcaagggttcgttgttgtgttctgatgttggatcttgacttggaccatatgatactggacatgttccgtcatttcttcaaaactgcctccaccaggcattcagaacaagtcacccactgtatggaaattataatgatgtttgtaattcaggagagcgatgatgtccatgctgaactggcatcgtgcctgcttcagaaccttacaagagaagcacaagaaactctcccagcatcttttggacttgcagagagggtactaggcctatgtagggacaagctcaaaccagtgcttcatgagttacttaagggaactcctttggatgaatacagcaacgttgttacgacgttgttccaagatgctggagaaaacaatgttgatgcatcaggagaagacatggcagccaaagggaaactttctgaaaagcctgtttctgacgagtcaccacaggaaacttcaaaggtagaccaaaatgtcaattgcctaggccaagaaggtagtagtccaaacagtactccgacaaccgccattagcaatggtgctgctccagttgacaatgtcaaatctccagatggaccagattcttcaaaacagaagcaagaactgacttctggtgacgagcagacaccagattcttctaaacagaagcaagaactgacttctggtgatgagcagacaccagattcttctaaacagaagccagaactgacttctcttgacaagcagaccaaaagttctgagcaattgatatcttgtgaccaagaagtacgagaaccagtgactgttgaaactgaaaagctatctgatgtcaattcaaagaaagatcacaagctttgttcttccattggatctgagatggctgaacaatcaaaggttgttaaagacaatgagagtatagtagcatctgaggagttatccccagggacaaatgatgttgataaaaagcagataacagagaccggcaatataactactgaggaatcatcaaaaccaagtgatactaagcctgctgtggttaagccaaagagaggccgacctccagcagcaaagtctcaggagaaaaagcctgctggaaagaaacatgcatcagacctaaaatctgcaaaacttgatcctatcactgattctggagggagagctacacggcacctgaataaagatgctgcgaagtcttcatcaaccaaggctgctgaaggagaatctgagaagaagcaacataaaaccagtatgaaattgcagaaagaagatgctgtctctgataaagacaccaatgaggatattagtttgaaggaaatgatgtccccaacaaaaatcgataaatcaaaaggccaacaagaggataatggggcatcatcaaaaagaaaaagtttgcaggaagctcaagagacccctctatcaaagaaaaataaaatacttgatgaaaaccttattggctcaagaatcaaagtttggtggccagatgacaaaatgttctatgcgggtgttgttgaatcattcgatgcctcttcaaagaagcacaaggtttcgtatgatgatggtgatgttgaggtactaatgcttaagaaggaaagatgggagttcatttctgaggaacaagacactgatcctgatgcggtatctaatatgccacgtggcagaaaagctaaggggagctcgggtccacaaatgaaaggagggaaaacaggaacacctcaaagtgatgttaagaatcctcccaagaagagagggcgtccaaaaggcatgcacgacagcaataatatgccaaatgctgatagctctgtgactccagccagactgaagggaaaaagtgttgagaaggatactcaagtgacacctaagactggcaataactccaagaaggaaggtgcaaggcactctcgatctactactggaaaagctcagaatgctgttgtcaaggcaagcagcaaggatgaacctgatagcaccgacaactcaaaagatgatgctggtagtgaagacaagaattcaaaagatgaagtgaaatccagcgaaggtaacgatggatccaagaccaatggtctttcaaccaaaaggaagctagaggagaatgaaggtgagtcatcagaggagaagggttctgctaaaactactaccagaaagaagcgcagaagaaagagccgcaactagttgctcagaagctatgcagctcatcatcttaggggcgttccgcccttgcagtctaaagtctcaagttgctggcatgggacatgccatgtatgctttatattgcctggaccgttttaccagcttagcgctttggcaatttgggcatcatgagtcggctcgtagttgtagcagtcttaaactctcaataggagctataatgtttggtcttacttttctttttagaatctcgttgccaacggttgtgcctctggcaaaaatggatttgatgcttttgctctgcttaaagcttttgtgccaaatcgtaatgcatttcgacttatcttctggcaaacaaaagtatgctcctgttatgaagcgaatgtttcagaagaaaagtagtctgagtttgtacttcctctgtttctttgtacttctt

SEQ ID NO: 29526 - DNA, 1741 bp, Zea Mays
ctgctgcaggttgttggcccctgctgtcgcggccgtgacatgggatgggaggaagcttcccttcggtgaggtaatcaaggagattgggttcgttgcttccccagcacagtggtgttttctgcggttggtgtgggatccatggagatttcctgcctctggaaatgaaatacacatgtgtagaatcaaacaacagtagatttttatgaaatttaggattgttcatggagctgaatatggatacatgcaggtggcctttttatagaggaaggaatgagtattaattaagttctaattagttgcgagtagtgttttgtcctatagaactagggagttttgcttcatggtaggtgttcctaggctgcaaattttgtctgatcttgcattgagaatatgatgggtgaagtctgtgacacgtcgcgtcgcgccgtcggtcgaagccagctcaatagtgaggttgaggcctcacaactttctgcaaaactacatgtcaagtgctccaccttgtcagaattttaaagaaacattttgttgtttcaccttgacttcttattgacatggcctattggagagagatctctgtgtgtttctggtttctaattggacatgtaaaagtttatgattagttgttgcataaatggattggctagaattttcaaagtataggtgcttggtgtcttctcatggtcatagggaaaatatcatagctgatattttcacacaagtgaaggatccacaaaagggatttgttccctatggaatgatcagggaactactcgtgccattctataaggcaaatgggagccgcaaaccaaataggaaaattttctatggagacatgccagtgaggagcagtttagccggttcttgcattatgaagtggatgcaattagaaaggcgtgtgccagcttggaagagggctaccttcctctagttacattcatagtggtgcaaaagcgccatcacacactgttttgtcctgaagatcatcgttcacacagacaaccagatcgacgtggaaatattttgcaagtaactgtggttgacacaaagatatgtcatccaagtgaatttgatttctacctttgtagccactctggcattcaggatgaactagatgcaaaacctgaagagctggaaggagaagagttggaatctaagcttctagagcctgttgcagctctttcggtgcatccagtgcatgtcccaggaaacaagcaactagcttgccctacttcacagaaagttatagctaaatacgatgagctggctgcactacaagctgaaatggcattgtgatcaggttaatgttcgctctatttgtacatcttaatgtgtatttgatgttcctttcatgggattaatttgctggtatctatttcaatatttgattcataacttctgtgtgctccccttaaaaggttgttgtctattaagaagtggaatacacgataatatgcaaccacaaattgtttatcgtgcggtatccaaaaagtttacatgtatacatctcttcagcattttagtttccatttagtatcttctactctctatttgaaagaagtgaagttcttccactccccaaacttataaatcatgttttactgttgtgaattgttttgcttagatgtagacaattttgttttttataggaacatagtttttcaaattgcaccccaaaatatgatagcttatatattttggttatgattaggagtgttgggctgctggctgcccgcttttt

SEQ ID NO: 29527 - DNA, 891 bp, Zea Mays
tcttaaggccaactttcttgtgtttgtcgaaacttaggctgtgcttgggagagttgagctcacatggagcaggacaaaagaaccaaggtgctgtgcctgcatggcttccgtacaagcggcgcttttctgaagaagcagatcagcaaatggcacccttccatacttcagcagtttgagatggtcttccctgatggcgtcttcccagctggtggaaagtcggagatagagggcatatttccaccgccgtacttcgagtggtaccagttcaatatgggcgcaacacttttggcccttttggtaggctaccaagcacagggcaaggtgctgagtgatcatccgccaattaagttcgtggtctcaatatctgggtgcaagttcaaggacccaagcatctgtgatgtcacttacaaagacccgatcaaggtgaaatcagtgcactttattggagagaaggactggctcaaggtaccttcggaggagctggcttctgcctttgatgagcctctcatcataaggcatcctcatggccacactgtccctaggcttgacgatgtgtctgtgaaacagctttctgaatggagctcgtgcatcctggaagaccttgagactgcaatcgttcctgaggccttagattcgggcaacccatctgataaggaagctattagtgcagaattcgcagaaaacctggtgactgcttgaggcttgtccactttcgtggcatggttggtttggttgcatttgaaacttgtaccgtttctactgagtagtgcgtggaacttgtttgatcgcatgtgtatttgcattggcaaaacaataaagcgctatcttctgaatcaaatggattcagacatcaagtacaaagtattgttggatgcaacattgactgggatt

SEQ ID NO: 29528 - DNA, 5270 bp, Zea Mays
cctcgcttcagtcctcaccttctgcatttctcgcaacccacgccgcgtcacttccccttcgtagtccagtggaagtggaaccgccaaaatgtcgtcgtcggcggcggagacgccgcgggagcacgtggagagtatccggcggaagcgctactacatcggccgcggcgagcaaaacccgctggcggaggacttgcaccaggccacgaactacctctcgcaggagctctactccaaggacgtgcacttcctcatggagctcgtgcagaatgctgaagataacgaatacccttctgaagtagcaccttctttggagtttctgattacatcaaaggatattactggatgtggtgcatcctcaactttgctcattttcaataatgagaggggattctctgcaaccaatatcgagtcaatttgtagagtcggaaaatcaacaaagaagggaaacaggcatcggggttacatcggagagaaaggtattgggttcaaaagtgtgttcttgatatcaagccagccccacatattcagcaatggctatcagatcaagttcaatgagaaaccctgtgcagaatgcaatattgggtacattgtacctgaatgggtggaatccacacctagcctttctgacatcgaaacattgtacgggtgctcgaaagtcctgcctacaaccaccatcatcttaccattgaagagcgagaagattgatgcggtgaagacgcagctgtcaagcatgcatcctgaaatgctattgttcctgacaaagatcacgaaactttctgtccgggagaactctgatctcaaccatacaactgttagtgagatctcgataactagtgagaagaactaccaagccaggaagaacatgcatgcggagtcgtacacactccacttatctgctgaagagaccgggaaagaagaagcagaatgcggttactatatgtggaggcagaaattcccagtcaagccagagaacagagtcgataagcgtgctgaaattgacgaatgggtgataactctggccttcccacatggccagcgtctgactcgtgggaagcagctattacctagcatctatgctttcctcccaactgagatggtaacaagcttcccgttcatcattcaggctgacttcctccttgcttcgtcaagggaggctatactgtttgacagtccgtggaacaaggggattctagagtgtgtcccaaaggctttcatggatgcttttgtgacacttgtaaagtctgatgcaccatcaatgtctcggccatctatgttcaactttctacctgtcgactcctcacagatcccactgcttgaaccagttaggtctggcatcaaagacaaggtccttgcagaggatatagttccgtgtgaatcttacgcttcacagaagatattctgcaagcccagtgaagttgcacggctcaagccaacattttggactatccttgccaaagcatgggggctaggagtggatctgaagaatctgtcaacccatggaacttatattcttagctcacattttgacaaaagtatctatgacagtgtgctaaactttctggatgtgaaaaatgtgaaccatgaatggtatgcaaaatgcattgaaggctcaaatcttgtcaaggaggtagatgaacaactttacctggaaattttatattttgttgcagtcaattggcaaaacttttctggtacaaacatgatgtccattcccctgctgaagtatgttgataggggtggtgttctctcgttctggagcatatccagagctagtcagtgtaatgataggttgtgcattgcgtctgaaaacaagtacatatcatggctaatcagctggaatagggagttcctatcttctaaccggttctttctgcctcctagcacacaaacagctctagaaggttgctcggagaagatgaagagctggcttcagaaacatgcaagagttgaggttgtctctatttatagttatggatcagttgttgttaattccttgggttctgatcaaagagctgtcattgccttcgcacactttctttatcactctttcaagaaggatcacatcggggactactacttgtcagaactctgcagcagcatgccagtaattgatagctatggctatgttgtcaaggaaagaaatagcattatagttcctgccaagggaagcaaatgggttggtttgatgggaacaaacccatggagggatcacggctacattgagttgtcagcagaatacaagtcagcaggacattttgctggaaactatacttctgaagaccagctattggaattcctcaagacaaatttgcaggcttcggatgtgccattcatactcccaccagatgccagattctctactgtgtcatcatctctaactgtggacaatgtattcttgctgctggaatggataaagaatttgaggtcacgtggtgtaagattaccagacctgttcttgacttgtgtcaaggaagggaattggctcaagacgtcggctgggtacaagtcgcctaatatatcatttctgtccagctccaattgggggagtcttctgcaaacagcaccttcctgtgttgatataccaatggttgatcaagagtactaccaaaacaggctacatatgtacaaagaggaactcaaggcaattggtgtgagatttgaattccaggaagcttcagcttatatcggaactcgtctcatgtctattgctgctggcaattcgctgacaagagagaatgtgtacacactgcttcggcttattcggtttctacgagagaagtttctatctccgagtgatctgatcgaaagtgtaaaagagggacgatggatgaagagtactcttggctacaggcgtcctgctgattgtatcatctacgattcagattgggaagtggcatcatgtatcagtaaccaaccattccttgatgtatcattctacggtgcagccatcctcgaatataaagtcgagctggaattacttggtgtcattgtggggttcaaagacaattaccaacttgttattgacaacttcaagtttagttcttgtgatattacctctcaagctactgttttaatcctcaagtgcttccagttgagctgttcaattctatgcgtactgaaaagtggctgtacacttcactgggattccgatctccatcagatgcaattctatttgatgatgcatgggtatctttgtctccaatagcaaatttaccattcatagatgatggtgactcttgccatggtttaggaatggagatacatggctacaaagatgaactgaagaagttgggtgttactgttgatttaaaagaaggtgctagattcgtcatcacaggcatcagcattcccaatgacccttccaagttgtccaaagctacaatcttgtcactgcttggttgcatcaagagctacttcacctttgcagctggacctcttaagggcttcaaggaaaatatgtgcaagaagaagttgttgaagacatccatgggatatcagtgtcctaatgattgtatcctctttgatccaaagcagtcttctgtctgcatggaagatggccctttcatagatgaatcattctatggttcagagatagcctcattcaaagatgctcttacaagaatcggagtaaccgtggatatcaaacttggaaaagatcttgttgctcggcatctgaggagccacaataaaacagttaccatttcccggatctacttatacctgatgacgagcaaatgggtgcctgcaagtaaaaatagcaattggatttggataccaaacgaaatggatggtggagaatgggtggcctcaggaagctgtgttcttcatgaccggaacaatctttttggcctgcagtttcatgtcctggacaaatattatgacaaaaagctgcatgacttctttttgtacactcttgacgtgagggacggacctggttctgaagattactgcaagctatgggccagatgggagaaatccgtcaaggagatagctgtgtctgattgctctgctttttggaaattcatcgcgacaaactggagccaaaacacccagaaacttctttctggctgtgccaaagttcctgtatgtactgacggaaagatcattttgacaaagaaggaggacgtgttcattcctgacgatctactactcacggacctgttcagcaagctaacccagcattcatttttcatctggtatcctgcttctatcctcccttccatgtctcgagctagacttaaccacatctatgacaccatcggtgtccaaagaatctccaaagcagccaccaggaacgattccttcaccatcgacggacgtcatttcagaacgattgatccaagtaaggtggtcaaggctggtctgctccaaatagtgctctcattcctcgctgaccccgctctcgacattgctgccgaagagaggcaccggatggtttcctgccttctgaatgtgactgtccaagagagtgacgagccaatcacactggggtatagtgtaaggctgtcatccggagaggttgtggatgtgaagtccagccgaatggtcaggtgggagagggaggattctaagctgtacgtgcagagtggcgacggcgagcccagctacaaagagaagatcgagttcgcgacatacttcgcagaggagatctctcagggcctgctctttgagatggaggaccagatcccttccctcgctgagcttatcaagttcggcagcttgctggatttccaggacgccgctgttgggttcttgctcaagtcaaagaacctgcagatgtttcctgaagatgagcatttcctgaagtcttcaatgctagatggcaacaacaaccgttagttttctgtcgattatgcgctttgggtaacgttcatggtcagcaaatgtttctgctttcttatgttgctggttggctacataaaaatatggtgctgcgcttggaagtggaagcttctgaatgtgactgttctctagcgttcatcttgtgttcgtctatcgctcgttttaagtttggatttctgtgtgctagaatgcaacttgtcagtgcttccagtgcatgtattaagcgcaaaaactcaactgtgataaataatgccgtttgcaatgcattgtgtctgatctattttgtttttttttatggtcctatctgatgagtttgtgtttgacatgaacactgcacagattatagctgcagcagtgttggtggcatgtttactttgagatggcttagcttggttgctgttgtttcagcgcgattcgcgatcttaatc

SEQ ID NO: 29529 - DNA, 1306 bp, Zea Mays
gcgagtgcgacacgtaaacgaaagaagaagaagaagatggggacgtgagcgtgctgtggcagggcccacaggccacacagactgggtttgcgtgcaactcacgcagcggcccacgaagcgctgtcgcacgcgatccccgaacagccgtgcacgcgccgtacccgggaggcagcaggtgcccactggccactaacccgaggcgccagttcacgcgggccacaggacgcccgcgcagtgacgatccggacgcgaacctcgtatcaaattcgcttatgggcagccgtcctataagaggcgtcgagtccgccggcgcatggcaaccccaccacaacccagcgccggcagtcgccgtcatcgatcgatcgccggaaaactaacccctaacgatgtctggagccggcgaggaggacaagaagcccgcggagggcggcgcccacatcaaccttaaggtcaagggacaggtcagcacgccagcggtttctctcttcctcattttcttctttcttgtcatctcgccggtggtcccccttcctcaccatcttccccgtagcgaggtagattagcgctgttaaacccgcacctcctagcgatcgatcgtcgttgcgaggtggattctcggattgctagggtgctggctaattgggattggatggcaatgaggtgttctttcgcataaagaggtccacccagctgaagaagctgatgaacgcttattgtgaccgccagtctgtggacatgaatgccattgcgttcctgtttgatggccgcaggcttcgcggcgagcagacccctgatgagctggagatggaggacggcgacgagatcgacgccatgcttcaccagaccggaggcagcgttcctagcaccacctaaaagcctcgttttgctctccgtcctgcgtagtactaaacaaaagggaaaaagtctttttaaggaacttgtgatgctctggctccttgtgccattgctgagggacatccttagcctttgtttagtagtatggtttggtactttgttctgtcatcactcgtttatctatccctaatacatgccgccatgattgtactcccaatgacgcgcagatcatttgctttgttttgtctgctcgaacctcgaagtcgtctatgcttttcagattattttgggcatgtttggttgtctcctgaatcctgatccatacgttgtcagccgcaccatagtcacattgtgctgctcctgcaattgaggaacgatgataatggagggaaaatgttttagtaagaaattgccggtgattaattatgttgatggatcttgttcagtttgt

SEQ ID NO: 29530 - DNA, 219 bp, Zea Mays
atataggacgctcacatatcccacccacggtacaggtggctccgcgggcggcgcccccaggttcatcgatgaattcccgacgagtcccgccattccccaccccgaaaggtcacgcaaatacgcggtgtatgtcggtgaagctctctgccctcccaatttggcctgaccggcgaggcagctgaaaggcaccgacaatgccccaatctctttctcagccaa

SEQ ID NO: 29531 - DNA, 947 bp, Zea Mays
aagcaacatcgttacatgtatatatacactagtacgtcttgcgttagaacagccgagatttgccttctttctgcagccagcagcagggacgctgaacatgggctgagagatgcgtgggagcaggtgaaggagatgagagccagggaggaggagaccaggcagagagctgccttcctccagcacggcttcgcgtcggcgtggaaggagggaatccacaccgacatcgtcgtcaaacctggcaccggtcccgcgattccagcccacaaggccatcctggccgcgcggtcggaggtgttccggcacatgctgtccggcgacgaccgctgcaaggcccccgccggcggctccatctcgctcccggagctctcccacgacgacctgtccctcctgctcgccttcctctacacaggcgctctggaggcgccaggagaaggaggaggagaggccagccaggaccaggagcggcagctgcacgcgctcctcgtcgcggccgacaagtacgatgtgccgttcctgaggcgggtctgcgaggcgcggctggcggcgggcgtggcgccccggaacgcgctgcggacgcttgaggtcgccgagctgagctccagcgccgcgctcatggagcgcgccatgggcgccgtcgtggagcacgccgaggaggtcgtgttctcggcggaatacgagcggttcgccgcacggaacgcggggctgtgcgtcgagatcacccgcgcgctgctggccaggatgccgacgccggcgaggagtgatggcccgtgcttagagcttggaagcagctagctgatgcatgcagttgtattgtatcagatgatgatggatcggaaagaatactactcttgttccagtttcgagtcacgacaatatgtaattgtaaacgcataagttcttctgaaacacgggcgagcacgatgagcaagactgcaagaacaacacag

SEQ ID NO: 29532 - DNA, 795 bp, Zea Mays
gcgtccacttcgctcccctaggtcgcgagcgagcgacggccgactgcgcgagaccgcgagtgaccgccggtcgagccccgaggccggagcggctcccccgcaggcctgccctcgtctggtcgccgcctcgccgcgcagcaaccccgcgacccgctgcccggccggcccgcgttactgtgcagccgtgtccattactgcatttgtagacagcgcagctactggctgacccgactcccttctctcccaattctcagcgggcgatgcaggcgaagaagctgaccctgctgcagacggtggcagctgcgggagtcttctctgccgtctccttttgatctcccgtgccatgcctcttgtgctgcaggtatggcttcatgttcggaagggagtccgcgcggcgcgagcttggtggcatcatagacgacctccgcagcaacaagcccaccaatacccctgccggtcccgatgctcattcgaagccatagtggggtccaggtctgcagtgcgaaggataagatcgtgtggggatcataaacgatgtggttagctgttagaagtgttcagcgaggacaaagatcgttagaggaaggtcgaagaacctggcctatgtttttgtaggtttatgtcttagggaggccgcacttttgaatttgaagaaacgagagacgatatcattgttcgtatttcgtatggcgcgcaggcgcggctaccagtcttcgagcatagcgttgctgttgatgcatcgtactcttgatctgtgattagtttgttccatgacgttactgcttaggaatttgc

SEQ ID NO: 29533 - DNA, 854 bp, Zea Mays
ataaattatcataataataattatctatattaactgactatacaagagtgtcgtataaaattatcataaaaactaaacaccttgtatacaggaaaaacgataaacaaaagagtaaaaaaccaaaaaacaaaaacaaagtaccatcgcccttccggttttctccccagcccccgccccggtcgcggagccgtcgttctcgtctttcggtactcgcgcgcgccagctcacttctctacttcccttccccagatctacctccattcttccctcaaaatcacagatctctctcggccccgtgcccagcgctccgaaaccctagcgccgccgcgggtgccaggccgcgagcgtcgccatgggcatcgtgtttacgcggctcttctcgtcggtcttcggtaaccgcgaggctcgcatcctcgtcctcggcctggacaatgctggcaagaccaccatactctatagactgcaaatgggagaggtcgtctccacgatcccgacaattggattcaacgttgagacggtgcagtacaacaacatcaagttccaagtatgggatcttggtggtcaaacaagcatcaggtaccggctctttatcatgatagtaaattcctgactgtcatttctgaagtaaataatactattgcatttatttaatcaccgatgaaaagcagtgcaatagaggtactctactactacctttttgtttattataagtaattggtggagagtggagacaataccttgttattaccctgccacttcagtttccacaagctaaattatgaggctgtaagaatggacatgtttaatgaagataagaaaattttatttttttcccataacaggatgagcctgaa

SEQ ID NO: 29534 - DNA, 474 bp, Zea Mays
tttgtttgctagctgcaaaactggacaaaactgatatttgggttgtgttgtgctgagccaaccgggtattgtgcataggagccaggtgtattgaccctgcagtgctggccccctgttagtttttcatcacagcgagcccctcccaagttggcactgtccaaagcttgcacgccgtgacctaccagtagtgaccatgccggtcagtttggccatctcgccgtggccaggacaactcagcaaagtacacgatcatgctatgtttgttctgtgatcaccttgtcatggccagaacggagtcacgtcatcgtggaactagcgctgcgggcagcctcaccgtggaccgatcgactggagtcatccctggtcaatctcgcgcacgcaccgagactttggaagaacacctagaagaagtggtgtttgaaggagtcaactccagtggttgctgatcaagtggaggagccatctaactgtgta

SEQ ID NO: 29535 - DNA, 1310 bp, Zea Mays
aggggtacgtctatctcccctccagacctccacacgccgcgatggcctccgccgaaatccccaactccagccctgatgccaccaaccccgccgccgccgccgccaccgccaccgccactgccaccggccccgacatctcctcttcgccgccactcccgccgcggaagcgccgcctttcgccttcctcatctcccacgcgctccgcgtcacgctctcggtcgccccgctcccgctccccgcgcggccgccgctcccgctcccgcagccggagccggagccggagccgcagccgcagcccgcagtacccgcccgacggcaagcggcagcggcacaacgaccttaccgtggaggcgtgccgcgacttcctgcgcgataggtgcacccgctccgacctcgagtgcagatacgcgcaccctcacaactcagcttccgtcgaccggcaattgctgagatcaattggtatggaagatccaaatgtgaagacgcagatctgcagagattttacacgtgggaagtgttcaaggtcagcaaatgagtgccgattcttgcaccattcatctgttgaagatgctgcaattgtttgccaagattttttgcgtggacaatgcaatcgcatagcatgtaggtactctcatgtagtagcacatccggtgccaccaatgagccatgttcctatgccataccctgagatgctttacatgccaccaccaccaccaccacctcttggagtaccaatgatggggcctccgccttcaccatttgctgataataagaacagggttgaagtttgtagggacttcttgaagaacatgtgcaatagagaatcctgccggtttttacaccctgggacacatacagcggctgcgagcgccaatgttgaagtatgccgtgattttaaacgaggagaatgcaatcgacctgcctgtcgctttttgcatccatatacaagttgaagttttctgttagctaaagtaaagtaaattgtaccttgttttcctcttcataatacaaatggctgccaaatacatatagatgaaagaacgctcccctaagaacacatagttatagagttaacttcaacgtcaacttgtggatcttttgtccattcaaaccagctagagcaaaatagattttaattttggtaatttttgtcatttgggtaaattaaggtattttcaatgaaatgcaacttttatctgatctgaacaggcatgcgaatgatcatgttggttctctaagatttccaattggctaagatagcatgcacttgttgaagtgatccactgtttgaccagcttcattatctttta

SEQ ID NO: 29536 - DNA, 3310 bp, Zea Mays
cgcatccgctacgcgcacacgagctgtgcggtactgctcgctcatgcagccactgccacgctaccaccgcttcctttcctcttcggctgctccgcctcgcctcccagttcacagcccctcccaggctccgaatcggcggccacttctcattcctcacttccgtcctcgcgcaccaccccctccatccgttccggatggtgccttcgaaatcccgtccggcgccctagcgtagctcgggctcggccaggctccgggcccgccgcgccgttccgcagtccagctccacctccagaatggtacggttagtaaattgaggttggtggtgggttggtggccatactaggggaaggtacgtgtttgttctttatagatggtgacttggtttcaacctgagggttttgcccttgatgataggttgtcatagaattagtgggatatatgatggtttaatcacagtgactaaaatctggattctaaattgctaatagtagaaacagtagctatctagtgccggtagtgtttgggggtgtcttttgggctatgctgatgtggtgggttggagttgatattgtggttgttttgtatggcacattgttcaaatactgccaatatgagctactttttatgtttcatttttcctcgaggtaggttagtagatgtctggaatggatattgccaactaaatgtttttcctgtttcttaatgaaataaatgttttcctgttccagggatatttttgaattgttactaacagactaattttatcttctagatcttttcttgagtttaaggaagatgcttgcctttatttagaaggccctttttggtacgtcagcagtgttctttcctataggagtaaatgccattccgtagcatcgtgcgtgatgtaagggatggtttcgggagcttgtctaggaggggatttgaggtcaggtttctgagtcatcgcagagggaaatctcatggtgctgtccatgagctgcacgacccagtgcttgtggtacagagtagctgctgggctagcttgcctcctgaattacttcgagatgtgattgagaggttggagaccagtgaggatacatggccttctaggaaacatgtagttgcttgtgcagctgtctgcagaacatggagagagatgtgtagagagattgtcaagagcccagagttttctggaaaaatcacttttcctgtttccttgaagcagcctgggcctcgagatggaactattcagtgttttattaagagggatacatctacccaaatctacagtctgtaccttagttttagctctgccgtgcctgtcgaaaatggcaaattccttctatccgcaaaaaggaactgccgtgcaacatatacagaatatataatatcaataaattctggtgatacatctaggtgtacaagtaacaacacatacattgggaaattaaggtcaaatttccttggcacaaaatttgtaatatacgatactcatccgccatacaatggaactagtcaaacagtggcagggaaaacaagtcagagattctactccaagaagggatcaaccaaggtttcttgcaggtggtacagtattgcacaaatctcatacgagctgaatgtcttgggaactcgaggcccaaggcggatgaactgtgtaatgcactccatcccagcttcatgccttgaggctggtggcagtgtcccttgccagccggacagcattgcagcccactctgttggcggatcattcagcagtgtgtccttgtcaaagtcatcgactatggaccactctatgcatttcaccagttcccggctctctgatgccataacaggagatggcattgtgaacagaggccaggcattgaatgatgctgacgatgaagagtgcaaggacatgcctttgatcctccgcaacaaggccccaaggtggcacgagcagcttcagtgctggtgcctcaacttccggggccgggtgactgtcgcctcggtcaagaacttccagctagtcgcggcgacacagcctgccgccggagccctgaccccatcacaggcagccccgcagccagctccgcctcctccgccggaccaagagaaggtcatactgcagtttgggaaggtcggcaaggacatcttcaccatggactactgctacccgctgtcagccttccaggccttcgccatctgcctgagcagcttcgacaccaagttggcctgcgaataaatcctacctacaattctggtacctaccaaataatcaaaaacactgattgtcgtggtgttcgtccaagaaccgagtttagctgagacgccattgggcaccatgtgctggtgccttgttaactcagaaacgcgtgggggctgaatctgtttcagcagcttccttgtgataatctgtagctgctgcttcgctgctgttgtatcctatgctttcatttctttccggttccgctgtagcttcttaccccccggtgacattagttcggtacccgtatctggatatttttttagccttcttcgttggattgttcaccggtgatggcatgtattaacagagatagttacatacagatgtaatgaattcaggtctggataattttgctttcggttgctattggaaaaggatgtgatggctgctgtcatcttcagcagggctacgactgctgtcactttttttttccctagtggactgctgatgtttcttttgctgtcaccttcagcagggtcatcagggaggtgactgatgaggtgtttatttgtttgttttgcttcaaagcgaggcctttagcacggacttttcgcgacgagtaaataaagctacacagataattgcaggcggagagagtaaccaaaatcttggggcgcaggtcgggagaaagatccgaaaggccaatgcaaatgcgatacagacgcacgctagttgctaatgctagctaccctcctcggtgctccccttgctcctgtggcgtgcgggaaaaaggcaacttaacaccagcatcgtccgaggcagcagcaacggacgactccacaagatcaaggtatctcaccgatagccaacagctgctgacatttttaatggaaccaacctctccacacctccagcatgggacaccaaatacttcactcggagatttatcaactgcgatgaagcaaacatctacaggtcttccaggctgcaagaattcgaaacaacacagcgcatgtactagctaatcaagcttatcactacacatctatgtacactcagcatacgagggcttcttgctccaatcaggctcatgtaaacagctgtcccttggcctcgtttggttgcaccgggatcagagag

SEQ ID NO: 29537 - DNA, 5561 bp, Zea Mays
gatctggtttgctccgcgtcgtcgctccctggacgtcgccgccctagtggttcgcttcgccgcttctcgcgctctccggcttctacgctggtggtcggttgttcgagagcggctccggcgggcggcgtagatcggcggtccaggtggtgtattagacatgtctttcaggaagcgccaaccttccagtaacggagcttccattaatttagctcccctgggttttccaagtcaggaacttgagaaggttaatcctgtaaattcagtgatgtcaaccgattttgaatccatggatggtgttgatattgatatgagggaagtttactttctcattatgcattttttatctcatggtccattcaaacggacctttggagaattgtgcaatgaactcctagaacatcaactgctacctagaagataccatgcttggtattcacgtggtggtttccatagtggcgaagaaaatgatgatggcatatcactccctttggattatgtaaagctagctgagaggtacccccacattggtaaagaccacttggtgaagctattaaagcaactgatggctagttcttatcacccacacaacttgattggaagagtttctccaaatgctgctgatgtcccaacacttcttggctccaactccttttcacttcttccatctgacaggcaagataagggaactcccaggctgccaagttatcttcgttggcctcacattcagactgatcaagttcatggtctaagtttgagagagataggtggtttcactaagcattgtcgagctccctctctacctttgatcgcacagggcgttatgttattactggttctgatgaccgccttgttaaaatatgggcgatggaaacagcgttctgcctggctagctgccggggccatgaaggtgatattaccgatcttgcagtgagttccaataattctgtggtagcatcttcatctaatgatttcattattagagtgtggcgtatgcctgatggaatgccagtctcagtgctcaaggggcatacaggggcagttactgctattgcatttagtccaaggccaggtgctgctttccagctgttgtcgtcatcagatgatgggacatgcaggatttgggatgccagatactctcaacaacctccaagactgtatacaccaaagcccccagatgttgcccctggtaagagtggtgatgcatcttccagcgccgctcaagttcagccaacaaatcaccagatcttatgttgtgcatttaatgctaatggaaccgtgtttgtcactggcagctcggacacttatgcaagggtctggaatgcttgcaagagttcttctgatgaacatgagcaaccgattcatgagatggatctattatgtgggcatgaaaatgatgtaaactatgtgcagtttagtggatgtgcagttgcatcaagatctttttcatctgattccagtcatacctctaaggaagaaaatagcctgaagttaagaaattcttggttcacgcataatattgttacctgctcccgtgatggcagtgcaattatatgggttccacgatctcggaggtcacatggaaagattggacgttggacgcgtgcttaccatcttaaagttcccccacctccaatggctcctcaaccacctcgaggtggtcctcgtcaaagataccagccaactcctcgtggtgtcaatatgatagtttggagtctggacaaccgctttgtgcttgctgctatcatggattgcagaatttgcgtatggaatgcttctgatgggagcttggtgcattcactgattggccataaggaatcaacgtttgtgctagatgtgcatccgttcaatcctcgtatagcaatgagtgctggatatgatgggaagacgatcatctgggatatatgggaagggaaacctgttcagatctatgaaacaggacaatttaaactagttgatgggaagttctctccggatggtacatcacttattttatcagatgaagttgggcgagtattcattattggaactgggcaaggagagtcccagaaagatgcaaaatatgatcagttcttccttggagactatcggcctctcattcgtgataccaatggaagtgtcattgatcaggaaacacagcttgcaccatacaggagaaatatgcaagaccttttgtgcgacgctggtatgataccatatccagagcccttccagagtatgtaccagaaacgccggttgggtacccttggtctcgagtggcggcctccctctgtaaattttgctgttggccccacttacaatgcaacaactggtgaataccaaactatcccaattattgatccggataggtgggaaccgcttccagagataacagatttcattgagcttgaacctgaaaatgaagttatctctgacgatactgattctgagtacaatggcatggatgagtattcaagtgaaggagaacaggatattatgagtggtgattcttcaggtacttcatattcgagtggagaaattgatgcagataaccctgatagtgctcatctccgccgatcaagaagaaagaagaaaaaatctgaggctgatcttgttacttcatctggtcggcgagtcattaggaaaagatttttggatgatcctggtgtagccacagtgtcaaggccacatagaggaaggaaatctaggaatggatgttctagtaaaaagaaaagatcccctaaatccaggggtttgcgacctcggagacgtgctgctgaaaccgcattaattactttcccaaagaaaggagtttcaacagaagaggatgaagatgactccgagagtttctcagatagtgaattgaacacggatagcactgaagctgaacagttagaatggagtggtcagttaagaactagaagagagattaactccccatttgacatcgatgatgttacagatccttctcagtttactgataataaggaaaattctggaactggtaagaaactagttctcagaataccacgacgtgatttaagaactcaatttcctttaggaagcggaaaagcagaatgctccatacaggataaagcagtgaagtctctttctctagctaatcatgaaccagttgagcacgaactgactattgaaccaggacattcccctgcctccaaggctgaattaacaattgatggtgatctgcatgatagttctgctgtttgcagtaataactcaattaggtggggtgaggttaagatgcgatcctcaaagcgttgcaagtacagtgagccagctggaggtttgtggtcctcttcaaataacgttgctttgcaggatatcgagggatcgagcagtcagcagatacctcatgaatatggcgatggcatccagccaagtgttgtgcaaaacgtacaagaagtgcaacatggaacaattctagataacattccggaaaacaacagtactgatgaacacactagagaaaattttggggatttagaaaagatagctaacaatattaatgctcatgcagacggagtgaatgacactgtacaagttcccaatacttctcagcctcaactaaaagttaagtttaagtcaagaggctctgcagatgcagtaggaaatatcatgaactccaagcatgtcaaagattcagtgcagtgtggcgatgattcttccatcaatcaaccaagaaatgctgacttctatattgtgcccaaaagttctcaggaatgcctagataaaagcactagtttgcatgattcaaaaaaaccgtacttggatgcttcaaagaagtacactgcagtgtacaaaaggtcaaagcgaaagaacaagaaaaaaatggattcagatgaatgtccgaacgaggatagcacttctatctccaatgacgatggtggataccaacctgcagaatacagtcctgttgcagctgcaagcagtagattgagaagaagtgctaggaagtcatttgcatacaatatcaatggtacaacacaggatgatatctcggaagtgaaagtttcttacggttcccatgaagcatcaactagtggaagacgagttgtcacagatgtgcgtgaagggatgtggcgacaaaactcaagaagtgttggtttaaggtctgctaggaacaaaagagaaagtaacagcttccttgatacacatccattgggtagaaggcaccaggtttcttttaagtattcatggttaatgttgcttgagcatgaagatagctaccgttatattcctcaactcgatgatgaggttatgtacttggggcagggccatgaggaatatcttaaacaagtgcaatcatctgaattttgcccttggaaccggataaaaggacttaaagctgtagaactttgcaaaatacagggtcttgattatgccacctacagaggatctggtgaaagctgctgtaaattaaccattgaatttgttgattgcacgtccagtggatttggcaaaacatttatgatcacgttgcgtgagctggtcaactttccagattttcttgtggagagaacaaggtacgaagctgctatggagcggaactggacccacagagacaagtgcaaagtctggtggagggacgaagaaggacaggtaggaggaacttggtgggagggacgggtgatggcagtaacacctaaatcacctgattttcctgagagtccatgggaaaaatatgtcatacagtataaggaggatggttctgatcacgctcatagcccctgggaacttcatgagacaggcagtttatgggatccatggaaacatccacatatggatctcacggttcgagataaattgttatcagaaatggaaaatttacaggaaatgtcacacagggatcaggatcattatggtgtttttaaactggacaaggttgcagaaaagtcagatttcatcaacaggtttcctgttcaattttctattgaggtgatcaaggcaagattagcgaacaaatattacagaactctgggggctgtcagacatgataccactgtgatgctttcaaatgcagaatcttacttttcaaagagcagtgaaatgaccaaaaagatccgcaagctctctgagttgctcgaccagatcttttcatcactgtagggaacattgcttgatgcctgattgacaatttcccttttcgtttctgcaaaaaaaatttggccttaggcatcgagatgatttttactggtcctactgaggcattagagaattagccaaagtagttctcaggacagaaagggtttccggtgtagctccaaccagttaaactagttgctgatacaaagtgctcgttgctaacacatttgaccgtttgatctgttgtcaagatacaatggttcatcctattggacatgaaatattggggttttgttagagaagatgccaaggtgtaaatctggtggaggaaatgcattaactgataatttcattttgtacagacaccctcagcaataaaaggaaaaaaagaaatgtgcaacgttgtctattacattttggggtgacacatggtaactataatataggaaattagtggcacttttttcagcgtgcccaggcac

SEQ ID NO: 29538 - DNA, 705 bp, Zea Mays
atccgccatcgggcctcgtcgatcgccgcctcctgctcggcttcttcccacctgcggttgcaccgatcacccagggagggacagggcagctcgccggtccaactccgacgaccggccggccatgagctaccaggctcctcctcccggcaccgcagcctacccgccgccgggcacggcctacccgccgccaggccagcaggcgtacccgccgcctgcctacggtgcgccgccacccatggccgccggcgggtacccgcccccgccgcctccgcagccgcaggactccaagcgcagcaacgacggcttcttgaaaggatgcttggccgcgctctgctgctgctgcatgctcgacatgtgcttctgagactgagttgccgtcagggatggggtggcgctggcgccgcgtccagatccatcctgcagtcgcggcgaatgcatgaggatgttttcggagtcatcactagtcatgaactcacgatgatacatctgtttttttttctcccattccgtgtatgttctccagttctatgaatttcactagttaggccagaacagaaccagcagggattatttttctggcattcatgtgcgtgtgttcttaccatccattcttttaaacattacccacctacgaatgtttaataggatcgaaaagttttcttttatgttcggagacctctcatctgactcgtcactcgactccca

SEQ ID NO: 29539 - DNA, 2138 bp, Zea Mays
cccacctgtcagacgccgagtgacgttgtgtctgctactagtagtgctttgctatggtgggcgtatccctaatccctcaatctcaacgcatacttgccaacagcattacgggaatgcccatcagcgttaacgattaccacaggcgtaccactgcctcgcaagtgtactcctgtttgggcatagaggtggcagaggcgagaatatgggccaagagtggagggcattgccggtagagtggaaacgataaagcctcggccgggcccttcaccctccaggctctgctcctcctcctcgccattgctttgcgctctccggccccccgctcctccctgttctgcactcgccgtcagatttcgcaagaaccctcgttccctgcggcctcttgttggtttggtcggccgatacgtttgatctgtagagcaagacgacgagcctggagagaggaagaagtgcaccggcgattgtagaaccagcaccggcggaggagttgaagacgccgattcgagcccggcgaagtgctcgggacgtggcctcgtcgagcccggcgaaggccgcgtcggcattgaacatgatgagatacccgaggcctagctcagatggcctcccgctgcccaatggcatcgggagcggcggcggcggcgcgagcaagaagcctgcaacgccgccgcccagatcgagcaaggatgacgtggcgccggccgtcgccaccgacagctcccgactcgcggcgttcctggcctcgacgtcgctcgagtccaaggcgcgcgcccgcgcgccgccggcgcagcccgcgcctacctcggcggccaccgctgccgtcgccgcgaccaagagccctgttcgcgaccacgaccacggccatggccacagccacggcgcctcctccgaccactccgaccccgcctccccgagctccaccggaaccggcgaattgctgctccagtggggacagaacaagcgcatgcgctgccgccgagactccgcgtccccgtcgccgcagcaccggcaggccggcggcaagatccagcggcgctcgtcgtccccggcggtggacaagctgatgccgcccccgagcgcggcgccctacacccgcgggtccaacctccgctccgtctcgtctctccctccgcgctccggctccggctccggctccggatcctctgccggcgccctcccccacccgctcagatcagcggaggaccgtgcggcggggaagttctcggcggcgagggccgagaagcagcgtgcggtgtccccgggctccgtgatgggcatgggcgtcccggtcccggacccgaggcggcagcagcagcagcagcatgccggcgcggcggcagcggcgacgtcgaagccggcgtcgaaggtggagatgccgcggatctacaccacgctgtctcggaaggagaaggaggaggacttcatggccatgaagggcaccaagctgccgcagcgccccaagcggcggcccaagatcgtcgagaagaccgtcagtgcgatctgccccgggatgtggctgacggatgtgaccaggggccggtacgaggtgcgcgagaagaagtgccccaagaagcaacagaagaatcgaggcctcaaggggatggagggcatggacagcgactccgactgaccaccgacgccagcctgagttgcctgcccgaggcgcggtggcggcggaagaggaagaagggtcggcgacagtgacgggagacgaggagcgcgcgctcttgtacatggtcgcactgggttgaaggaagccataaaaaacgaaggtggattcaggggggggggggggggggggggggaagaacttccgaatgaatcgtagccggcgtcttccttcgttccttccttttttttgttcgacattgggtggtttgtgcatatcgtcggacaaccagtagactgtctccgcaagaggaaacaaggcatttagaccaccctctctctcgctcgctctatgtggttaattagagcatgtttggaaatactaggactagttgttaatcatggctaaaagctagctaaggatatctctcgcatgcttagattcttagctaaaaattagcttctagacaaaaaaaaaatactctttcttctaccttttctttcacccagagaatagaggattcagatgattt

SEQ ID NO: 29540 - DNA, 1960 bp, Zea Mays
tgcatacatatatatcgagatggtggactcagttcgtagtaaaccgacctgggtacaaccggccatgaacctgccaaacttaagtcggtctatacattactattgttgctgagctaactaacctgacactggccggtataggacaaaactgttgcagtctgttgactacagctgctactgacctggtcagcagcaggccaaaacaaaattggttgctactactagctgcagacatgaaacttactaaggaacgtctgcttgacaggcgtgcaagaagcttcttaatggcaatgatgtgcgaaaggtctctagctgagttggttaggtggtataagtagcattcatcaggtcttgagtttgactccctgtaggagcccacaggtcgattttttttaatggcattgatgtgtgttgttgtggtggtgggtgggttgggggttctttctcccgcagagcacaggtccaggttttttaggattgcagtacataatttgcacgtcaaaatttatgtgcagtagattattttcaagggatgtgctggattattttaaatgcagtgtgctatataatttatccaaagatgctaatttgcttatgttattttttctgtattttacatgtacctgttccttttattctcttggaagcaaggagtgtcatcacaacaaacaactgaaggtactggtgtttttggtcgattcagattcttgaaccaaagagtttcatctcagagtgaagattcattatcatgtcatagaattgatctcagaacttcaacaattaagattgatgcagatgaaaatgatttaagattttgcttcagaataatctcacctgttaaggcatacacattacaggcagaatcaggggctgatcaaaaggactggatccagaaaattactggagttatcgcatcgctactaaattcaccattcccacagcagttgtcatatggtaatgtagcagcagagagtaacagatccacaagttctgttgattctttgtctattgaagataacaagagttcagagggacatgatgatatattcaaccttctgaggaatatccctggaaatgacagttgtgcagaatgtcgttcccctgatcctgattgggcatctctaaacttgggtattctgatttgcattgagtgctctggggctcataggaatcttggagtgcacatttcaaaggttcgatccttgagactagatgtgaaagtctgggagccagtaattatggatctcttccatgcactaggaaatgattacgctaattccatttgggaagccctgcttccaaaagaagatcaaggaatgaacgactcaaatggagctattctttttattgaaaagcctaaacctagtgatgctttctcaataaaggagaggtacatacaaacgaagtatgtggacaaactgctttttgccagagatcccgatcagaataccattaatattttggaagccataaggaaaaatgatgtgagagcagcatatcgaattcttgcaatagctgaagtcagtgctaacatgacatatgatgctttgagcaaagatgtccatcatgttcagccagtgacagacaagatgttacttgatccgatttcttgtgagataattcaggactctggaaaaccagaaggctgtctacaaggatttccatggccgaacaccattgcatcattgtgtccaaaagaaaaatgatgagctcaccaagcatctgctgaagaggggtgcgagaacgacaattaaagatggcggaggtctgactgctctggagagaagaatggaacttggagcgataactgatgaagacttattcatactatttgtgagccaaagagctggacaaagagttgcggcagataaccatgaagaaaaatcaagttgtacgcatacaagattttaattttatattcactgaagatgtcaacaaacaaaatagacaagcagtcgca

SEQ ID NO: 29541 - DNA, 1927 bp, Zea Mays
aattctcttcaacacgcgcacatgtgacatgccccatggtcgtcgccgctccaggcatcctcccgtggcctcacctccctctcccttcctcctcccacccgtctgacgcctctgacgccgccgcagcagcaacagacgccaacacctccgcgtatgacatccagatcttcgagcccacctccatcgaggagcgtcgtcgcctcctgatccagcggcgtcgcctccgactcgccgcctcccatgcctcgcggctcaccgttgcctcgcgcgtctcctccaaactcatcagcaccactgcctcctgctccagcggcgtcgcatccgatctgccgcctcccctcctcatggctcgtcgttgcctcccgcctcttccccaacctcgcccttgccgcccttggaggatcccaaatccgacgacgagctcagtaggcccacgcagacgcggatgtgctatgaacttcagacaacatattcctaccgagaagtatgaaaagtacacttcagagcatgtcaaggtcctcacgaaagcttcctatcaagtggttgtttgcaagattgacgagttgtaggcaccaaatatatcgagtccttgctatcaacatatgagcatattattgtcaaactcaagcgtcagattctgtatcgatggcaatgggttccagaacagtacacaaggcaatttcaagacggttattcaattgctcaaatagttcagtaagtgagaacaaagaaacttcctaaatgtattaatatggtatgatgaatagtgtctcacacattgtgttgttgagctctggtctccatttccgtgctgctagaatgtgatgtgaagtattcaccttttgacatggataaacatcttctctctgttacatttgcaggcgaaagaaggctcatgtgctgcttcgaaaatcagttctaagaaggcaaccagggacaacaaacctgataagggaagaaacatgttctggataaatattggcctttgtttcaagactccaagcccgccaccatccagggatcaatcctcaccacgaggaccaggggtgatgccaacaaggtgtacgtgaacctttcctggggtgttgataatttagctctcgcaaacctgttcactgagcaaggaccatctatgacagtgagaacaagtcaagagggtttgattttttgtcatgtatggttccacagaagagcctgagaatgcattatcgaatctcaatggagctatgagttctgaaacccttttttcttccccttgctgctcgcggcatagcatttggaaattgaagtacaatttgtctttcaggatatactgaattgatttatcattgtcctgcaggacttggatgatagatccgtgttacgataccagcatcaaagccgcctagaagcaatactgaactttcacttgagatgtgagtagttgttgttgggggccttcgtcctccgaaggtcctcaaaaacatgatttgacaatgttttccaagtggattatgtgaacaggtaccttcggactcagaattacgaacatgaagtgcggtcaggacgaagcctgaaccagacgaaggacgggctgattaccaagctccacgaaggatggtgcacagccgaagctgtgcgcagggaagcttcgtcgtgatagcagagaggggaaccgacctaaagataaaaagactacgtgggccttgtcagatttccataagtcattgacaaatgtaatggacataaatgtaattttacgtgggctgcgtcccgcgtctataaatagatgaacagtactctcgtactgttcacgcggacttggcatttgcttttgcgtcacgcttgtactttttatcttctctcaggaccgaaggtacatttgtaatttgaaatcatttctatttttccatgttaataaaatagaaatgattctatgatgatgctt

SEQ ID NO: 29542 - DNA, 2717 bp, Zea Mays
caaaccgccgcctcctctccccccctcgacctctcctctgctcatagtctcacccgagtcacctccacacacacacacacacacacacacaccgatacacggacacatacacgcgctctccctcctcctcctcctcctccagtcccggcaacggaaggtccactgcggcgccggcctcactggcatcaccatattgccaaccgcgcatattttcagtttgtagaagccatcttttaaagaacattttgggcagagattgccagtactattacttgtggttaacatggacttctcagctggttcctacttcacatcatggcctgtcaattctgcttctgagagctacagtttggctgatggttcagttgaatcctatggaggagaaggaatcatgccaccttcaagctacttcatgacagccagatcagatcacaatttaaaattcagtgtgcatgaacaggattccactatgcttccaaacgaccaattgacctatgctggcgctaggcagactgatctattacctggcgagactccatctagggataagctttgtgagaatcttctggagcttcaacgactgcagaataacagcagcctaccgagtaatttagtgcccccaggggtacttcagcacaattcaacacctggggcctttcatccgcagttgaatactcctggactttcagaactgcctcatgccttatctagttcaattgatagtaatggaagtgaagtttctgcttttctcgctgatctaaatgctgtttcttcagcctcagctttgtgttccacattccaaaatgcttcttcattcatggaaccagtaaatctagaagctttcagttttcaaggggcacaaagtgattctgttttgaacaaaacaacacatccaaatgggaatatctcagtatttgacagtgctgccttggcatcactacatgatagcaaagagtttatcagtggtaggctcccctcatttgctagtgtccaggaaacaaacgtagctgctagtggtttcaagactcagaagcaggagcaaaatgcagtgtgcaacgttcctatccctacgttcactgcacgtaatcaaattgcagttgctgcaatgcccggatcactgatccctcaaaagattccttcatggatcaatgaaaacaaaagtgagggtcctgttagccatccttctgatgtacaaatccaaccaaattctgttggaaatggtgttggtgtgaagccacgagtaagggctcgtcgtggacaggcaactgatcctcatagcattgctgaacgacttcgcagagaaaaaatttcagataggatgaaaaatctacaagatcttgtcccgaattctaataaggcagacaaggcatccatgctggatgaaatcattgatcatgtgaaatttcttcagcttcaggtcaaggtgttaagcatgagtaggctaggagctccaggagcagttcttccccttctcgcagaatctcagactgaggtgccaaaccttctaatttccttgcaaaagtatcgttgttttataattggtgacatagacttcccatctttttttcatctgtatgcccaactgcaatgcctgagacaaattccgctatgacatgccatgatagcttataacagcagtcattttttttggtgcataacatcatgcactcctttagttccacttgtactggagttgagtttgatacggatttgcctcctgctttaacatcgagataccggtaattcacttcatttccatgcactgtcacgattcatgtagggttaccgcggtcaacttctgtcagctccaaccaacgcacaaggattactggacacggaagaatcggaagacaccttcgccttcgaggaagaggttgtgaagctaatggaaaccagcatcacaagcgcaatgcagtaccttcagaacaagggactctgcctgatgccagttgcccttgcttccgccatatccacccagaagggcgtctccgccgcgtcaatccctcccgaacagtgaaataaagacatgctgctgctcccatgagtacgaggaaacaactgcagaagacagaaaactcaagatggctgaagaatgcagcaaagcccgtatagagtacagggtaggaagttagtctgaccagtgttcatgacctcatctactaatttgcttttcagaatcagctttttggtatctattgcgcataagttggtttttccttttcccttgctctctctctctctctctccctggggccgtatccgggtgctccgtggatagttgcgtttcagaaacttgaactgtatctggatgatctatctggtttctcttttgtgcatagaaaaaactgtaaaatcttctggttctgttctgctagatgagatctatggccggacatatcgaaaatgatcttgtgatggtacctggtagtggtagggttactgcatccggacctgtggccccttttccggctgtcagtttgttagctgtagccatctaccatcagtttccaaggatctgctgtaaagcgttggcagggaacgtctgccttctgtttggattacttcattttggagaaattagaatttatttttaggggctgattcggtgacaaggggatcacgagagaattggaggggaatgaactaatttccctttcaatcctctttaatcctcctgtgatccctggtcatcaaatcagctctagaggatgtttggt

SEQ ID NO: 29543 - DNA, 2106 bp, Zea Mays
aaaataacaatttttttcggtggaacgtgacattgggcaagtcctttccttcaccgctaccgaagtctacttccattcctctccttcctaaccccgcgtcgcccacgagctcgccgtgccggcagaggcgaggacctcgccgaagcagaggccatggggcgaccgcagccagccagggctggcgccatcaacatcgaggcgtgcgcgcggccgatcgccgtcgaccaccgtatcagtctcccgtactacttccgcatcgcgggcagcctcctccgacaggctaatatatatcggaacgagagtaacttgctcgacctgtatgtcatccttctgagatactcgagcttgctgtgcgagacgattccgaagcatcgtgattaccatgccttcaaaaacttattgatattatcaaagagcttgagacattgaagccagttgtgcagcggcaggttgttgagcataacagaggaagtactgtggaatttaatactaatagtctaaatggaaactacggtacaactcgtaggatagagcagtgtactccaagctcttatactccacagacatttgtaggcagcagtaatggagcattgcaaaaacccttccatgctgggagacaagtggcatcattatcaagtgtacagaaacaatttatgaatctaccatatccaaaagaagaaacactagctagacactccatattaggacctaatggtcttaatggccggtggaatgggcctgttactggaatcaaggttcaatatccaagcaattttgaattaacacaaaatggtataacaagtttagtgccatccatcttgaaccaagatgatttgcatggttccaacactgcacctgcacctccacctccaagtagctcctcaaatgacaatgacaatatgaaatctgttctctctcttgatgatggtcgatggtctgtaccagcagaagaacacactccacttccttctgctaatttggaagaggagttgttccaattgaatatcaaacaaccttctcctccaccagttcttgcagaggtacaaagaccaatttctccatcaagagttgccgatccaacaccaggacttccgacctcaggaactgcccgatttcagaacttgcatgttccgatcaagttgatggagtgttttctaagggttgctgagtcaaacaccaaaagaagcttagaaacctgtggggttcttgctggtaccctgaaaaatagaactttttatgtgacaaccttaattattccaaagcagaaatcgacatctgatacgtgtgaagctacaaatgaagaagaactatttgaagttcaggacacatactcattgttcactcttggttggattcatacacatccaacacagtcctgcttcctttcttccattgacgtccacaatcattattcttatcaggtcatgctacctgaagcaattgcaatagttatggcacctactgacacaagaaaacatggtatatttcatctcacggatccaggtggcatgggcgtgatccatgattgtcaagagagaggtttccatcctcacaaggcaccacttgatgggtcgccaatatatgagcagtgctcccatgtgtacatggacaccgatataaagttcgatatgattgatctgcgacaaagatgacgaagctcacctttgggtttattttgcaacctatacttctcgcagttaaatcaattgctgccttatttttttcttagctcaagatttgtgaattcttatgtacgctgttgtacatagctattgcgttgtatagggaaaaccattgaggtaataatatcattggtaatgcttcgttgtaattcattccttcaacctcgcaaggcacgtttgtgcggtaagatgaggaagtggtgtctggattttatgccatgccaaatatttgacttaaaagggcatcaaatatcacaaattgttaaaggtctcatttcttagactatcttcattagactatcttcagtagacttcttatcccactctttattttaaacttcactctgcaaatagtgtaatctacagtacaaattttgcacggccgtttatatgacctgctagagatggacttagagacttatga

SEQ ID NO: 29544 - DNA, 2567 bp, Zea Mays
tggtacacaattatcgaacttggcttcactagataaaacaaatcaattgcagtttctttcttttttgtttcactattcatctgaattgttccatgtcgagcagatctttatattattgaggttgtgcttgatatattagaactcgtaactccacatgtcaactgcttcccagttgagcaagagccctggtctcaagccttgagtcttgataaacctccacttgccaactgagtaaaatcccagcatttcgccgtctccttaactcacaaaagttctttgcttccctagtccatcccattgagacccgatctcactggtcagggaccgccggttgaaggagatgctggcggctgagggcatcgttgtgcaatctttcaattcggatctgctgtacgagccatgggaagttgtcgatgatgaagggcagccattcaccatgttcgacccgttctggaacaggtgcctcagcatgccgtatgacccccctgcaccgcttctgcccccgaagaggatcaattcaggtgacttatcgatgtgcccatcggaggatctgatctttgaggacgagtcagagaggggaagcaacgctcttctggcccgagcgtggacgccagggtggcagaacgcagacaaggcgctgacggccttcctcaacggcccactggccgactactcagtgaaccgcaagaaggccgatagcgcgagcacgtccctgctgtcgcctcacctgcacttcggcgagcttagcgtgcgcaaggtcttccacctagttcgcatgaagcagctcgtgtggagcaacgagggcaaccacgctgccgaggagagctgcaccctgttcctccgttccatcggcctgcgggagtactcccggtacctgagcttcaatcacccgagcagccatgagaggcccctcctggcgcacctcaggttcttcccctgggtggtggacgagagctacttcaagatttggaggcagggaaggaccgggtacccgctcgtcgacgctggcatgagggagctgtgggcgacggggtggctgcatgaccggatacgtgtggtggtggcaagcttcttcgtcaaggtcctccagcttccatggcgatggggcatgaagtacttttgggacacgttactggatgctgatcttgagagcgatgcgctgggctggcagtacatcactggctctcttcctgatggccgggagcttgaccgcatcgacaacccccagtttgaaggctacaagttcgacccgcatggggagtacgtccggcgatggattcctgagctcgcaaggctgccgacggagtggatacaccatccatgggacgcgcctgtctccgtgctgcaagctgcaggaatcgagctgggctctaactaccctctccccatagtggagctggacgcggccaagggcaggctgcaagcggccctgtcagagatgtggcagctggaggcggcgtcgagggccaccatgaacaacgggacggaggaaggcctcggcgactcctcggaggtcctgttccctcaagagctgcagatggaggtcgaccggcagccagccccagccgaggcagcagccaacgtgcacgtgcacgtgccgatgcctgcccggaggcgcggggaccagatggtgcccaccatgacgacctcttcgctgaacagagctggaacagaggtctccgccgatctagtagtagcgaacagcgaggaggaggacaccagggcgcaggttccgttccacgcgcatctccatctccacccccgagccgaagccccgccagctgcgcgtagaaccaacaacggcgctcgccagcacgacgtcttccagcagcgtcggaaccacaggcgagatgctctgcttgctccgtcggcgtcggaggcttcgagcagctggaccggcagagagggcgccgtggtcccggtctggtcgcctcctgcggcgtcgggccattcggacgccttcgccgccgacgaagctgacgtctctagtaggagctatctgggtaggcatccgcagtcgcaccgcctgatgaactggagccaactatcgcagtcatcgtgagctcggatgcacgcagaagattctgtgcggccaaacttaatcgagctgaagattctcgtatgtagattgtccactgaactactcatccatagtctgatgggatggaaaccaggcggcttttcctggttgtggtggctatagctgtgtaaatctcgtcttctagaacgtgtgtggtcgatatagtgcggttggctttacaaccaaaaaaaaaggtcgctattattgatcagacgacaaaggttttccgtatttttttagccttttttgggggaggtatgtgatgtatgtaaccgtaactgtacattcccttgtgctgaccatattgttagttgtagtttccatgcgtcttgtattgctgttttgggctgaggagtgatgaaccatggaccatggtcacgtttgccggtccatatggattggagggctaaaattcctattaaaaagtaagggggttttagctcctctaattcacgtgttgtttggttcacgaaatgtaacgtaaatg

SEQ ID NO: 29545 - DNA, 1744 bp, Zea Mays
ggggtcgactggtcacgatgtccccgtgtgaagttcgtatatatgcagatggcaggatcagctggttcaacaaaactagtaaagatggcatcagaagggaacaaagacgtacctcatgaagctttgaccgtggatcactcatcgatttcgggttcaaagcgcaagcgtggccgcccaaggaaatatgagtatcctgtaaatgaactaccacagaaggtacagcccatccagagcgccccacctcttcttcactgcacacaagatggctcaagtctggccagccatgcatctggtggcggtgctcatggtaattggtccgctcaacctaggaattcagctaatgcttctcttcaaggtaattctggcaaagatgactttcttggcaagcattttgtgggcaagctgaccaagaaagttcctgggttttcgctcattacggtaaaagtgaaggacaatcaggtgctcaaaggttgggttccagatgaaattaatctccgcccaataacacctaaggatgaccttgccccagagctacccatgctgcgaccgagtcaagttcgaaagcgagcatcagcgatccatatgcaacctgctcttcctgtgccaatgcacttggagaatgttacacttgcaaagcctctgcagatgaggagacctgttgagaaaactattgctaagcatgctgtgcctcttgcttctaggccttacattagttctggtgttgttgcagcaatacctatatcggttgctcccatcaatcctgaaatgagaacttcggccaggcaggatgctgaacttgtgatcccacaatcatcagtttctgcagtgccaataaaatttgtttgtcctgcctcggtaccatgcaagcaactggctaatcaaaatgagtttactggaaataagtctgttgatgaggttcagaaagattcggaatctccaaatgtaaccaaggaatcaccagtgaaagctgaaaaaccaaacattgctcttgtggatgtagtggccaaggattctctaggggaagggcaacaacttaatgatcaagtaacggatgtagttagggatttttctggtcaaactcaaaatgttgatgtgacaatgtctgatgagatcaagatagcatcaggtgccagagataagccaaattctgcaaattgtgaacagcagagttctaaggaaccatcagacatcacagaacaatctgagcagctcaagacagagaccgatgtccagaaaggagttgatgcctcagatgacattcatcctgcgcatgatgaacaataaatcaaggttgtcggtaagtgaaaatagagatcaagattcaacgaacacaacacagatcctgatgtttagtggaagtttgctgcctgtaatgtttctgtcaggcttattgggatgtggagctggaattttagcatggaccaatgctttaggtgtataggtgagagattaagtagagttacataaacccaaaaaaaatcacctaggacgtagcagttatagcacagagagaatacttgatggacttctcatttttaggaagatgacccggcttaaagttattttgaactcctggtcttgtaatatgcctttttaatattttaagctctattcacagacatatggaaacatgatgctatacaggaaaacttgcatgttatatgtaatggccctcttgtttgttgttattctcccccaaaaaagtatttttcaacagattttgttcccgtgttttgtacctaaa

SEQ ID NO: 29546 - DNA, 816 bp, Zea Mays
taaacagctagcaagagatctgtgcaccagtgaacgaagaatcctgtatcgcacacaatatattggatatgactcagcatgtttccatgatttcaattacactgtcccccagagagctggacaagcacactcccgggtaccaagctccagtgtatgttgaacaaccaaggcaacagcaggtgccaccaccacatcgccaaccacgcagaccaccagcacaattccagcagctggagtatgaagattcttatgcacggggtcgaggaagaggcgtgggcgtggaaggggctggggtagaggtggctacggtggctatggtggatatggaaacaaccaaggtggctatcatcagggtggtgggtattatgacaatcaaggtggagataatggctatgataatcaagacagatatagtggctatgataatcaaagtgggtatggtggtggatatggctataaccaaggcagatatgggaactatcaagaaaatggtggatataaccgagacacaggaagtggtatgcgaggaagaggcaattggggttaccgaggaggggtgaaccaagcacaaaaacatcagctcatgctcatgtggtattttaagccctgcctctatatggacgccggcctcgcttccgcggtcaccgcgcttcggacctgcaccgatgtcgcgcacgtgctcgagcagtttcgcctcgcctggtgcagcaagctcgcccgggacgcccgcaccgtcgttccgttaaggacctctgcttcgacctattcatcattaggggtggaaacagagctttcaatgcatgctggaggtgcgcg

SEQ ID NO: 29547 - DNA, 2115 bp, Zea Mays
gtccatctcaccgtctccttgaaacgcacccgagccaggtcgagccgtcgagtcgagtcgtcgacgacagcacgcggcgggcggaaggggacgcagacacgcagttgcaggctcgcagcagcaagaaggaggcggcgtggaaggggaggcagatgcgggaggcccaccgcagggtcgtcgcaccagatggacacgccggataggccccgcgccgccgccgccgccgggttcgaggattctcctgtcttcaatttcatcaacaatctctcgcctataccaccacctaaacctttagactcagcacataatgtgcagctattcaagtcatcagacttggcacctgtttcttcgatctttgcctcaccacatgttaatccagtgaaggaaactaaagttttgatcagggatgaatctgttcaccttcctcaagaattgcactcgcctagcagtgtcaggactcgaatagacacctcaggctcttttagaatgatcagatgcaaagacattgtgtcggacaattgcaatatcacttgtcaactaaacgaggcatctattgattcttctgatcatacatcaaactctacaggccaattgactcaatccatacaggatgctgctggcagtatggaaagcgataaggatcaatgcgatgccaataaaacagaccttaccatatcccaggagtgcacaggcctagaaggtatgaaccttgatgagagtggcccagacaaaatggattcgtcacattctgggattgttgttcatgaaaaccagctatctgaacaaaacaatgacgaacctgcagcatataatgagggttacattattacacaccaatcaactagtgatatgctcactttagccataccatctggaacagaaacacaaccagtgaatgatacacaaatggctgataacccctactcttgtgaatccttgttggatgatcagtcaagtggatattgcacccagaattctgtgcatgaaccccatttgtactggactggggcagttgaagggtctgcagtatcctatactccccaaacactccctggtgctttgcaaagtcagctgatgccatgtaacaagctcagtgaaccaaaagattacgtgcctactgagcaaaatgccttgtcacagcacttacgtggcatgcgtaggcgcagccttttcaatgaaaaggctggaattagtaataaaggtgtagacaaaacttcggatcatcatcctgtaaattcaactacccccaaatgcaaaactatttctggtgacaactcaaagcctctaagaacccctccatgcgcattacctggtattggcttgcacttgaatgcccttgctacaatacctaaagagaaaatagtccctcgagagattcagtctactataaatgaatcaagtaacttgataggccctgctggatcttctccagcaccttttgagcaaaacattataaatgatgatttcactcaaacaactgatgttgcaactgccgaagcttctagtcagggtagtcccaagaagaaaaggcataagtttgacaatggtgatggcacttcatgcaagcgttgtagttgtaagaagtcaaaatgcctgaaactttactgtgagtgttttgctgctggagtctattgttctgagccttgttcgtgtatcggctgtcagaacaaccagagtcatatggaaacagttctgtctacacggcaacagattgaatctcgcaatccattagcatttgctcctaaagtcattcatacatctgagcctggtatggacttaggggacttttccaataaaactcctgcttcagctcgtcacaaaaggggatgcaattgcaagaagtcgtcgtgtctaaaaaaatactgtgaatgttttcagggcggcgtgggatgctccgtaagttgcagatgcgagggctgtaagaatgcttttggaaaacgggagggagaggagaacatcgaagagacttgggacagctaccagacgtagaggattgtggtatatggatcatgaggaggctaatgattcaatatgcactatgctggcaacgaggttggaagagaaagaagttgcagtaatgcttttgcattgtagattggggcatctctcttttgg

SEQ ID NO: 29548 - DNA, 1929 bp, Zea Mays
cgaagcttttctatttccttgtgtggtggcagcatgccgggcagggccgacgacggcgacgccggcgggccatcgagggccgtcaccggcgcggtggaggatccggaggccgtggccaacgacgtgcacgtgtccatcaggaacagcacggcccggcgaaacctcgggtacctgtcgtgcgggacaggcaacccgatcgacgactgctggcgctgcgactcggactggcacagcaaccggcagcggctggccgactgcggcatcgggttcggccgcaacgccatcggcggccgcgacggcaaggtgtacgtggtgacggacccgagcgacgacgatcccgtgaacccgcgcgagggcaccctccggcacgccgtcatccaggaggagccgctgtggatcatcttcaagcgggacatggtgatcacgctgagggaggagctcatcatgaacagcttcaagaccatcgacgggcgcggcgccaacgtgcacatcgccaacggcgcctgcgtcaccatccagtacgtgaccaacgtcatcatccacgggctccacatccacgactgcaggcccacggggaacgccatggtgcgcagctccccgagccactacggctggcgcaccatggccgacggggacggcgtgtccatcttcggttccagccacgtctgggtggaccactgctcgctctccaactgcgccgacggcctcatcgacgccatcatgggatccacggccatcactctgtccaacaactacttcacccaccacaacgaggtgatgctcctgggccacagtgactcctatgtgaaggacaaggcgatgcaggtcacgatagccttcaaccatttcggcgaaggcctcattcagagaatgccaaggtgccggcacggctacttccacgttgtgaacaacgactacacccactgggagatgtacgccattgggggcagcgcggagccaaccatcaacagccagggcaaccgctaccttgctccgacgaacccgttcgccaaggaggtgaccaagagggtggagactgcccagaccgtgtggaagagctggaactggaggtcagagggcgacctgctgctgaacggcgcctacttcaccccgtccggcgcgggcgcctcggccagctactcgcgcgcgtccagcctcggcgccaagtcgtcgtccatggtcggcaccatcacctcggacgccggcgcactgtcgtgccgcaagggcgcggcctgctagcgcggatcgcgctccctctccagcaacaggaaaagaaacaggacaacaggaaactaagccacctcaacaccaccaccaccatggttacagtttcttcttcccttctttttaggggtcgcttttgacaagggttatattatatatatatatgatggtcctccttgatattttcaccatttgctcaacctcccccctgctcccgacatggaaagctacctggagcagcaggcgtgaagcgttgctgattggtcgctcggtctctctattagtcgtctgatctgagtgttgcgtgttgttccctctgcctacaagcaagtggtgtatgttgagggcagggggtgcgtgcgtgcgtgttgtgtgtgatacttactcacttggttgttgtgttgagaaaaaaagggtcagattgttagtagtggtagtactacatgttacgcctggacagactgggatggaatggatgtacaagacatggaggaatacccatgttcttaactcttcttcttcttcagtgaaaaaagctaaaacgttacagtttagctgaatattttgatctcgaagaacagcatgtgctgcttcggaaaggacactagcaccagcacattgatatgcccagttccatatcaagttttttcactatcctcggaagtagtacttgtgtacatgaggagggatcggggatggatctgg

SEQ ID NO: 29549 - DNA, 4394 bp, Zea Mays
ctcccctcgggcctcgccgcctcgccgcctcgcaccttttactgaaggtttgacctcacctgcccctcctctcctctctccgccccctgctcctccgagtgaccgtacgccgtagctcgacccggccgatccccgaaaccctagacgcgccgctggtcgccggaggccgggccatggacgtcggcgcggagctgcgcgaggcccaccgcctgacgggccacgccgaccgcgtgtgggcgctcgcttggaaccccgccccgggccccggctccagccccgttctcgcctcctgcagcggcgacaagaccgtccggatctggaagcgcgcccctgacggcgcctggcagtgctcggatgtgctggaagacacgcacaaccgcacggtgaggtcctgcgcctggtcccccaacgggaagctgctcgccaccgcgagcttcgacgccaccacggcagtgtgggagtacaacggcgccgactttgagtgcgtcgccacgctggaggggcacgacaacgaggtgaagagcgtgtcatggagcccgtctgggtcactgctcgccacatgcagccgggacaagatggtgtggatatgggaggtgctgccagggaacgagttcgagtgtgtctcggtgctgccgggccacacgcaggacgtcaagatggtgcagtggcacccaattcttgacattttggtctccgtcagctatgataattccatcagggtctgggctggtgatggagacgatgagtggcactgtgtgcagacactaactgaagccaataactgtggtcattcatcaacagtatgggcattatcctttaaccttaaaggtgacaggatggtcacatgcagtgatgaccaaacgttgaaaatatgggacacaagtgctgatttgtctcaaccaaaaactggcgaaggtcatgactcttggcaacccatggagacggacaatgttatcaaagaaggcctttgctaccgatgctgctgtgtaagggtgtcccagagcaataaagtgtgcgaacttggagaaacaatcatcaaccgtgagaatcaccgacttgtcgcccacttttgggaacccctcaatgaagtacatagaaatatcactccatacttctgaaggcactgatagaggttgcaggagaccaccgggatggagatgttcagttttattgcgctggcagactgaacaacctttgatgaactccttaactctctgtaatgcatgaggattatcgaatgacgaccggaacctgtgaattgtcttttggattccttcatgtcctgtgtcatgggcactggcaatagtatcggccaaagagtagaggcatatggcacatagactttaccttcgaaaaggagcaacccatccaaatctgtccaacccgatgaaacagtgtcggcagcaagctgctggcgcacatcttggatttgtgggtccgttgcagcctcggctcgcaaactgtcaaacagctcaaaaggtgtagagatggtgttgagcgccatgcctggctcgacacgacgtgagagagcatcaactgcgccattgagtttgccaggcttgtactccaccacaaaatcatatccgaatactttgctcacccatgtatgttggggaattgtggtcagtcgctgatctaacagatatttaaggctgtagtgatcggtgcggaccagaaactggcgcccccagatataaggcctccagtgacggactgctttcactaacccaatcagttctcgttcatatgccgacaacttttgatgctgaggtgctactgccctgctgaagaaagcaatagctccacctccctggtgtaacacgacaccaaaaccagaccctgatgcatcacaatcaacgatgaaactgcggtcgaagtcgggcatatgtagtaatggtgcagacattaaggcttgtttgagcagattaaaaggctcctctgcttcttctgtccatctgaatgcctctcgttttaacagtgttgtcaagggggctgctacaatgccataaccagcgatgaatttccgatagtacccggttagacccaaaaatcctctgagcaccggatggagcgcggtggtggccatgactccactgcttcaaccttggaagggtccatcacaactcccttatcagagatgatgtggcctaagtaacccacctgtgtttcgccaaaggaacacttggtgcgcttgagggctaacttctgctctcttaacaattggaatacatgccgcatatgttgaagatgctcggtccaggaagagctatagattaatatgtcatcgaagaataccagtacaaacttacggatgaacggcttgagtacaccattcataagcacctggaatgtcgatggtgcattagtcaagccaaaaggcatgactaagaactcgtagtggccatgggagagattctgatatttgccatcagcaagaaacaggtttgtaaaattgccatcaggcccacatttcatagacccagctggacccataattcatagacacactggtaattataacaagaagacaacattgtgagtggcaaaaatccaattatctctggccatggtgcgtgcggaaggtcgtcttatcgatgtcctctgggtgcatgcgcacctgatggtagcctctacgcaagtcaagcttggtgaagaaccgggctccctgaagctcatccaagagttcatccactactaggataggaaatttgtccttgaccgtcttcgtgctgagctcacggtagtcaatgcagaagcgccatgtgttgtctgatttcttcacaagcagcactggtgatgagaacgccgaagtacactcccggatgataccttgggacatcatctggtcacactgtcattcaatctcatctttgagcaactgagggtagcggtacggtcgtaccgccactggtactgtccctggcagaagacggatgcgatgatcatggcggcgaggtggaggaagtccctggggctcgacgaagaggtcttcaaaggatagcagcaaggtatcgaacaagttgtccacgcaccatgtgtccgtggcgccaaaaagacatcatcaacttctcaaagttgcagatgaaaggacccaaagaatgcaaccattccaccccgagcaccacatcaaagccatccaggggaagagtgtagcaggttgtggtaaaggtctcttcgccgacagtgaatggggtctgagaacagacgtccccactcaacaccttctcaccatttgcaaccttgacaggcagttcagctgttggagtcacatgcagtcccagtcttggcacaatagcatcgcggatgaatgtatgggtggatcccgaatccacaagagcaatgagggccacaccattgatagactttcaatttcagtgtgtcggcgatgtcaatcccagtgagagcatgaagtgatatgcccagttcctctgccagtgcattagttgtcctggtatctttgccatccaattccaacagaaaaaccccgcaagcagggcacttgtgatcgactgtatatttttcagagcagtggtagcattcactgctggcccgtttggcggcaacctcctccgaggagagcctgcgcaaacggggtttgctggtagccgataacgagggctttgttgcgtttgcagatgtcgttggttttgatgtagcagatggcgtccttacggcattcataggcgtgtgccaggtgcatggctcgctgcagtgtagttggagtcagcggttcaacatcagtccgaagcggttcacccaagcctacggtaaacatctgagtttgctggagctgcgtcatatcctcgcaacgacagagaatggacagaaactgacgttgatagtcttcgacagtgctggtgcgccgaaggtccttgagatcagccatatcgttggaccgtagaggtggtccaaaccgcatacgggtgaactcaacgaagcgggaccaagtgagcacgtcgcccgtgtcccgctccagagtgtagaaccactctgccgccacaccgtccaaatggagtgatgcctgccacaccttctcatcggatggagtcctcatgcccctgaagtaagtctcacatttattgatccatggcagggggtcggactcaccatcgtagtggggaaaggagacattgggtcttcgatagccaccatcgtcgacgcggtcacgaggagcagatcttgtgctagccatgaccccgacaggcgccgtcggactcaccatcgtagcgtgatccgctgtccatgcagttcgaggcgtgagttaatggtggagagctgcgccaatatttgatccaatttggctgagtcgaaggaggtcttcgcaggatcgtgatcgacgccggacatgttggtcgatgcgttggaggaatctgataccaaattgatatgtcgtg

SEQ ID NO: 29550 - DNA, 1054 bp, Zea Mays
gaggatgtccgcaccagcgccatttttgtgcctggatagatggtgaccgcgccagggatgagaccacctccatccatgtgcgcctcgccaacgccggtacccccccgaatccgagtggtggaactagaggcgtgcgcgccaagcacgacgaaacaggtgctccgtcgtgggtgcagcgaccacggtggaggtggacacgtcgacgagcggcaccgagttcgctgggtgacgagcagatgtgcgggacagggatctgctggtggtggtttttgaggtcgacaacagcgccgatttgctcgcctcgaagaccaccaacatcgacgacgggtggcgtgaagaagctacaccacttcttgattcgttcgcctgatgctgcgtcgtcgtcccaggagtgggggagctgggcctctgttttcaagtcgtccgactaatcgtgattagtcgtgattagtcgggttggtcgatttagggtgctcgattagcacatccgacccgatcagagcacctaatcggcttggtcgtccgactagtcgacgactaggggcgattagtagctcgatcagccgagtctgcgcgactagggtttaggatcctaaattttttatttcgtggtttttttggcgggcggcccggctatagggagatgaaacaccagcgctgtctctataaacccttacccgacggttcacatctcctaatttcctggcatcttgatctctttcattttcttctcttcttctctattttcctagcggctccttctagacttctcgtgactgggtgacagctcaagacacacgtgaagatgacaattctcctgctgaagatgaacaagaacaagagacaacaagacaaatggatgatgatgaaggcaaacaagaatcaggtggaaggggagctgtaggtgatgaatttcagttggatgaagatcttcgttaggtaactgggtgctaatgtgtgctgtgtggtatctgggactggtagtattagtaactagtaagtgtttctttgctgtttttagttggatacttggattggatgaacaaatatcttc

SEQ ID NO: 29551 - DNA, 2078 bp, Zea Mays
gagagctatctcactaagtcaccatgtcacggatgaatatggttaactatttggttcactataattctaaacatggaccttaacacaactgaattccaatagtcattttattttgagagacaaattttcttttgtttgttttcatttaaaagttccatttgtggtattctgatgccaatttcgcatttacaattttttgctggagtagaatttactaggagctgcagaagcaaagatatcctcaaaacctcctagagctttgccaagagttgctatgatgaggtcatcaactaccacagctgtcacctctggggtttcagacaaaagaagcagcactgggggtgctgccaacaggcaggcagctggtaaaactgccagtacttcagctggcctgagatctggcgggggtacaaagtctagttcaatctcaaaatcaggtcccttcacatcagcagcaacttctcatggtgtgtcaatggacactaagccggaagcaaaaaccaaatcagcaaccttaagcaacaaaaataggactgcccagagggtccctgttcatccgccatcaaaatctggtatcagcaaaactattccctcaagatcatcagggaacacgattccagctaagggccatgctgaccgtgcatcaccaagcatttcacctagcagctccatggacagcatgagctctgtcatatctggggcttcaactgcttccaccgtagggaggatgagccatacatctgagagtttaaatggactgtccccctccctcaggaagagcaatgactgccctccaactccaaagcttaggcctcctgttgtcacagagggtcattcatctggaacagcagcacctggagttaatttaaaagctacttctgaaatgaccaaccagagaaaaggttttaagccatctgggcttcggaggcccacacccaagattggttattttgatgctgagaaatacattgaccaaaacatcggtgcacagctacaaccacaaccttcaaaggtccagtgtctacctgacacaacacaatttcagagcatgaatgtggatgccgcaccagctacctacgtccaacaggattcaaaactgacagcaacacctcatgaggaaagttgtgcttccgaaagtaaggtcgtgaagctgctgcctcttaaggtggaagtagagccttttaaggtggcggaaccatgcacgcaccagactgatccagttgtggtcagacccgaagcagtgcaacagcaatccatggagatccagtgcttgctatatgccacaccaaactctcagcaaacctttggtcaacaagtattagaacctatagtagcacctcatgaggttagtgcttgcaaaagtaacacagtaaagacgcctttggaaactgtgcaaatggaagtagaagcgcctctagaagcagtgcaattggaagcagaagcttttaaggtggacaaacctgaagcgtgcagacacctggtcagtccaattgtggtgaaactcgaagacaaattctgtgatcaaaatgctagagctcttgtcgctgaacgtgaagattgcacgctcatgactgaggcagtggtggcactggctacagactattcaaaagagaacattccggttttgcatgagaatatacaagctaatgtggatgcgagttcattagttgaggtgctgacccagaagttatcctccatttctcttggggaggataactctaacgtggctctcaggtcctgcagtgaatgaggtttggatggtatgctggttgttattttattaccctcttgttatctgtaggcaaccgtaccgcagctgacgagtccaattcccttaacctgcttgtggtgtaaaatccttgtgcacagagctttatagaactaagattttctattgtatgcatgaaaacctcatctttgtctattgccggtttgcaagtaaagtgtgtttgtttggtaattatattttactttgtttagtaattcacaatggatacctagagagcctgtttgtaactgctatacgagtgggtgattttttgtgggagagggtctaatggtatatgttttgatgtcgg

SEQ ID NO: 29552 - DNA, 3419 bp, Zea Mays
acgaacggcgccggcgggtggccgtccacgacgctgtcacgcacgcttggcacggcacaccgagagagagagagcgcgcgcgcgcgacgcagccaatcccccacggcatgcccaaaaccctcagttccgtgcaataattctgcctcgtcctcccatcgctgtcccccaccgaaacactctcggacgcgtcgtcgtctccccaagaccaaagccaggcggcctgtctgtcctccagtctccccacttcgctctcaccccacgccgcgtaccgctattaataccaccaccagtaccaccacctctgccagttcgccaccatcgtgctccgtacacgctccgctccggccatggccgccgccgcggcctccttttcggccctgccgttccttctacttttgctgctggtgccgtcgctcgacggcgcctccaatgtgacgtacgaccaccgctccctcatcatctccggccgccgccgcctcgtcatctccacctccatccactacccccgcagcgtccccgagatgtggcccaagctggtggctgaagccaaggacggcggcgccgactgcatcgagacctacgtcttctggaacggccatgaaatcgccccaggccagtactacttcgaggaccggtttgacctggtgcggtttgtgaaggtcgttagagacgctgggctgctcttgatcctgcgcatcgggccctatgtggccgccgagtggaattatggaggcgtgccggtgtggttgcactacgtgccaggaacggttttcaggacaaacaacgagccattcaagaaccatgtgaagagtttcacgacatacatcgtggatatgatgaagaaagagcagctcttcgcttctcagggagggaacattatcctagctcagatagagaacgaatatggagattattatgaacaagcgtatggagctggcggcaaaccatacgccatgtgggcagctagtatggctcttgctcaaaacactggtgtcccttggattatgtgccaagagtctgatgctcctgatcccgtgataaactcttgcaatggtttctactgcgatggattccagccaaattcgccaaccaagccaaaaatttggactgagaattggccaggatggttccagacttttggtgaaagtaatccccacagaccacctgaagatgttgcattcgctgttgcacgttttttcgagaaaggtggcagtgttcagaattactatgtgtatcatggtggcacaaattttggtcgcactactggggggccattcattacaactagctacgactatgatgcaccaattgatgaatatggacttcggagatttccaaagtgggcacatctgagggatcttcacaaatctataagattgtgtgagcacaccctgctttatggaaatacaacgtttctttctctgggtcctaaacaagaggctgatatttacagtgatcagtctggaggctgtgttgcattcttggcaaatattgattcagccaatgacaaagttgtcactttccgtaacaggcaatatgatcttcctgcttggtcagttagcattcttcctgactgcaggaatgtggtgttcaacactgcaaaggtgcaatctcaaacttcaatggtgaccatggttccagaaagtttgcaagcatcaaaacctgagcgatggagcattttcagggagagaactgggatttggggtaaaaatgactttgtccggaatggatttgtggaccatattaatacgacaaaggactccaccgactacctatggtacacaacaagttttagtgtggatggaagttactcctcaaaagggagccatgctgtccttaatatcgactccaatggccatggtgtccatgctttcttgaataatgtgctcataggtagtgcatatggtaatggctcacaatcaagattcagtgtcaaattgcccatcaacctgaggactggaaagaatgaacttgcccttctaagtatgactgttggtttacaagattcgcttatgaatggataggagcaggctttacaaatgtgaacatctctggtgtgagaactggaaccatagacttgtcttcaaataattgggcatacaagattggactggaaggggaatattataatttgttcaagcctgatcagacaaataaccaacggtggataccacaatccgagccaccaaaaaaccaacctttgacatggtataaggtaaatgttgatgttccacaaggagatgacccagttgggatagacatgcagtctatggggaaaggcttggcttggttgaatggaaatgccatcgggcggtattggccgaggaccagttctattaatgataggtgcactcccagttgtaactacaggggaacatttattccagacaagtgcaggacaggttgtggacagccaactcagagatggtaccatatcccacggtcatggtttcatccctcagggaacatcctcgtggtctttgaggagaagggtggggatcccacgaagatcacattctcaagaagagctgtgacgagcgtgtgctcctttgtgtcagagcacttcccttccatagacttggaatcctgggatgaaagtgccatgaccgaaggcacacccccagccaaagcacagctgttttgccccgagggtaaaagtatatcttccgtgaagtttgcgagcttgggaaaccccagtggaacctgtagatcataccaaatggggcgctgccaccacccgaactccttatctgttgttgagaaggcttgtctgaacaccaacagctgtacagtctccctgacagacgagagctttgggaaggatttatgccctggagtcaccaaaacactcgccatcgaagcggactgttcttagtggcctacggagtacgaagtgtctcggtgtgcatctaggttccactgcaagtatgcccgtcaaaattctaaaactgtagtgcttgttgcacggcaatgctattgtaacctggatttgaatgtatccatctgagctaggttatgtttcaggagctttcttaaactaacgttgttgctgagcagcatgaaatctgattagcgcaaatatgtttcctagattttaagagtcttcagaggcattactcaatatgataagtgttcaattgtcccaaagaccaaattaccatcaaaagataattgttcaattaggctaagtacaaagtatggggcagctaatcgcgaaccaaacaaaagctaaagttaagcaatttagcggtgctaaatcgtgatttagcagtcgcaactcacgtagcggcagctctcgcagccactatagcgccgccatctaaaaccatgctgagcagtattcagtgatgctggtaggtgacagttagcgattgatactgaccatccgcgctagcaaatgcaatattgtatttgggatc

SEQ ID NO: 29553 - DNA, 226 bp, Zea Mays
ctagacgcacggacggcctcaaccgcgggagcttgcagtcggcgacggatttcgatcgacggtgagcaattcaggcggtgctggccacgaatcccatgcgacccggctttgtcaaccttccttcaggccagatgaagcctagggacaccacctcgaggactgggtcaacggcaagtagatctctcgtggtggcacacggcgctcggcttctctcggtctctccgtg

SEQ ID NO: 29554 - DNA, 2038 bp, Zea Mays
ggctcgcaagccagcctaatgacatgtgcattgcgtcgacaactctagatgaacaccgtttgcattttgagaaggataaggctttggctcgcagattccagccagtattggtgaatgagcctagccaggaggacgctgtcaagatattacttggtctgcgtgagaaatatgagacttaccataaatgcaaatacactttagaagggatcaatgcagcagtttacttgtcagcaagatacatccctgacaggcatcttcctgataaggcgattgatctgattgatgaagctggcagtagagctcggatggaatcatttaaaaggaagaaggaagaacaatgctccattctctccaagtcaccagacgaatattggcaagagattagagctgttcagagtacacatgaagtggcactggctaacaggttgaagtattctcttgatgagaatgacaaagatgatggtgttaatattgaagtcataggggacaacaagattgcttcgccatcgatgcctccaacttcagtcgatgaacctattctggttggttcagaggaaattgcaagagttacatcattgtggtcagggataccagtccagaagttgactgcagatgaaacaaaacttctagttggactagatgatgaacttagaaagcgtgtcataggtcaagacgatgctgttgtggccatatctagagctgtgaagcgatctcgtgttggcctgaatgatcctgacagacctattgcaacactactattctgtggtccaactggagttggaaaaactgaactcacaaaagcactagcagcgagttattttggatctgtgggttatgccttccttcttgcatcattctcgcgttctgaaaagacatgttgcatggatcatgtcttgaaaaagttatttattcgatttgcaggaatcagctatgattaggttagatatgagcgaatatatggagaggcatgctgtgagcaagcttataggctctcctccggggtacatgggatttggtgaaggtggaactttgactgaagcagtccggagaacaccattcactgtagtcttgcttgatgaaatagagaaagctcatccagatattttcaacattcttctccaagtatttgaagatggacacctgacagactcacaaggacgcagagtttccttcaaaaatacgttgattgtcatgacatcaaatgttggttcaacatcaatctcaagcggaaggaggagtataggtttctcaacacaaagggatacagaggagaccacctatgctgcgatgaaatcacttgtgatggaagagctgaaggcattttttcggcctgaattgctcaatagattggatgaagtggttgtattccaccctcttgaaaagacccagatgatggctattctcaacctaattctacaagaagtcaagagtagacttctagcccttgggattggcctagaggtatcagaatcaatgaagatcctgatttctcagcaagggtatgacagaagctatggggcacggccacttcgaagagccgttactcagctggttgaggatgttatcagtgaagcaattctctttggacagttcaagcctggtgacacgatattgatgggcactgatgccacagggaagccttgcttgagccgactcaatgatcagaccgtccaattgtccgacactgctccaacaatatgaacatcccagcaccctgtgtatatagttgcagattacacatttattctgtacatagaatccccatctcagcgtggacataatcttccagatgttggtttgtctccacaacattataatgtaaatcttatccttaaatccaattgtacatatttttattattaatgttagaccgtgttgcgtgtataggcctgaggtctagttcatgtgtagtgtatatattgtactctttttaatatttagctattctcatttatcatggtatgagactagctccaataaagatctctaaagagtcttgtaccctaaatttagaggatgaggtcgtcctctactccct

SEQ ID NO: 29555 - DNA, 2423 bp, Zea Mays
atctctctctctctctgtctcccaccacctatcttccctccccatgtgggcggcctcgagctctgcttaggtctcacagctgtgctctcgttggttgggtgatccgccccttgtcggctcctttcaactcgagagctccgggacagcgagatctgcgctgtcgccgccttacctttcttacgagctcgcgtgcaggcaggcactgagcagcaccttcagagatggattttttcacagagtatggcgaaggcagcaggtacaagatagaagaggtcataggcaaaggcagctacggcgtggtttgctctgccgtggacactcatactggcgaaaaggtcgctataaagaagataaacgacatcttcgagcatgtgtctgatgcgacgcggatactccgggagatcaagctgcttaggctcctgcggcatccggatattgtggaaataaagcatatcttgctccctccgtcgaggagggagttcagggatatatatgttgtctttgaactcatggagtctgatctgcaccaagttataaaggctaacgatgacttgaccccagagcattaccagtttttcttgtatcaattgcttcgaggattgaaatacatacatacagcaaatgtatttcatcgagatctcaaaccaaaaaatattctggcaaatgctgattgtaagctcaaaatatgtgactttggcttagcaagagtagctttcaatgatactccaaccgccatcttttggacggattatgttgcaactaggtggtaccgagcaccagagttgtgtggatctttcttctccaagtatacaccggcgatagatatatggagtattggctgtatatttgcagaattgttaactggaaaacctcttttcccggggaaaaatgtggtacatcaacttgatataattacagatctccttggaacaccttctcccgaagcaatatcaaggattcgtaatgaaaaggccaggcgctacttgagcagtatgaggcgaaaaaagcctataccgtttacgcaaaagttcccaaatgcagatccacttgcactatgtttgttagagcgaatgctcgcttttgagccaaaagacaggccaagtgctgaagaggctcttgctgatccttatttcaagaatatagccagtgtggatagagagccttctgcacaggctgtcacaaagcttgaatttgaattcgagaggcggagagttacaaaggaagacataagggagcttatatatagggaaattcttgagtatcatccaaagatgctgagggagtttcttgagggaactgagtcaagtggtttcatgtacccaagtgcagtagatcattttaaaaagcagtttgcataccttgaagaacattatgccaagggatctacaggaactccacctgagaggcaacataattcattgccgcggccgtctgttgtctattccgacaaccgatcacaaaccacagccaacatcaccgaggatctttccaagtgtatgctcagagaaaatacacagaagacacatccatattctgcttctgttgcaagtaaatttccaccacatgttcctcaaggtgatgttgcaaggcctggtaaagcagttggttcggtgatgcagtacagcccatgtccagcgcctgctgccgagcgatatgagcaacgaagaatcgctaggcacccagcagttgccccaaacaatatcccttctggaagctcataccccagaagaagccagacctgcaagagtgagacaggtgatgccgaaagccatatggatgcgaaccaagctcggcagccaaagccatatgcagcgaacaaactacctgctaccgttgatagtcgtggtggtcactggtaggatttctgcggtgcaccagaaagccattccaaaccgtttcttaacatgttatcagtatcgattacttctgctgagtgctacattattctgacaaatccagaaatgtagttctgtacagatttgtgttctttttccggatacctgaataccgaaagactgtacaactgtagtttctgattcctactccttgtcgctattcaatcgctaaaggatctgtccctggtggagaagaaccggcagattcaatgcaatgttcttgactgacgtcatggattttgttcttcaacctggtagctctgaagacgaattgaatagctgctagtttctgctaatcatctacagtcaggtgcagagtgttctgggagctagttctgaatatcactgtcacgctgtaatctgcacgtttctgagctcctaacttctaagcatgccactaccgtatccctttgtaatttaatcagctgtaccatccagtactctgtttacatttgtagaaacgctctgcaaagaagctattatgtgggagtttctttgctattattataaatgttctgttgttataaa

SEQ ID NO: 29556 - DNA, 4558 bp, Zea Mays
gacgaaccctgccccaccaccaccgcctccgcctcgtcgtcgtggggcgctggcgacgcgtttgttttgttcatcacacgcccgcgggtttcctgtttcttctcttcccccggccgcgcgcgtccgacgcggggcagcgagccagcgaccactctcgcctgcctgcctacctacccatcccacacccgcctggggaaaatcaaagcgccgccctcgcacgcactcgcgctccccactcccctcacctcactcctcgtaacggctcggcaaaacccccagcacgcggtcgacgagacgagagccgagaaacagtccactcctcactcccgttccgtttcgtttccccagttccgcatggccgccgcgaggtagcggcgcaggcgctcaccggggatggcggccggagggaggggcaagctggcgccggcggaagtggcgcccgcggcgtttccctcgcggggcttggcggtggcgggggccgcggcgggcgaggtggtgcggcgcgtgaggcccacggaggcctccgagcgccgccgcgcggaggtcgtcgactacgcgcggaggctcgtcggctcagcgctcggatgcgaggtttttgcatttggatcagttccactaaagacttaccttcctgatggggatattgatctaactgtccttggaaatacatcttatgatagtactttggttaatgatgttttctgcattcttgagtctgaggagcagaatagtgatgctgaatttgtagtgaaggacttggaacgaattgatgccgaggtcaggctcattaaatgcactattggaaatattatagttgatatctcattcaaccaaactggtgggatctgcgcactctgcttccttgagctggttgatcggaaagttggaaaaaaccatctatttaaaaggagcatcatattgatcaaggcatggtgctattatgaaagccgcctactaggagctcatcatggacttatatcaacctatgcactggaagtacttatcctttatgtattcaatctattccacaaatctctccacagccctgtggaggtatgtcttaaaagatttacttatttcagatatattttctcattatataatagaaaagctcatgtcttgccgtttccctgtgtttttattaataggttctttataggtttctggaatattttagcaagtttgactgggacaactattgcataagtttaaatggccctgttgctttgtcgtctttgccaaacttaattgttgaagctacagttacacataccagtgacttattgtttgacaaagaattcctcaagagctccatggataaagcaactgtacctccaaaaaattccgattcatgctatccgaggtttcgtcctaaacatctaaacatagttgatccactgaaggagtacaacaatcttggcagaagtgtcaacagaggtttgaatttgatctaaccaagatatacatataactcttttctaagttttcctatacaatattttgctgctgcttgtactcataattgcatcccaatttattaagtcttgctgctgcttgtactcataattgcataaacccatatgtgtagctagctagcattgggtttgcctggcctcatctgcttaatttaataaggtgattttgtgcagctagctttaatcgcattcgaacagctttcttatatggtgctcgaaagcttggtcatattgtcacgttaccatcagaagttattcctgatgaaatttatgagtttttcaaaaacactttgggaaggaatgaactaggggcaagaccagatattgacagcaattatgcttttcattcttcctttggtactgctgagactattttggaagatatatcaagtatgaagatttccgatggtgaagatgagaacataacctgtcatctttcaaagagcttgggtgataaaaacttatacgttggaatgaatggacatacacatttgagtaattattttccaggagtccgtaacactgcattaagtactggtttaagtacaagagcatcccattttgttcataatgcaccaaaactacattcatcgttttgccatgataacagtcacggtgacagtgaaaaatgttacttgaaccatggaatggagcaggtatctcactacactgctaaagccttctgtatagatgataagacaacaatacagtcacaagtttttgtgagcaacccatcactattgagcacctctgctgctgtcactgcttcagaacttgccaccaaacagaaaaaatggagtactgcctatgtggagaaacaacatttttctccctcaccatcaagcttgccagatctttcaggggatctggattcacaatttagatgtttgcgtcaagttcagtaccacctcgaatacttgtttgatgggtttttgcagtcagttcagggagcatcttctgctgataagtttcacaaggacccctttcacatttctgcttgcagtatcttgttggacagagatacaggatcgccaaggttgcagttgctttcacctgctcgaagcaatggaagggatccatctcccgtttcttgtagtcagagcacagaatgtgtctctcagcattcacagaatggaagcccatgggatatggcttctcaacggagtgtctctgtgccctctggaatcgatattccaccaaatggagtctcaccgtgttcttcttgtgctgattctgaggtttcttctgtttcatggtttcatggctctggggatagcgctatgatgcatggaagtggaaaagacacatactttacaagaaagagctgttatactcgctgggagcgattggcatcttcaagaaagaatgggaaaatactgccaaatcaatcagtgaaatataaaagcaaccagaagtcagctccaggagcaagatttgtgtctcacaaggagcaggccgcaatagacagtagaaccaaagaaataacaatcgatcaagctttgaagatacatgaatacattgaatcagacatgaaaattgttgaaaaactcagttgtcataatcaaaaggaagtccgtcatgacaatgaagcaagacaattaccaaataacaaccaggatgtttgcttgaataagaactttttgcaaaaccgatatcatgtggagtctacacgagctcccagagcaacacatcagattcctaaatatcaaccgtttaaaattcaaaatactacagagtgtgatagagctagcctaagtaagaacatgcccagaaagcacagctgtggcacttggaaagagtatgagatacttgaccggccaacaaagcagagaccaatttgtggcccattgaagctagaaaacagacatgtctgggattgcacaaagaagatatcagctggaaaccagaagtgtaataatcataaggattacctatctttcgtaagaggtgcagtgccacgcagccacgcagcaagcactccaaatggtttagaaaaggaggcggctaattcaaataaatccgctgacaacggaagtcccgtaaggccaatcttgccagagttattgctttcttgtcatgacatcaatagccaagagaggtccccatcatctagtgctcatcaatcatacttccctgctgcaaatgatcgaccactggagactatagagtttggatctttgggaccttttgcactgcctttatcctcattgaagtcaaatggaactactaacacagaagctacaagtaaggtgtttacagatgcctctccatttgtgttacagaggtccagggccgccgcaactgaaaacaggtaatttccaagtgtaaagttcatagcattgaattatacagtgtacactatgcattcttgtaagtagcgtaaaattaaattaaatagtagaattaaataaaaggatatacccagtgctggaggctgatgggtctgaggaaagaacaatcatcgaggtaataccttctcccatggagaggctgcttcaaacctgcaaccgaagacctgcccttgtttaggcataaaattcaataagtatgattggtgtagtatatggggattagggactgtcacagaagaccgatacgtgtgtctggcatccagatttgttgttatgtgatagtgattccatgcacttttacgctacatacaatggctacaattctgtccttatatgaagcatcccgatagttgacttttctattgtttcagaccaccaggactttgcaaagtgggagacgaggacgaatttccacctcttagagctgggatccgagtttttttgggcgcctcatagaaatgaggattattgcagtggcatagtacagcctaccgtgtaaaatgtcgtcggccccttatcaatctctctctttttcccgtagttgtcactagagttacaccgaacaaggtttatacagctaatgttcactagtataacttagcaaggagaaagatcagatacaaaaaaaaacggagtacttacgtttaccttatcagtctctctgtttcaggtcttcttgcctttgctttgcttcattgcagtatatatagatagatgatgaaaaatcggaaa

SEQ ID NO: 29557 - DNA, 5451 bp, Zea Mays
cgctccctccccatgaaacccccttcccccaatctacccctctctgtgcccccgacatccacgctgcctcagcccgccgtccagcgccctctctgcgcctccctccccacaccgcctcagcccgccgttcgccacgctccccacgctgcctccccccgtcgcccctccctcccgcgcggaactccgccatgctccccacgtcgcctccccccatcgcccaccagccgtcgcccaccagcccacactatctcacgccatggatggtggcaacagtccccgcccccgtacctcacacgcatcaggctgggctggccgatcccgccgccgcaaacgccgcgcccagccccgatgtcagcgcggcccgcccgccaacgcactttcggcctccccccgcccctcccttcgcccgcccacccgcaacctccgcgccatccgcaacctccgcccgcttctcacgccaccgacccgacctccgcgccatccgcaaccgtcgtgcgtcttatcccttctctaccgcgcactccgtgtggaacaacctccgcgtaggaagcctcctcccttccccatccccattccccaccacgcgcttcggggacggcgagctccgggcgggagcgaccgccgggcgcttctgctgctggtgcggaggaggaggagcggcgagggtggttcggcgcaggctccacggcggcggtgcccgagccgagttcgactggctggcgctctactgcaacctcacacgcggcgatgggccggacggtaacaatggcaagctggtcctggaggagctgctgtcgtgcgccgccacccaattttgttttccccaaatcctgagctgtgaagagaagaagaagacaaggacgcggcgagtacgatgacgagcgccgcacagcaagtcagcgaggagcacgatgacgcgatgaggaccacgagctgccgaggaagtcaaggacgacgacggcgcagagacccgcgagttgagacatcttcttcgccggcgtgaaccgcaaggctgagacatcttcttcgccgggttcggccacgccgacaccaccgacccgatgtacctatcctagccgtgtttgcaggcctctcaaattgaaccgattgcttcaagggtgccatacatgattgtgttaaccatgagagggattggcctggcactggttcattctacgggaacctcgacttcggtggagaatgtggtgtccctgtccaaactgtgttctacactccaactgaaaaccgtgcaaagttctggtacgcaacagattacgacatgtttagccttctgcattgctcacatggaagaggacttgagacccgggaccgagcagtacagattcatcgagcaatgccacattggcctcatgaagtttcacaatcacagtggtttttacaaggatttcagttcatggttgtacatagtttttttagttttttttttgaaaaatgaggcattttctttttaccggcggcggaggcgatggcaacaagcccttccctattcgaatctctgtgaccacagagcctacctcgctgagctcatcaccgagatcactggtgggatcaatgagctcgccgacgtagcacagttcttttgatgagagtggttcaactctattttgcttggttcagtggagatggtagcatggtgaaggataatgcctacgtgcgcagcaattttcatttttcttttagtttcttggagtcgtggaaatctcgctattcacaaggatttcatggcggcgttgttaatttgggggttgggcagaggctttaccttttgcgtcagacagtgctctcctatgcacagaactatcaaaagcaagcaaagatgctctagagtacctgaggaaggctactttgtgctctataaggattgccaggaaagtgccagatttggcagagaacttcatgggcctggatgcatcattgttaaaggagaaacaccatgggtccttatatctgcaattcagctatgcacagaactatgcaaagcaagcaaagatgctctagagtacctgaggaagaaactgattgtgtggtagaggacccaaatacgtttgaagacgacacgcaggacgattttgtgcaagttgcaaatacattgatcccttaggggttgagatggaaactgccacaagggagggaggacgtgagtcagctgcacgtgccgacatacacatcacttcctgcctcgctgtccttgatcgagacaaaatcagaagagctgtatctatatgtactccataccttgacgtatgcaggggctagatccataccccggcctatctgccctgtgaggaatgtatacttctgcaagtttgaatactttgacaccttgtgaggagcactctttgaaggtggagaaggtgttgttccaagggaagccagactaccaaaatgttatggttttttagcttctcaatagccggcgacagtgcatacgacctgccccgcgctggggctgtgtctgccttctcctccttcgatgccatgacactgtaaagtgaagccttcgagctaggcgcggaggccagggagatgctatgcgcccacatctaccacgccgccttcatattgctcaagctcgcgctccgcaactcctgccccatctgccgccatgagatgcccaccgatgctgccctgcgggctgccgccagcgtcggcgttgccgaacgcgccgccggggaggaacaagcgtgggatgcgccccacgcgcgcgactttcacctgcctcccaatttgatccgtgagttcaccaggaccagaacttcttcgatgatttgttggaccatccctgctgatacaaacacaatcattttgtggcaggaaatcaccatattagagcttacaaccttcgcatcaactgaagagtttgacactcatgatccaaaggagaacactttgctactcccttacttgaggaaaaggtcaaaaatcattgagatagttgcagcgcgtgatatagtctttgctctatcacagttaggagtatgtgctgcttttagtagcggtacgttcgccgaggacaagacaaaaccggatgctggtttccctctttttgactcaccatgtcaacatggcaatttcaggacccaacgtctctgcgagagaccttgggttcccttatccgaaggcaggcaccgctaagcctacagacgtggtggtgaagttctacgtcctctacgagaagtggcggaggggcgagctcctgggttcttcgtcagttgcgcggtacttgaaaagcatcactcattcgaacggtacgattattcatccttctggatcggagcgttctcttcatgcgtctgttgacgctctaagttcttgctacgtggacaaacagggcaacaagaatttccgggtgtgggtggacagactggtcacatcgccgatcggtacaagcaactggttggtgaggtttgataactgggagatggaaggtggcgttcggtactgctgccgcactactcttctgctgaataacaaggttccaaaagaactagaagtacagattggttgaacttcaaacaaatacaaaggttattagcgcatgtctacatattctattgtttggttaacaatgcagatttggtgtccttgggtgcaggcatccttgttagctgaagtatcatgttgttttgtttaaaagatcatcacaaaaacatctatgtagtacatataaagtgaaatatagttgcaacagatcagtttgaaattcatcctagatgtcaaggaagcaaaatagacaagcaggcaatctgacactattcatcatgtgacagtgacacttgtattttttattttaatctcagcataaaagatgaattctaaactgaattgttatggctacacataacttatgtgatgactttttgaaatattgtaacatgttattttagctaaagaggactatcgcacccctggatgccaaaacattggtttaatcgtaaatttgattccaaaaagatcatattactgattctctactattattatttggttagagctatgcatacaagtggtggaggcctggtggatcaaggtcgttgtcgtctccaggtccatcaaatgcgacaaggtcgagcgcacgcaattcagctccgaagtcatctcctttcaacagaaagatgcaagtaacaccaagtcacttgcctttgatggttgatacatttcactgtatatcattgcacgacagatccatttagtacctttttctgagttaaactacttcaaacattgctgaagactacaaccagcctacagttgttgtaattgaagcgggtcaagacatagcatttgcaaagatttagttcattctcatcactctgcaatattcggttcatggcctgtcttattttttcccctacaagtcatctacgacagtttgccagtagcactaaatcttttaactgtggttctctactatgtgtaatctcatatcaagattaatgagtatcgtgatcgtataattttgaatcctatcaacccatatggcaaggcaaagaaaaatgacagtggacatcattctagattttacaaaatcaaaggagcaaccagacatggctgtcatgatctaagatacttcaacgtgattggatcgaacccaaacatatgactaggagaagctccaaggccactttgtcaagggtctctgcaatgcacctactggtgcatgatttactggaggttgtgcgcatgaatgtgccacacattggtatgggggttggagttgaagcaggtgattttcaccaacattggtttgcgaactggagttgaagcaggttattcatttgatgaaagtgtgcgtataatattatctcaaatcccagtcgctgcttgaactgttttgttgtccctatggcaggagacatgattgttattcctatcatgtgcacactgcctcctcgctgtcatttgtcgtcactctcgtagtcctgataccggagcatggttgccaggggagagcagtccaaggcaaatttgccatgttggagcagtcacaggagccaaggggctgcagtcacaggtcctgctagccaggatggagcaatcataggacctcctagcagtccaaggaaaatttgcgaggtggagtagttgcaacttttgaaacccacgtgataacatgctcaagcgttcgtatgataaaaaagatggcacataatcaaaagaagatctcatgttctgcgtttgtgaacctgtttgtattttttgaacttgttttgtgaacctctatttgtaaacctgtaaaatctgaggttgtgaatagatttgggtaacttcatacaagtggtggaggcctggtggtaatcctggatgcatataaagcgaggcatgcaatatccatagcactcgtttgacagaaggcaacaccatcaaccttgtcctccacctttaaactagcatgagcaccatccttcttcacatttatattcatgtccc

SEQ ID NO: 29558 - DNA, 1566 bp, Zea Mays
agaaaacaaagcacgaccagaaccgcagaggggggacacccggactcagagagagagagaggggcattcgcccgttcgaattctctcgcctcggcctcctcctcacctgcctgctcggctgctcgccagaccaaccacagccgtcggcgctgcagaccgcggcgggcaggatcagcggaccatataattccaagaccctgatgatggccacaactgcttatatcgatgattcctgttcggaggttattgatcccccgaagactgaggtgctggatgttgctgaactccctggtgaccatactcagaacccaccaaaaccgaatgttgtggtgtctagcagtgtgcgtgaacttctggaatgtccagtctgtttgagtgccatgtatcctcctattcatcagtgctctaatggtcatacattgtgttccggatgcaaaccaagggttcataaccgttgtccaacttgtaggcatgaactgggtaacataaggtgtcttgctcttgagaaggtggctgcatctcttgaacttccatgcaagtaccagtgctttgggtgcccaggcatttatccttactacagcaagctgaagcatgagtcgcagtgccaatatagaccttatagttgtccatatgctggatctgaatgcacagttgctggtgacatcccatatttggtgaatcacttgaaagatgaccacaaagttgacatgcacaatggctgtaccttcaatcatcgctatgtaaagccaaaccctcatgaagttgagaatgccacatggatgcttacggtattcagctgctttggccagtacttctgcctacacttcgaggccttccagctgggcatgtcacccgtctacatcgccttcctgaggttcatgggagacgacgcggaagcgaagaactacagctacagcctggaggtagggggcacggggcgcaagatggtctggcagggggtgccgcggagcatcagggacagccaccggaaggtccgggacagctacgacgggctcatcatccagaggaacatggccctgttcttctcgggtggcgacaggaaggagctcaagctgcgtgtcaccgggcggatctggaaggaacaatgagcttgatgggtcagctagtacgtctgtcccgctccgctgctgccctgaactcatgaatcgcatcgcaaagagcttttgccagtcgtaggaatgggcgactctgtggttcgttctgtgttttcagcttcttctcgcttgctattgtcttcatggttcctgcagggtaggtaggtgctgttggatgtgtagatcatgtagaggttggaggttgctaccgatgcagaattcgtggagatttcctattttattgaactgtctttagagcagcttcaagagatgagctattagtgttgtcgagtaaaaaatttggatgcccttcccgcgcggaagcatctttattcccgcacgtagccaatatcggtgctgcgagtagagatggcaacggctataaacccattgtatttttgccctctcaaacccgtacatatgaaaaatatctatgcccattaaaaaacca

SEQ ID NO: 29559 - DNA, 1072 bp, Zea Mays
agcaggccctcattggccatggcaggcaatcattattttcttaataaccatccatgcatatgctaatgagaaaagcgagatggaggagctctcaatggttgcactctcaggaagcatttggttgcaggcatttgttgtgacgttggagatgaattccttcacatctgtgcaacttctggccatatggggaaacctcattgccttctatgtcctcaatttctttatcagcagtatacccacttctggaatgtacactatcatgttcggcctttgcagacaaccgtcatactggataacgctggtgttgatcagtggagttggaatgggtcctgtattggctctgaaatatttcagatatacatacagacctagcgtgatcaacattcttcagaaggccgagcgttcacgggggccaatgtacaccctgctgaatctagagtctcagttgagatcagacaaagatagtatgatggtagccggttccacagcgccagccaagaataagagctctgtttacgagccgttgctttctgactccccgatggcatccaggagatctcttgcaccagcatcttcatttgatatcttccagccagcacattctagaacatctcacccaagaaacataaaagccaattaattttttggaacaacagttaactcgtaacagtatggcataccagaatgacaaaaaaaaaagatgtcagtcgaattagatatgttgcatatttctgttaatgatttagtagatattgcccaaaaagatataacgaaaagtcatacttaatcctttatagctgttagcaaaaatgggtagtgaccatttatgttctctatggggaataaattaatttctccaatccaccagatgcaaaaaaataaacttatgtcccagtcataccaaaaagacttgcgttgtctccggacccatccaattttaaattgcgatgtgctgtcgggcccaaattatgtgttgctgctgcgttttccctttcgctttccccagtttcactcactttttgcccatcatgtggttgtcatgcaaattggaatgtttgcactaatatctcag

SEQ ID NO: 29560 - DNA, 2143 bp, Zea Mays
ggactcttctagagcctccgcatcgcaactcacaggctcgactcttccagcctccgactccgcatccgcctccccggcggagcctctcgccaccgcacagcctagatccgcccagaggagctcaatctccccctcgaggccccaaaacgagatcctctgcattcctgcatagacggctgcttcgtttgggtatgcggcgggacggggacctcggaagcgagctacaacgacgtccccccccccccccccccccccccccccccccgcaccgatcgccgccgtggccctggctcgggtggccaccaggagatctgtcctccctccctcaaacgacgcctccatctcctcgcatttccttctccttttccccttttcaaacattcaggagccgaaggtgccagccaccctttgctcggcgcgtgtcccggcgtagctcacgacgcatcctcacctgcctgcaccgagccaaggagagtcgttggctatgcgcgttagctccgctgctgggtggtcaccatcgtccgagcacaacacagtgggtaccatcctctcactgaattacttataggaagcctcatcatgtagtttgtgcgctactagggcgagatccacctgttgtgatgatgctctatggcgcacatgtttcttttttatgggaacctcttcttagtaagtgggatggagagctttggtggagtttagcaggtggtcatctgatgattaggcgacgataaggaagtttttgatgagttgctaactgctaggtttgggagtttctctcatttcaggatgcagacagattgaggattctttgtttgtagaacgccatggatgagaggctgctcatgtttgatgtggttgatgacgtgtggacagtgctaacatgattgttcgagttggatgcacacgagagccttaggtggtttggacatgtcttcgagccaagagttgaaatcttgatgggattatgttggggcagatcttaactggaatacatatacggaacccggttggcagcagaggtagtgccccggtgcgccgcgcgcaggggcacgcgacagctacaaatattcggtggaggactggcttaggaaccttggatgcaagtgagttttcaattctttgtaagagaattcgagttgtgttaatttttgctttgcagactccaaatgtcatggtggcagggtgattggaaggaaatttgttgaggtggagatggactagaccaaggctaatatcaaggggtacctgtgagggaacaggactacactggatttggctcccgtctcaagagtaaagtgtgtttcagcaacctgctagccggccaccaaaggaccaattatctatttttgttgatgttaatatattaaaatctggttatagtaaatatacataatatgctgtcatctagatcaatacacatatatgcctttgagacataaatatgtgtcatgattcaactttcatgaatagtttttctcaacgactcgcatactaatgatattagcaaattatttaaaataataaccatgatatacaacttatataaattattatgttatatttgtacattttagctaaactatttgacatctaatataattgtaagttcataagcgtagatatattttctagatatgagcttagcggtaggtaattttgcttatctattaccgtaataagcttgatgactgaggtagacatctgatttatatttaatctaactgtttctctatgtgaatggatacatatattaactcaggtagcactacaactagcaatgtatggatgaattgaaggaagtaaaagaaggcagacaatcttatagaaactctgcatattgaaaccgccatgattggcaaagaagttggatgcatctttgcattggtgtgttcttatcaccaagcagtaatgtgaagcaagttcatttgttgactaagaacggatcaacacaaattagtgaagattttgttcacaagagatgcaggatggagaggtggtagatttcaatatggctttgatactattttttccacttacaatattttgtatggaacaagaaaaaacaatgtatgtggttactattgtaattcaagaatttatttctaaataataaatatatttgtttatattttgtttatga

SEQ ID NO: 29561 - DNA, 477 bp, Zea Mays
gctggaggccggtggggctgcccataaaattgccgccgcgcaggtcacctcgtccttccgtgcgccacaatcaagcattggagctcagggttgccaacaaatcgtgagggcgtatgagggtctagagcgtagggagccgccgtgtgtgaactccgactcgtcgttagccgggtcctcggtgtggtgcccttgggcttcctctggcttgggggaaggtagatgaagccgggccgcttgaaattcattgccagcaccgactgaattgctcgtcgatcaaatcccgtcgcggaccgcaagctcccgcggccgggtccgcccacgcgtctagccgtggtgagatgtccttctcgtgtcttgcaatgccttactctatattttgcagccattggcgtgggtctttgggcgagaaaatggggtagcgttgtgccccggcgggtacgccgccgtgcacacagggcaccaccggccggagtcagg

SEQ ID NO: 29562 - DNA, 1559 bp, Zea Mays
tacccaacttcttaagtacgtaaaaaagagatccttctccttcatgaccaatcagatggctaatgtacttgcaagggccttctttgtaacaacggatattgggagtgattggaaataagattctcaaagtgtgcccttgtttaatgggaactgctttgacaaggacctgcaagggaacaacttgcataaacaagtgcacaagcatctgtagctgcaagtctcctttgtaaactcatatcctgtaaatagcaaacctggagatgttcaggtgtacatggatgaccaggaaatgaaaatggcttcctcccaacatctctaatatcgcaaaacttattttcaacaaggttctgcaggttatcaaggctatctgcaaaatacaaaagatatgagaagcaaaacaaccaaaaaaaagttttaacagcatataacttgtaaggaaatacagaacagtttgatggagaaccttttccatacacaacgagttgcatcaagttagctgagtagtgtgaatcataaaatttaataagctcaagccttgtgtccaatcctttctcctttgctttaacttcaagtgtgttccaatttcctaatcaataagaattctgaatatcagttctaaggaattgtccaatatttcaagcaagcagtgagaatcagttccaagaaattgtccattatttcaagcaagcagtgaaaataagttctaaagatttccaatatttcaagcaagcagtgaagcatatatcataaaagaactctttattacattgaaacatcatttattgttgaagcaaagagatatcatgtcaaaatgaaatttaataagctcaagccttgtgtccaattttatttctatcactatcaaaaactgaaataaaaggtttctgtaaacaaccagtatgaatgctaaaataaagagatgtcatgtcattcaaagaaatataaaattagataggaaatgagcagtgtattctaaatgtcattaatcgtatgtaatgtaagaacagaaaggaaagggaaaaaatgttcagaaaacaaccagtgctaaacttatgataaggatgattctctgcacaaagatgcttctgaagctgaaaacaagaaagaacagatacaaataaaatcagatctctataattaacttgtctgattatttaacatgagcttggaaaatgcaagtacctgactcattcgccaaggatctgacaagaggtttttctgattttctaaaaatgaaaaatggaagttagaaaattaaagtgtcattccagtaacagcaacagaaaaaacaaaaagatatcacataccagagtcaacagcttttatttccctaagtgtagcatctggggacatcaatggcttgataaaaaattgggcaaacctaagattagatggcacaagcataagtgaaatttctcacaaggaaaataaggttaaaaaataaagaatgcaacaggacgtacctatctaaagcatcgtgcaggctatcactgttcacatcaaaatagaagtttgtgtgttcagaagatgtgaaagcattcgttgaaccaccatgctac

SEQ ID NO: 29563 - DNA, 1438 bp, Zea Mays
aaaggcgtttgtttgtttttttctctcctcgctgtgggacataaaaaggaatgggcctgcactctgcgccaccaacagtggttcagatggatggaaagaaaaaaactcatcgccatcttttccgagcctttttcgtacggcttttatcattgctcggcggccaccaaggccattgccgcctcgaaaccataacttatccccccccccaccacccggccaccccgttggtagtggtagagacgacaaaagctcgggggattagctcgcgagctaaccaatcagggccgtcaaagccgccagagattccatctcgtttggcctctcgtggtgtcatatggggatgggaaatcctgcgctcgctacgctcggcctatgcctgcctgcctgcagcgtcgccatttcaccacttgtgcaaagctagctgatcctgtggccctggaccacacacacactgctcgctcactcccctgcattggatggcatagaaaatgggggcaggcagatgcagtgcccatcctgccagtttaaccgcacatgagatttagaaccccccagctgctgaattcgatggcgaagcaagctttgttttccccgtaacaataataaactactagtgcttattattcacgagcttgatgacaaggaaggggtggtcagcgatcgcggcgcagctgccggggcgcaccgacaacgagatcaagaacgtgtggcacacccacatcaagaagcgcctggaggacggccacggggaggagaagaaggcgcgcaaaggcaagcccgccgccaagaaggccgccgacgccgtgggccgcagcagcgagcacgggccgttcctgaccgcgtcgccggggctgtcgagcagcggcgtcacgttctccgccgcggcggactccgccgcggccgtgtcgtcgtcggccgacaacgcggccaccaccagccaccacccgcagcaggtcggcgccagcaaggcggagtcgtcgacggagttggacagcggcctcagctccgccgagttcccgcccctcgacgacagcttctggtcgtcggcggacgtcgtggacatgggcctcggcgccacggacgaggagctgggcctcgcgtgcccgccgccgctgtcgtcgtcgtccaccagggacgaggacatggagttctggctcaacatgctgctggaggccggcgacatgagggacttgagcgtcttgtaactaggatgcaggatcggaagcctcaggcgcctgctatatctgaggactagagcatcgcatcttctttcttttttcttgtcatcttgttgccctgttttctggtgatgagaaaatgctgagaaactcggtcgggtgattttcaccttccgcacaagaaagaatactagcatcaaccattttgttcgttcttccgttggcttcggtagattggaccgaattgagtgggattaaat

SEQ ID NO: 29564 - DNA, 1667 bp, Zea Mays
aaccacataccaaccattgaacatcttctgtggccagccggcatccgtgcagccgccagcaccagcaggccatgacatggcaccatgtttgagctgacagctgactagctgagcgtgccgccttgccgtgtcggggagctgagctgagcctagagacgccaaacggaatggcgaaagcgaccggccgcgcggcgggcagcaggagctgcatcgagaggctgcctgcgccccgcgcccaatcctcttcctaaatcctaatcccctccgcctcatccccttcaaccccacgtctctctcgccgaaggctccggcctcgtcgggatccggtgctggattgacgcaatggcgccgctccacgccgcgctgccgccgccctcctccgccgccgctcaccaccacgcggcagccccgcctgtcttcctcgcccgctcgccgtaccacccccgcagggcggcggcctcctgcccgctcgccgtcgctgccgctccctcgtcgagaaaaggatcggctacaccagtgagaagatcaccgagtccatcgaccgctggcttctcgccggggctagggtggcgcgcctcttccgcctcaacgagctccagctgtcggacgccgagaaggcccggatataccacttctacatccccgtcttcctctggtgcgaggacgaggtcatggtgcacagagccaggtacaacgacggcgatgacatcccgccattggtgatcggggtcagcgctccccaaggaagtgggaagacgactcttgtgttcgcacttgattatctttttcgggttgctggtaggaattctgccacattgtctatagacgacttctatctgacagcaaaagaacagaatgaattgagggacagaaatcctgcaaatgctcttttagagttccgcgggaatgctggaagccacgatctccaactctcagtggaaacactcgagtcactgatcaagctaacgaaggaaggtatgaagatgaaggttccacggtatgacaagtctgcgtttgggggaaggggtgaccgggctgatccttctgtatggccagaggttgaagggcccttagaggttgttctgttcgaaggatggatgcttggatttaaacctcttccaaatgaagttgtgaaagaagtggatccacagctggaggtggttaacaagaaccttgaagcatactctgatgcttgggacaggttcatccagtcatggattgttattaaaataagagaacccggtagcgtttaccagtggagactgcaggcagaggtcgctatgagagcagatggaaagcctggaatgtctgatgaggaggttatggattttgtatcacgctacctaccggcataccatgcatatctgccaacactgtacaaagaggggccgaatggttcgaatccagatcatctgctggtcatcgacatagacgaaaataggaaccctatctgtggtggatcatgggacatctcatgtttgtgaaactacttttatgatgggccgtcaaacaccactggcctcttgttgccctacactctggtagtgtaaatctgtgaattccatgtaaatatgaatttcgcttcttaaggcactttttaatctggcatggtctttagcttgaacatcggccataagtttcttatgatatatgtcggtacccactcc

SEQ ID NO: 29565 - DNA, 1205 bp, Zea Mays
caacaacatttttttgacactcgtccaaattgagaacttgggaagttgctgcacaagttgttaaagacgaagaggatgctaagcagaaattatgtgatgacctaaaccatctagtccaggagagtgctgcttcccaatatgcaagattggaggagctgaagaaacgtttagaatctctaaatcccataagggattctgttaatgtgtcagtaagtgaataaccccaaggccatagatctgatgtttcatctttgaaattatttatttctcactgtcagtatttctgctttagtattaacaggaacgagtcttattgattatatgtttcctgtttgctagtagacattagttcttttgttgttttctgagcagataatgttggttttggtctcaactagtatgtgtatgttccgtattattgtctcaccttttcttgtatcagggtgtttatactgcacagcatgctactctgaattcagtacctcagcaaccaactgcacaaaatcctgcagatgtaactggccgtcagaatattgccacaaagcctgcttctatgcaacagcagcctatacctgcggaggcagaaaagaagagaagaccctcgaattcggcaagagggaggggtggtgtcatgatccttccgaagggaagagagggttctgggtcaggatggacaggtgctgggtttgatgtagatagccgtacatgacgcccggtatttcaagttattcgtaccattgaaaccatgctctccaaaattcacaagaattagattggtcaccaaaaaaaaaaattcagagccattccagaattctaatgtgaggaaggtgtacgtttgatcatttgttcatccattgtatatgaatcatgcactaaattaatcaaagttttaacatatatattcaaaggctagaaatctgaacctaagtatgagcacccgatagggcatgttgtcgtagggtgtgtttgactatggtacatctggatgaacggatgtatgctaagttgaattgtattttaataaaaggtgtttgatgcggatgtatgagtggatgtaaaaaaatacagagattatttggttgtatgagtcaatgcaatttgttgggcttgtgagaccgagtgtgatcctataccacaacactgcatcaccagaactggctagcaattaaagctgaaatcgagtgcatgatcggatacagtgggcg

SEQ ID NO: 29566 - DNA, 2057 bp, Zea Mays
gtcaaactcgctgccacgtcggtccgaaccaaatccagcaccctgcaccctcttcctccatcgcaccctatcctcctcctccccggtccggcggtccccaccggtccaccacggcaccaccgtctccccgccccccgcgtccgatcaccgcaccggcgaactcggcgagccgctcgtcgctgcacgctaagctgggaatggccgctgcgctcgccagctcaccgcttgttcacctatccacctcccgcctccgcctccccaggccccgggcctcctccagttccgctccaggctgctcgatcggcgtgtgcttgggatggaggctgaaggtcgggtggagggctctgaggcggtgcgaccggcttcgatgcttctccaccgacggcgacggcgtggaggagggggagaagcgtggcgaggaggaggcctcggcgacggcggccccggccccggacccagccccagcggagacacaggtgggcgctgcggaggagctggcgtctgagcggagccgatcagggagcttttcgtcctcatcctcgtccgggaatcctggtgtatcaagcgagccaccactgttgagttttagtgttgataatatcgatacagttaaactattggaacttctaggcccggaaaaggttgacccagttgatgtcatggcaattaaggaaaaactctttggttatacgacattctggttgacaaaagaagagccttttggtgatctcggtgaaggagtccttttcattgggaatctccgtgggaagagggaggaaatctttgcaaaacttcaaaggcaactacgcgaacttgctggtgaaaaatacaatctttttatggtggaggaacccaattcagaaggggatgacccacgtgggggaccacgtgttagttttggtttgcttaggaaggaagtttctgagcctggacctactaccctatggcagtatgtcatttctctgtcacttttccttctcactatgttctcctgtgttgagctaggaattgcatcaaagattagcagtcttccaccagaaattgtttcatatttcactgatccaaattctactggaccccctcctgatatgcaacttctgctcccatttgtggaatcggctttgccagtggcttacggtgtcttggctatccaattatttcatgaaattggacactttttggcagcatttccaaaaaatgtgaaactaggcattcctttctttattccgaacttcacccttggaacttttggtgcaattactcaggcttattactctcttcaaatcctgttggggcaagtgatttagtagaagtacctagccagctgttccagggttcattattgcttggactcattagtagagcaacacttggatacagagctatgcatgctgctacagtttcgatccaccctctagtgattgcaggctggtgtggtttaactactactgcatttaatatgcttcctgttggatgtcttgatggtggaagagcattacagggtgcttttggcaaggatgctttgtttggatttggcctcacaacatactcgttgcttggactaggagtgcttggaggaccactgtctcttccttggggtttgtacgtgctaatttgccagagaacaccggagaaaccatgcttgaacgacgtaagcgatattggaggttggaggaggacggccttgatagcttcagtgtttcttgttgttttgactctcatcccgttgtgggatgaactcgcggaggaactaggtgtagggcttgttacttcgttctgagatacggtccttaccgatagaattaggccgtgatgtagctcaattttgtattgaaatgtagcgtcccatagcgggactgctgtaaaggcatgtgcagtttcctgattaggtgagcaatgatatcacctatgcgagtgtcatgaaattgtgccaagacgctgacgattattatcaattacatacatgtacgcacattttgaccatacgagtacagatacacacaacctacccttctatgagcatcttcaaacgattgggcgtgaagccatgaagtcag

SEQ ID NO: 29567 - DNA, 1770 bp, Zea Mays
ctcctctctctgcccccgctctcccgtttctctctctctctcaaccccacgtcacgccgtccccccctctctgccattattgcccgcgcagccatcctctctctccctctcgtcgcccccgctcacagtgtgatttatggggacgtccggctcctcgcttcctcatccagacctcccaccacctcctccgcatcctctcgccctgcttccgtcgggcgcgcgaacgcgagcttgtccgccacacccgcctcccaccactcgctcctcgacattccgcttctctagtcccgaacaccggccgggactcgttagccgggtgtgcgccggtacggtgtgggaggtactctgctagcctccgctagtacatgtgaggtccatgggggaggaggtggcggtggtgctggagccaccacggcccaagtcgccgccgaggtacccggacctgtgcggccgccggcggtcgcagctggagctgcagatgctcaaccgcgagatcgaattcctcaaggacgagctacaattacttgaaggagttccaccagtttctagaagttgtaaagaggtaaatgactttgttggtactaaacaagacccactaataccgataacgaagaagacacacagatcatgccgtcttttttggtggatcagatcaaaactgtgcatatgcgtgccatggttctgctgttcctgccattgcatgcccaactgcaaaaggccatgcttcttggattgctcctgctgctcatgcccagatctgtcatgctgctatcccagctgcaaatcatgcaacaaaccatgctttgggcccaacagctgctcatgttgcgacatatcatgccgcaagccagattgcccatcctgtacctcgagctgcagctcgtgctgcaatcggccatgtggcaacccagactgcagctcgtgctgcacctgcaatccatcatgctgtaaaccaagctgcaactcgtgctgcagaccaaactgtagctcgtgctgcaatctgtcatgctgcaaacccagctgcagctcatgcttctcatgctgtaaagcgaactccagctcatgctgtaaacccaaatgcagctgcttcaaggccctctcgtgctgcaaattacagtgcagcccaaactgctgcacttgcagtctcccgagctgctcaggctgcaacccctgcggcagttgcaagcaatgctgctcatgccccagcgactgctttgattgcaagccaaactgcggctgtttcggcgcgcaatgctgcagctgcgtgggatgctgctcgtgctcctgccctcggtgctcaagctgcttcggttgcttcaagtacttcaagtgctccaacctgttcgggtgctgctcctgcaagcagtgcttcaagtgccagtcctcgtgctgcaagggggcgccgtcctgctgcaaatgccagtcgtcgtgctgtgagggtgaagacggcagcagcagctgctggaggtcatgctgcagcgttccgaagccggattgccctgggtgttcgtgcgggtgcgtttggtcctgcaggaagtgtacagaagggtgccgatgttctgggtgccgcaaaccatgctgtgccaccggatgcttgtgctgaagttgaactagacgttttcttgtttttttttatttgcgtgtgctatttagatgcctgttggcttcgttcgtgcttttgctatatggtgtagcgtccttgcctgtaaagaaatcccatatcaccagaagaatttgagacgtcaacagtcatcaagtactataaaattt

SEQ ID NO: 29568 - DNA, 2094 bp, Zea Mays
gcggccgggcgagcgagctgccacgtcagcgcgacggtgatcttcccccggtaacgccgcctcctcgcccaacccggcctagggcggacgattaaaattaacctaacaccgggttaaagcctccgcgctccgccccccggaatcggaccaaagccgggcatacgcccccaagtccaaaagccctctccgccccgctctcccactcgtaggtgttctccccgtctccgcccgcactcgctcgtccgcgcgcaggaaggttgacctgtcgagggccggcgaacccgagtgaaaatggatggaagtagtaaagggagtgggcattctgaagcattaaggaactacaacctgggaagaactttaggtatcggtacatttggaaaagtgaagattgcagagcataagcttactggacatagggttgctataaagatcatcaactgccgccaaatgagaaatatggaaatggaagagaaagcaaagagagaattcaagatattgaagttgttcattcacccccatatcattcggctttatgaggtcatatacacacctacagatatatatgttgtgatggaatattgtaagtatggcgagttatttgattacattgttgagaaaggcagattacaggaagatgaagctcgtcgaatcttccagcagatcatatctggcgtcgaatactgccatagaaacatggttgtccaccgtgacctaaagccggaaaacttgttacttgattcaaagtataatgtaaaacttgcggattttggtctgagcaatgtcatgcatgatggccattttctgaagactagctgtgggagtccgaactatgctgctccagaggtaatatctggtaaactatatgctggacctgaggtcgatgtatggagttgtggggtgattctttatgctcttctttgtggaactcttccatttgatgatgagaatattcccaatctgttcaaaaaaattaagggaggtatctacacacttccaagtcatttgtctgctttggccagggatttgatcccacgaatgcttgttgttgagcctatgaagagaatcacaattagggaaattcgggagcatcaatggttccagattcgccttccacgttacttggcagtgcctccaccagatacgacacaacaagccaaaatgattgatgaagatacacttcgagatgttgttaatatgggatttaacaagaaccatgtgtgtgaatcactgtgcagcagacttcaaaatgaggcaactgttgcatattatttactattggacaatcggtttagagcaactagtggctatcttggggcagattatcaagaatcaatggacaggaatttaaatcagctggcgtcatctgaatcatctagttctggtacgaggaattatgttccaggaagcagtgatcctcatagcagtggtttgcggccatattatcctgttgaaagaaaatgggcgcttggacttcagtctcgggcccaccctcgtgaaataatggttgaggtcttaaaagcacttcaagaattaaacgtcagatggaagaagaatgggcactacaacgtgaaatgcagatggtgcccagggtttcctgaagttaatgacacgttagatgccagcaacagctttcttggtgactctaccatcatggataatgatgatgctaatgggaggctacctactgtgatcaagtttgaattccagctttacaagacgaaggacgacaagtacctcttagatatgcagagagttactggacctcagctgctcttccttgacttctgtgcggccttccttaccaagcttagggttctatagtggtctaccatgtgcaaattttcactgtggtgatgaataaccgaaagcatgtaaataggaaccttgttctcgtcttttggacaacgaacatgtttgagtgactggtcttgtgttgagcgcgtaaagttcatttttgaactaaaacgttacgaataaaaaaagagtatattactgtctgcatggacatggctgtttcagtaggccgtggcaccgcagatggcgatgctcactgcaacctattatgaaaaaaaatgcaagattcaacttttgttc

SEQ ID NO: 29569 - DNA, 2128 bp, Zea Mays
ttttctcttctttattaatgtttttatcctaaatactttctcaaatatcgaaattttttccctaattttaactatatttaaggcgtcgccttgccttactccttattgcttaaaaggtaaaaaaggggtcagtcgccttacctcgccttaccgctttaacaactatgcaatcaaccaatccttaacatgtacatatgccatgacgtgaagcaatataattgtctaattgtcttctgcgaaggggcctggtcatatcatgagaaatgtttccaacctccctcacatgtcagccaagtggtatcttctaactacaggctggattggctttctaagtgcagagacttgttgctggtgactttgccccttttatctggacttaggaatggcaatactcagcttctgctgggaatttgctgggtatatcggctacaaactgtcaagccatcttaagtcttatcaagtgatagcatgcatatcggtcttctcgctgcagctgttcatgccgtttaaacaattagtcggcttacaattttctacagcccaaggcaagcccttcagattttgtcataccgcttgcaaagtctgttaagactgtatactataccagtgtatctgtggggatgtgtttcaagatgctttttgagacaggagagtctagcgtgaggagataagttcaaatctgtttgcaacatcacctcgttattgaagtgggagaaacgaaagacgactagtctttttcgtggtctcgatccacattctattccagcagaagaactgtcggcatctttgaggtacacgctacattccatcaatattgcagtccgtatcctatccacgattgttcttcatggatcaggctttaaggtaagataaaaatctactgtttgaatcatgcataataagatgtataaatgcattgccacattatcagctttgattggttagtcctagatttataatagtctgtcttgtgaatttaactattttgattgatcaagggtatctgtttgactcattaagcacttcgttaatggggatctatatgtggcacattcacatgctttaaattcttcaagttatacttgtttggatttgtgatgcacatgagtagcagcatgaactttcaattggcgcctggttgattcatcgctaacttattttaactgtagtatggttcatgctcaaatatatggcagcagagttcctactgaagtatatgacagtcccagagcaaggtttaccctctttttatacctaggaaaaatgtttgcacaggtggtgaagaaaccccattgacagaaagtggttcgagttactttggagctgactctggattctgtcaagaaacagtcttttggttccaagagaagcaatagttttagtttctctggtgcatcttctcactccatggagaggcatcgatatttgcagagaggaatgttgtcgtcatcaaaggcccttcgaactgcttttgaatcgaacattgcttcaaggtcagaaaagcaagcgcagccgctaaacagattgatttgaagtgaagttcagccgtatcatcagacatcatgcacacaaccatcatggtaaattcctgttcagcacgcacagtaggtctccgtgtgctctgtacggcctagtgctgctgcgctagctggttgggtgcgtccgtgcgtggacgcgctgtagcaaccagggcacccctgtccatggtcgcgatcgcggcctccgctggcctggcccttggcgtgtgcggggcgtagagacggaggagaatgttgtactatgtgcgggcgcggcgagcgaagccggctggaccagaccagaccacaccagggccagagccagggccacgtggcattggctcggcgtagagaacgtcctcccaatatctatgaatttactacaatatacgtctcattatttttagattcatatatgtatccatcacgggggcctccggcctcgttatagcaagtatgggctgactgtaatataatatccaactccgattcaaaactgtaatgtttattacaaaatttgacttagaagtagtgtctaaaaagtggcatggcaattggcatttggcaagtacaatatgcttgcatttttacgaaggcaaggcagagaattc

SEQ ID NO: 29570 - DNA, 1420 bp, Zea Mays
gccgccgctaggaaacgacgtctcgtctcgtgccttcaatctctccttttgccgtcgtcctgtgtttatcgcttgatttcctctgttatcccgctttcttcctctgtaagggcaaatgatgatgcaaagtcatgcaccactctgaatgaggggattatcctctctttgggctgacaaacggacttctacccatttttcgtctgagccttgtgattacatccgatttctttattgtctccctggcttttcttttttcttgctgcttactgtgacactgatcttattgcgtttgattaatggagctgtggagtgatctcggagaactagatgatgtgggtctgccgatccaaccatgatgcggactgaattttatttgaggtcaaatgtaatggattctgatggttctcgagtttatctcccttctgacattggcatatttctttcttccctcgaatgggtcatggagcgaaaattagtgcggctttgtttttgatctcttgctttcaattggtttgttggttagaaagctcaaagaaacaggtgatgaagccaatttgcagagcaaaggggccagataagtggcaatctttgcattgaaggttggccacaacgaaactgcagttctccgtgccgctcagatttctctgttttgtgacggcctcgaacaagctgccacattatcatatcttatatgttatccattttgttttggtttttatcttcttcgtatcgtgtctccagttaaaagctacggaaactaacatgaactacataatacatatgtacagtatgtagcgcatatcgcatgacaaccgaacactacatgccacagatgaaagacagatagtgtcagtaaagaaacagacggtaaagccaatttgcagagcaaaggggccagataagtggcgatctttgcattgaaggttggccacaacgaactgcagttctccgtgccgctcagatttctctgttttgtgacggcctcgaacaatctgctacatggtctcttatctgtgatccaatttggtttttggtcttttttccatcctagttaaaatcaaacatgatgaactatactaaacattacgtgtcgcatgacattggctttgaagcggcagttttaacagatgaattactgctcatcattaaagaacgagttaatatcagtaaagaaccgagtggataaatcagagcagatcagtaaagaacggttaactagggcccgttccaatcgcaactgctctttggtgcctagtaccgcagtgtggtatttaattatggttgaacggtatttgattatggttgaactgaagaggtgattgttatcgatctatgagtttgagaatgattatgcacacattgaaacattgattttcaagaatctacaactgaacaaaacataccctaatatgctgtatca

SEQ ID NO: 29571 - DNA, 852 bp, Zea Mays
gctgcggctgtggagtgccccctacagcccccatgcaaggggagggggatactgagggggctgcgttgcgtacagcctgacaggctctccttcgcatttgcgcgggacagaaatgacttgccgaggatggaagcagagagacggatttggccgagcgcacagcagctcgccaaagacggcgtcgaagcagcagtgaccgcggtcgagtgagggagtcatcctggattcgcggtttatcgactcggcacgggggcaaccatggcgttgaaggtaggcaacatgaggagccatcgattgacaccggtcttcggaatcggcggatctcgacgatggtgacaaggaggaggccacgaagcgtcgtcgagcagagcgcgacaagcaaatcgagtcggccacgagcgtggatttggatctgacccccaagtttttgtatggatcctattccccaatttgtagatcttcaatttccttactttaattttccatagcacaaacgatgtttgcatgcacgattcggacaatcttgacttgttcgtccacggttggagtttagggttggaatgtgtaaaacacgtgataaactgtgtacaactcgagaactagataattcattttggattgtaatatgtgtacctcatgctatagttttggttaaatctgacgtgaatctgtttggaattgaaaaacaagtgcttccttttatacaccactatgtcgcttcaatgtttgcgaaccaaggtaaagaaatgtaaaatcttacaatttccgtgcatccgacataaatctgtggtcacatagctattgttaaacggttgcaaatcctaaggaggaccattattgtgcaacaactac

SEQ ID NO: 29572 - DNA, 1442 bp, Zea Mays
ataacctttctttctctcctctcgcttctgcggcgaattttcttgtcccgtgccggccgccgtgtctaccctgcgccaccgccccttccaacgcctgccgtgaagacaaaaggtcttggttaagtttgaagatgtcgtgcttggcatgctgtggcggcgaagatactcaaagaacacctgataatggaggtccataccctggtggctacccaccaagggatgatgcttatcgcacagctgatccaactccgaggggtgctcaacctttgaaaatgcagccaatcactgtccccactattcctgtagaagaaattagggaggtcacagtggcttttggtgatgaagctttgattggtgaggggtcttttggcagagtatattttggtgtactaaaaaatggtaggagtgcagcgataaaaaagttagattcaagcaagcagccagagcaagagtttttggcacaggtatccatggtgtcaaggcttaagcatggcaatgtcgtagagttgcttggttactgtgttgatggaaacacccgcatccttgcatatgaatttgctactatgggttctcttcacgatatgcttcatggacgcaaaggtgtgaaaggagctcagcctggtccagtcctgtcctggacacaacgagtgaagattgctgttggagcagcaaaaggccttgagtatcttcatgagaaagcgcagcctcatattatacacagggacatcaagtccagtaatgttcttctatttgatgacgacgtatctaaaatagctgattttgatttgtcaaaccaagctccggatatggcagctcgacttcattcgaccagagttcttggaacatttggctatcatgcacctgagtatgcaatgactggacaacttagctctaagagtgacgtttacagttttggagttgttcttctggagctcctgactggaagaaagcctgtggatcatacattaccaagaggacagcaaagtcttgtgacatgggcaactccacggctttgtgaagataaagttaggcaatgcgttgattcaagacttggagtagaatatcctcctaaatccgttgcaaagtttgcagctgttgctgcactgtgtgtgcaatatgaagctgactttcgacccaacatgagcatcgtggtgaaggcgcttcagcccctgctgaatgcacgtgcatccaacaaccctggatgaatgaatgaatgactgccgttgcttttccctgacgagagtatctgaatcagacaacatgtagcattgaattcagataaatatagtgtttggcttaatacacttggccctagatgttcatcaggagataacctcttgcagtttctggatgttacctagtctttgtatccctaaactgtaacctattgttcggttgcgttccatctggtgttgtttacatccaccatccatgaagtcaag

SEQ ID NO: 29573 - DNA, 1763 bp, Zea Mays
cctcttcctcctctactgggatcaaatgtgcggtgatagagaagaatgtggagttcactaggcacccacgagcgcacttcatcaacaaccgcacaatggagattttgacaaggtcattagtcctgtatccgttgcacatttctcacagtacaagttagttgatttgctactcaagaagcttgaaggtattggtttccagacatgctttcccagtgagattggtaactcaacacaagatttggtactggaaagcaagatattgatgggacacaagtgcacatcccttgatcagactgatgagggcattctggttggagcatcagttaacaatggagggatgataatagagagaaagctacactgtggtcttcttatagggacagatggcgcaagaagtacagtgcgtgaattggcaggtatatctatggaaggtgaaagggatttgcagaaactggtcagtgtgcattttcttagcagagatctaggcaggtatttgtccagtcagaggccagggatgctgttcttcatttttaatccaggtgcaattggtgtactagttgcacatgacctagagaatggggaatttgtattgcaggttccattttatcctcctcagcagatgtttgaagattttagtgctaaggtatgcgagcaaattattttcaaattagtcggatgggagccagcagatgttcatgttttagacataaaaccatgggcaatgcatgctgaagttgcagagaagtacatctgctgcaataatcgagaatgaacaccggtgtccaggatgtacataatttggcttggaaattgggcttactgctgaatggtgtcgcctcaccatcaatattacaaacttatgagtcagagcgccggcctgttagaatcttctcacacgctttctgttcatccaatgtatatttctccactattaaattacaaaattagcttagtgtgatacaattgcttgcttattgcaggttgcaattttcaataccgaacttagcgtggagaatttcaaggcagctatgtctattcctacaacccttggccttgatccaactgttgcaaactcagtgcatcaagttataaatagaagcctcggatcaatcattccaagaaatgtgcagaaggcagttctagaaggattgttttctcttggtagggcacaagtctcagactatatcctgaatgagaaaaatcccattgggtcgttgagactagcaagattgagaagtattctcgatgaaggcaaaagtcttcagctgcagttccctgcagaggatcttggcttccactatgcagaaggtgctctagttgttgaagctagttgtgagaagactcatgaaggagaaaaactacagcattctaagagggcatcaagagagtacatcccatctgctaaggttggttcgcggcttccccacatgctagtaagagaagtgcctgcttcgagtgagggcgcgttctcaacactggacctagtgagtggggataaactcgagtttgttctcatcattgcaccagtgaaagagtcatatgagattgcccgtgccaccctcaagatagcagatgagcttacgctatcagccagagtatgtgtaatgtggccacgaggttcgactgatgctgaagtggaagagagcagatccgagttgacaccctggacaaactacatcgatgtcgaggaagtgcctagggtgtcgggtggttcatggtgggagatgtgtcgtattagtaggaagagtttttttttaaaaaaa

SEQ ID NO: 29574 - DNA, 1359 bp, Zea Mays
gttatttctaactattaagtgttaattatctaatgtatttaatgaagtaacacagttagacttgcctaaagaggccagtgaagcttcactggctgcatagagaagtacttttttattatcatgtaaatgcatggttctttggaaccatttggcctatctgattaattattactataaccgggaatgggggcccgaggctataacccggactcctcgccctcgtacctcgttgctggcgaagagcgtcatcaatggcgagtggaggttcactacacagccgccggatcttggagcatcattcgcggtcttggcgcgtctacgcaactgtatcctaagggcgtcgaagaggagagacggtacgccggtggcgacaaggtacgatagatttgaactggagtgtggaggtatcgtcggccagtgccatcagcgatgggtggaggtttccgtcgagtcgaggaaggagcgcttcgtgtaaagatgttgtttgtttattgttattatcttatcggaagtgccgtcaaggaagatgacgatggtggtagggatcgacgatagcgagcacaacttctacacgctgaagtgggcgcactgcagcacttcttcccgccgaccaagctgcaacactactgccttgttgtcgtcaccgccaagccctctgtcgcctccattgttcgccctgccaacctagggggtcaatgcttactttagctgtgcaataattcctcaatattaaaccgagtttgatcaagtaccttgaagctacaagtagcagtgatttgacaggtttactactgcctgaaacatgattgtaagtgttcttagtatatagctcttctccatttcctctccaactgtcacatgtgctcatacgcttttgccttagtttattacatgtccagaacaccaacataaagaaaacctgccctcgattagcattattcagtagagagagttgtggagaaataaagttaatttgtttgttggcgcaactaattagaccacgttttcattaacaataatactaacatgtttttgttgtagggagggcacattgtggcggctacgagagaccgattttcctgtgtggtggtgacaacgacaccgtggagccaagtcaatgtcggcaagctgatttttcagattggaacctatggttctttttaaagatcgaatatgttctagcatctttaaaagatttgtcagaatgtaaacatttgttttgaggtcatttaagcctcaaacaaaatttcttggacttatttcgttggagggaacgagacatctcgagatctaaatgtgtatagaacatatattttttatgggtatcaaatataattgtgtgtaaagcacgtacatagt

SEQ ID NO: 29575 - DNA, 325 bp, Zea Mays
ctaaccacaggtccacctcgtcgcagcttcaaaagaggacaggcccctggttcttccccaagtcgcgcgcacctcgcatcccttggccacaccaaatccgaccctgagccacaccagtaaagctctgtgtgcttgtcgcggacagcagtgatagaaagcgaggagagagggactgggggaagccgcctccgtcgttcatcgtccacaatgccgatggggcctggggtcaattgctcgccggtgaagatgcttcgtcgggggaccgcaccgatccgcggatggggtatcgccacgctatgcactgctcggatgggcacgtcaccgg

SEQ ID NO: 29576 - DNA, 2831 bp, Zea Mays
ttcggatgctggagcatgagccaagctaatttgagtattttcataacggtgataggttcaccttcacccctaatgatccacgatcggcaatgaagttcaatgttgatttccgaaccatcaaaggtcacaagttcaataaagtagagggtaacaaagcagcattattgaacctttcaaaagaagacaaggctggaggctacatatttgagtttgacaatgttggtaaccgtgaccaatgtcgagactttgtagctagggttttaggcaaacatcaagggatagtgcctcctagaccaactgtggctcctgaaaactcagttgcttctgctgctctggaacaactcagtgccgcagaagtggagagacgggttaaactgttgcgagaagacagcgaattgcagaaattacataagaagtttgttcttggaaatattctgcaagaatctgaattttgggcaacaagaaagaatttacttgatgatgaagcaaataagagatcaaaacaaaagccaggtttcaagagtgcacttgtagatattaggccaacaactgatggtcggacaaacaaggttactttccagatcacacctgagatgatacatcaggtccacctttccactctgcttctttatcatgaactaatacatatatactgcttggtatcatcaatttttctgttgtctcaactgttataattgcaaaatttatatactatgctgtaaaatgaaaaagtacgtcattttgtgggttatggagtttctgaacattgttgttggtaaaaggcttccaaagatttttttaatctgtatatgaatgtgtagcaagccctgtaccttctctgtctccttagtagctttcatgcatgatgcagtgatcctctattgaactatttttatatcttgaaattatagttttcattgtgtgcatgtgactttgatgcgaccaaagggaattaatgagcaggaacactgaaaattatgcttccaccctagccagttaggttaggcttagtccatagctgcaaagaccatcttacttgctttgaaccctacctgcgctgggccctgtttgctcaagaatactccattatgcctgaggcatatattattcatggaaacaggtgctgaattctatgattctatatctgatgtactttcaacttgttaacaccatatatcctattttacagatttttgcagaaaagcctgctgtccgtagagcatatttagattttgttccaaaaaagatgtcagaaacccgattttgggaaaaatactgtagagctgagtatctagtcaggacaaaaaacactgcagcagcaacagctgaggcagctggagatgaggaattagctatcttcctgaagaatgatgatatactggccaaggaggcaaagttgaagataaaacgagtcgatccaacattagacatggaggcagacactggagatgattacattcatcttccggaccatgggattcaccgtgatggtagcaaagagacagtcgatgctgacagtgagttggcgaggaggacgctgtctcaggacctgaaccgtcatgcagctgttgttcttgaagggagatctcttgatgttgagtcaactgatccaaagactttagctgaagcccttgcaagatccaagaaagaaccaccttctacttctaatgttgatgatgataatcatgagagactaatgaaggtggctagaatgacagagatagaggatctgcaagctccacgaagtcttctgtatgcaccactttgtataaaggatcctagagaatattttgattcccaacaagcaaatgctctgagatctctaggtggcagcaatggtggaagaaaagcccatagttgcagcttgagcactgaagaagtgttccatcatttaatggatcaaatgtcttctgttaaagttaataggcttaactgtccgattgttcagtctgatatggctcttaaggaaatcctaactacctaaatggtatgggcctaggttcttaatgaattaaacgaagggatttctcgttcaaggagacttaacctcaagaatcctcaagaaggtctccttggtcagctgcctcaacatacacgggacgagcttatggatcattggacggctatccaggaattgctacgccatttttggtcatcgtatccaataacaagtgcagtactttataacaaggttcaaagagttaaagaagctatgacacagatatatcaaaagctgcagcttataaaggaattggcacagcctgatgtaagacatgaaatatctcggctagtaaagcccatgactcaggccttggatgccgccttcaaccatgatttggaacagcagcagaaatcgtccaaggccggaaacaggcacaacgggttttgagcctaggagattggtttgaccaacacatgaagcgagacggacggacgggctgtgcccgaatacacaagagctgctgcagaattcttgaggcttgtacgattttgttcttttccccctcgcttattaatagctgccggaggagcctgctgtttgcagccccggaatcttgatctatgcatcaattgtttgtaactgactgaatagtgaagactcgcaacgcatgatgctgccgacgcgttgtacttgtacatggcagtaatggctattcgagatagaaccaaagctttaccattttgttttatgcggttcgttcatggccgccgggcagaattatacacatgtatgtcatctacagcgttacaaacataccattatatatcacagtaccgatgacatctgtcagctcccacccaggagttgctgtaaactatatggatcccgg

SEQ ID NO: 29577 - DNA, 1390 bp, Zea Mays
tggctgtcgcgaccgcaccccgctgcaagccgatcaacaaccactaaaaccctaaaccctagtggatgcttctagagccgccgcgcaccctccagttcgtctccccagcgctgtctctaaaatccactcgtccaccacctcctcggcgcttcgcatccttcccccctccgcaagaaagaagcgaagcaactctccgccgtctccgtttctccacaccacccaaagctctctccgaccacaacctcgcccccagcgcctccttccgcagtcatgtaccgcgcggccgctagcctcgcctccaaggcgcggcaagccgggaacagcctcgccacccgccaggttggaagcaggcttgcctggagcaggaactatgctgcgaaggacatcaagtttggtgttgaggcccgtgctctgatgttgaggggtgttgaggagttggcagatgctgtcaaagtgacaatgggacctaaggggcgcaatgtggttattgagcaaagctttggtgcaccgaaagtcacaaaggatggtgtgactgtagcaaagagcattgaatttaaggatagagtaaagaatgttggtgcaagccttgtgaaacaggttgctaatgcaactaatgacactgctggcgatggtaccacatgtgccactgttttgacaaaagcaatatttactgaggggtgcaaatctgttgcggctggaatgaatgcaatggatttaaggcgcggaatctcaatggctgttgacgctgttgtgaccaatctgaaaggcatggccagaatgatcagcacttcagaagaaattgcacaggtgggtacaatatcagcaaatggggaaagggaaattggtgagcttattgccaaggctatggagaaggttggcaaagagggtgtcatcactattgcggacggtaacaccctttataatgagcttgaagttgtggagggtatgaaactagacagaggttacatctctccgtacttcattaccaactcaaaaacccagaaatgtgaattggaagacccattgatcttaattcatgacaagaaggttacgaacatgcatgctgtggttaaggttttagaaatggctctgaagaagatgtggaaagtgaagcattgggcactttgattattaacaagcttcgtgcaggcatcaaggtctgtgctgtcaaagctcctggttttggggaaaacaggaaggcaaacttacaggaccttgcaatccttactggaggagaggtaataactgaagaactaggaatgaaccttgagaattttgagcctcacatgctgggtacatgcaaaaaggtgactgtctctaaggttgcccctgttattcttgatggagccggagacaagaagtccatgaagagagacgaatctctagaaac

SEQ ID NO: 29578 - DNA, 3594 bp, Zea Mays
  misc_feature (1)..(2): n is a, c, g, or t
nnagtattcagcacaccactttaccttgtttgcaagtgggcaatcagcaaagaccaaattatctgcctatggaggtctgtaagatagttgaggggcagcgctactcaaaacgacttaatgataaacagatcactgctctactgaaggtgacttgccaacgtccccaagcacgtgagaaggacatcttggagactgtgtatcacaatgcctactccaaggatccttatgcccaggaatttggtataacgattgatgagcgtcttgcatcggttgaagctcgtgttctgcctcccccaaggctgaaataccatgatagtggcagagaaagggatgtattgccaaaaattggccagtggaacatgatgaataagaaaatggtcaatggtggtagagttagcagctgggcatgcattaacttctcacggaatgtgcaagatggtgctgccgggagtttctgtcatgaattggctttgatgtgccaagtatcaggaatggattttgtacttgaacctgtgctgtcaccttgctatgcaaggcctgaacttgttgaaagagcactaaagggacgctatcaagatgcgatgaacatactcgggcctcagggccgagaactcgacttgctgattgttatactgcctgacaataatggttctctttacggggatgtcaaaaggatctgtgagactaatcttggattggtctcccaatgctgtctgactaaacatgttttcaaggtgaacaagcagcagtatcttgcaaatgttgccctgaaaataaatgtgaaggttgggggaaggaatactgtgcttgttgatgctttggcaaggagaatcccccttgtcagtgacatagcgactattatctttggtgctgatgtgacccatccccatcctggggaagattctagtccttccattgcagctgattggtgagtgctcaagcccatcgtcaagaattgatacaggatcttttcaaggtatggcaagatcccgaaagggggactgtctctggtggcatgatcagggagcttctcatatctttctggagggcaactggacagaaaccaaagaggatcatattctacagggatggcgtcagtgagggacaattctaccaagttctgttgtatgaacttgatgccattagaaaggcctgtgcgtcattggagtctgactaccagcctccagttacttttgtcgtggtccagaagcgtcatcacaccaggttgtttgctaataatcacaatgataatcgtgctgtcgataaaagcgggaacatactgcctggcaccgtggtggactcgaagatctgccatccaactgagtttgatttctacctgtgcagccatgctggcattcagggaacaagccgccctgcccattaccatgttctgtgggatgagaacaactttacggctgatgggttgcaaactctcaccaacaacttgtgttacacgtatgctaggtgcacacgctcagtatcgattgttcctcctgcatactatgctcacctggcagccttccgagctcggttctacatggagccagatacgagtgacagtggatctatggcaagccgtggccctccaccaggggggcgcaacaccaaggctgctggtgttgggaatgttgctgtgaggccattacctgccctcaaggaaaacgtgaagcgggtcatgttctactgctaagactgatgctgttaaggcagagctaccttttattattacagtatatcgtgaagactagagtattttttccatgtacttgatgatgctgagctaccttttattatgtcgtacgatatatatgcgtggtactggttacagtaactttagttgtgtgttccatcgtcatgctggtctctagctggtgggcaggtggtgttacgtgaaaaacattctctaaaattcatcaaatttggacatagacttgaacatatcaagaaaaagagtggatgtatttcacttaccccatcctcacttcttgggctcgtgatgaaaagagcttgattaataaattccgaaggaaatgatattttgaacggaaagaccttggcatcgtcagcggcggggtcaccgtaccgttggtattatattatactgatttactgaatacgtaattaattaggtgactgaaaatatgacgatgaggtgacgcatgttcgtctcatctgttgactgcgaatagccgccggctgtcggcggcgtgcagcttcctgccttcttcgtcttcctcacttcatctttcttttggctgcagcatcatcatcgtcgactctataaattaatgtaatgactgtccatctctcctcccattgcttaccttccttgctccattctatacgtacatagtagtactgaatcatcagatcacaccgaccatggccatggagacgcagacgcccgagaccatcgtccctccgaccaccatccctcctcttctgaccccctacaagatgggcgcatttgagctggaacacagggtggtgctggcgccgctgacgcggcagcgctcctacggcaacgtcccgcagccgcacggcgccgtctactacgcgcagcgcgccacccggggcggcctcctcatcactgaggccacgggcgtctccgacacggcgcagggctacaccgacacgccgggagtgtggacgcccgaccaggtggcggcgtggcggcccatcgtagacgccgtccacgccaagggcgccgtcttcttctgccagctctggcacgtcggccgcgtctccaccaccgcgctccagccgggcggggccgcgcccatctccagcaccgaccgggccgtcgcgccgcagctcagcttcgacggccacctcgagaagttctccccgccgcgccgcctggaggcgcgcgagatccccgccatcgtcgacgacttccgccgcgcggcgcgcaacgcgctcctcgcgggcttcgacggcgtcgaggtccacggcgccaacggctacctcatcgagcagttcctcaaggacagcgccaacgaccgggacgacgagtacggcggctccctcgagaaccgctgccgcttcgcgctcgaggtcgtgcgcgccgtcgccggcgaggtcgggccgggccgcgtcggcgtccgcctctcccccttcactgactacatggactgccacgactccgacccggaggccctggcggggtacctcgtccgcagcctcagcgacgtcggtgtgctctactgccacatgatcgagccacggatggccatcgttgacggccgacgccagatcccgcaccgcctgcgcccgttcagggaggcattccggggcaccttcatcgccgccggagggtacgacagggcggagggggacaaggtggtggaggaaggctacacggacctcgtcgcctacggcaggctgttcctggccaacccggatctgccccggaggttccgcctccccgacgcgccgctcaacaagtacgaccgcaccaccttctacacctccgaccccgtcattggatacacagactacccctttctcgccgacgccgacgccgacaaataaatgatccatctaccgtcgccgacacgccggcctcccctcccctcccggcctccccagtcc

SEQ ID NO: 29579 - DNA, 2835 bp, Zea Mays
acatagccttgacaagtttgtgttattgttggaaaaattggaggactaattaactttacaatgaaaagttatggtcgtgtgaaacctgatgttgttgcatacagtcgagatataattggatcaaagatcagcacaggctgtaagaccctttcaggcaccagtgtagcaagcccggtggttgctggtgtagtatgtttgcttgttagtgttatacctgaagacaagcggaaattgatcctcaaccctgctgctatgaaacaggcccttgtggagggtgcttctaaactttcaggaccaaacatgtatgaacaaggtgctggcaggcttgatctctggcagtcatatgaaatcttaaaaaattaccaaccacgtgcaagcatatttcctactatgcttgacttcaccgactgtccatatttctggcctttttgtcgtcaacctatgtatgctggagctatgccagtaatcttcaatgctacaatcctgaacgggatgggggtgattggttatgtaaaggatcaacctttatggcaaccttctgaggatattggcaatcttcttagtgttcacttcacctactcagatgtcatctggccctggacgggataccttgctctacatttgcaagttaaagatgagggttctcagttttcaggcataattagtggcaatgttactctgactatttataccccagcagctcatggagaaagcagcccacggagtagtacatgtattcttcacatgaaggtcaaggttgttccaacacctgttaggtcaaaaaggatactgtgggaccaatatcataatattaagtatccttcaggatatgttccaagggattcccttaatgttcataatgatatccttgactggcatggtgaccacttgcacacaaacttccacattctgttcaacatgctaagagatgcagagtactatattgagacacttggatcaccacttacttgctttgatgctagcaattatgggacattgcttatggttgatcttgaggacgaatactttgatgaagagattcagaaacttagggatgatgttatacacaagggacttggtattgctgtttttgctgagtggtaccatgttgatacaatggttaagatgacattctttgatgagaacacccggagttggtggactccaattactgggggtgcaaatattcctgcaattaatgaacttctggcaccatttggcattgctttgggggacaaaattcttactggtgacttctcaatcaatggtgagcagacccactatgcttctggaactgatatagtgcaatttcctgcgggaggtttcttgcatagcttccagctccaagaaaactcaaagacggtgcaagatcacataggaacactggatacagaaagcacccaggggaaaggcaagctctcctcaattcttggagtaatagaagcaggggaagggaggattgcagtgtatggtgattcaaattgtcttgacagtagtcacatggtaacaaactgctattggcttttgagaaaaatattggagttcactggaaacagagtgaaagataatgtccttttctcagaggcagcacagttaaagtttcctgtttttgagaatatccatcatccatcacgtagaacggatgtaaacttttcaacatactcaacagttgttggcaaggaattaatctgccaccaagattcccggtttgaggtttggggaacgaaaggctatggtgtccaaccaataggcacatcaagaaagcttccagagtaccagatgcatgaaagttctagttctcccaatgtaacaatacaaattgctggcagtagacaagataaagttgaaaggcttcaaagaaatctttcgataccaaatgctgctaaatttgatgataaaagagattattttggatttattggtcatgaggaggttgacataggaatgttaatggcaagccaatggatgataccttgcttcgctgccactgcttgccttatgttgtatcttagttgtagagtgcaacaaaaacgccgcagacgaaggaaggggtcggtggctagtgctaatcggctaacaagtatggtataattcgtcattcgcgcggtggtgctgaaaaggtttttttagcgtatctaagtttcaggcctccagccatgatggataaccaggaagcgccatctgcgcagcatgacagaattttagtagccagaaatccctggtagtgaagacacattttaactcggcaactagaggctgaacttgagagaaagctggctcgtcacttctgtggtcacatggaaagcagcttgtcttcccagattcagccattcgtggcatctactgctgttgcttgtagtcgctcacaattttgttcttcgccacacgtagttgtagccacaaaaatcgctgctaagggctagtttgatgaccagagatcacgagaggatccataaatagcaatgggattcctctgacatggatctcctcgtcatccctggccaccaaattagcccttagatcatggagatcggaagggattgagagcaaaattagttcatttctcatcaatctcttccaatctctcccaatcttccgtgatcccctttgtcactaaatcaaccctaagagccaatatctagggtagaagctagagctagtcatttgtcatctccttggaatatgtgaaggagatttgagcttctctgtagatccatgagcaataaggggcagggggactcggcatgagcttggcaggtacaaaggaggcttaggcttattgggaactttgtaaagtaaattttgtattgttaatttaaaaaaaagaaccaggcc

SEQ ID NO: 29580 - DNA, 2548 bp, Zea Mays
cagggtctctccgatccctcggctccccccacaattcacacgcgcgatggctcccctgctcctgctcctccccgtcgtccagctcctcctggccgtagccgacgccgtccccgattcctgcgccaaagccacatgcgccggccatgagatacactaccctttccggctggactcctctatgcccgacgactgcgtggtgtaccccgtccccgggatcggcctcatctgccaggacaactccacgctgatcctcccctttgagtcgcacaggtacacagtgctgagcatcaactacaaggcgcacaccatcctagtctccgacgccgacatcggcgacgagtacgcggcggcggcggcgggcgccggctgcccgcgcctccacgtgaacctgaccatggacgccttctggctgcggctgtctccctccgactccaacatcaccttcctctacaactgcaagaggaacgtcaccctgccatccgccgtggagctgagcgggtgccaagatggcaacgacgacgacgacgacgacagcaggtcgccgtcgccgtcgtactcgtacgcgctgcgggacggcggggtcacgggcgctgaggcgcacgagctcgagtgccaggaggtggtggtggcgccggtgctggacgtgcacaagagggcgatcgtgggcgcgcccggcggcccgcctccgcctccgggggacgggtcgtcgccgttccgcgaggtgctgcagggcggcttcgagctgagctacgacacccactcccggcagtgcgaccggtgcgagcgctccggcggatggtgcgggtaccagcgcgctggagcgacgacgcccgccgccggcgcgagcgcgacgatgaccttcacctgtttctgcgagagcggcccggcctcggatcggtgcgggccaaaaagtaaaacagcagttattgccggtgtcgcggctggcgctggtgttgcaatacttgctgctgccatttttttgttcgtgaggcgcaagagaaagcagaagagagtggtcaactcgtcttcgaagctcctcaagtacagcggctctggcgggaccccgcgttcacgggtcggtgacatggagtccggcagcatcgaggacccgcctacgcatctcttcacctacgaggagcttgaggaggcgaccagttgcttcgacgaaaacagagagctcggtgacggtggcttcggcaccgtctacaaagggtacctcaaggacgggcgcgtggtggcggtgaaacggctgtacaacaacagctaccggcgcgtggagcagttccagaacgaggcggccatcctgtcggggctacgccaccccaacctcgtcatgttctacggctgcacgtccagccagagccgcgagctgctgctggtgtacgagttcgtggccaacggcacggtcgccgaccacctgcacgggcagcgggccgccgagcgcgccctcccgtggccgctccgcctcggcgtcgccgtggagtccgccgcggcgctcacctacctgcacgccatcgagccgcccgtggtgcaccgcgacgtcaagaccaccaacatcctcctggacgccgactaccacgtcaaggtcgccgacttcggcctctcccgcctcttccccctcgacgtcacgcacgtctccaccgctccccagggcacgccagggtatgtagatccagagtaccaccagtgctaccagctgacggacaagagcgacgtgtacagtttcggagtggtcctggtggagctcatctcgtccaagcccgccgtcgacgtcacccggcaccgcaacgagatcaacctggccggcatggccatcagcaagatccagaagtgccagctggaggagctcgtcgacatcgacctgggctacgagaccgacccggccaccaagaaggcgatgacggcggtcgccgagctggccttccgttgcctgcagcagaacggcgagatgcgcccgccgatcaaggaggtgctcgaggtgctcaggagcattcagggcgaataccagacggggaaggacggagacaaaaacaaggacggacccctctctcccaccacggttcatgctccgtgggagagcagggccacgacgcccaacaccagcagggactagaccagtcggtcagtgtcaaggactggagaccggagaagttgctgctgctgtgtgactgtgaggcatgccagattgcctgtcatttgttttcaggcttcgcggtccggttcctgctgatgtatatatttgttttgttgggtctgtcagagctgagggaatgtacatatatgtgaaagagtggtgaatgatatatataatacacatataaataaatgagtactagtaaatagatgtcacttgtgcctgccctgacctttcacccaacagtttccaattgatatgtggagcatgatccgcttgctgccgtgtcacagttgataagtggagcacgatccgtataataaggctggagtagatcagtatgcagagctcacatagccaaatggttccacaacgcatgtgggcccgatgctgatgcaccgaggataaactatg

SEQ ID NO: 29581 - DNA, 1983 bp, Zea Mays
tttgaattgaaacaaattcaattgcaacggttggaggatggacccttgtcctaactgggcaaactggtgttggaaaatcagcaactgtgagagcaattgctgatgaccttggagcagacttatgtgagtggacgactccagtaccaacactgtgggctgaacatgttcatgctaattcaggattacgctatacatccaagcttgaagaatttgaaacttttgtagagaagataaggaagtattcaatgctttgtccaaccaacaccaggtcccaaaggaatctcattatcattttgattgatgacatccctgtaacaagtggaaatgttgcttttgcaagactagggaaatgcctaactggtttaattcgaagtactcaagtaccaactgtcatttcactcactcactaccacaaaagtgagagtaacgatactgcaatgtggaactctgaggaccttgagtccttacttcaagatgctggtgctcacaagattggtttcaatccagtaaccacaaattctatcaagaagatccttgttcgagtatgcaaagaagaaagctgccatgcatctgaagaattattgcatcaaatagccacctctagtggaggtgatattagacatgcaataatgtctcttcaatactattgtcttgaccccagaaggcatagttctgcattggcaacaagttctagttctactgtcccaaagaaccttgattctctggttccagggcatgagagctatggccctagcagtgcattaccttccccatgtggaagagatgagacactttcactatttcatgccttggggaaatttttgcacaacaagagggaaactaatagtgatgctgatatcgacctggattcgtgtcctcttaaagaaacctaagaagaaatgcactcaaaatggatgttccagaaaagattctttcacaagcacacggaaaagtacgaacagttgtggattttctttatgtaaatgttattgatttcattgacagtgaagctgttgatgatgcatgggctgtggtatcatatttgggtgaggcggattgtcttcttactggtggtccagtcgcatcatacaactcagaaaacatagcacagctcattgctgcctctgttgcggcacggggagttctttttggaaatgctcatgtcacaccatcaaggtggcatacaatccggagcccgaggctctggcaaactgatcaatcatctcgatccaataaggaccacattctgaaggaaagatttgattgttcaaggacgtgtggtttttgcaacttcgctgacttggtcacagaattcagaccattggagagatggattggtcctcgtaatggtgggcatagaagcagctgcttgccccacggcgtaggttgctcgcccatgggagtcgctgatggaaataattctgaagaggatgacgatatgatagaagattgttaatcgtgagtcgcattatgagatgccaacatatcattatggatgctgactagctgattcaaatagtggctcgctgtttaagggtgccattgatatttaagttttatgaagctaattgttgcacttaccagtttcatgcgtcacgtccgaagcgtgtagagtagctcggtttttctttcccatatgtcgtctaacaatcaaggagttaccagctgcgagaaaacatctaagtctaacatggcatgaagttacatagatgtagcactcatggtatcacttcgctagctgaactgaggatgattgattgaccgagttataaaaaagtgtagcatctacaatttaatatttagtatgtggctcatatgtccactttaattttaattttaaatttatttttgtagggagagtattacattggcttaccacgggatgttgtgcaattgttgtactataacatcaaatatgattcgtatgctgtcataacgcacgggcatattgtaccagtatatctctagtatattaaagcagca

SEQ ID NO: 29582 - DNA, 2832 bp, Zea Mays
tccattggtcagtgtctccccgcccgcctctcccatcttcaaaaaccacccacggcccgtcccctcgacctccccgaaaccccacttctcggatcgagactagggttagggtttcgtcactcccgccccgattcgaaccaatccgcctaggcccccgccgcgccatggccgccggttccattgtggtggacttcccctccatgggcgccgccctctgcttccccaacctcgaatcactcctccgagactccgcctcgggtttcctctccgccgtctccgccgccccggcccccggcgccgccgacctcaccaacttccaccgcgtcttctcgcgcgtcctcagcacctactcagacccgccgctcgaggtcgtctggttcttctccgcgctctccttccacgaccgccctgacgacctccgctcactgctccagctcctctccgccttcgccgcttcctcgcccggggccgccaagccgctcgccctcctcgcccccgtcgtctccgagcttttccactcagataagccgcgcagggagaccgaggccgtcgtcgaggctgtcctcagctacatcagcatctgcagcagtcgccccgccccctcttcgactgaaggcaccaccgccgacgctgtgaggctgctgccggctttcggcgatcttgtcaaggtgtggagcgtgcggcactcgagggagaggtgcccgttccaggtgctgttcccgctcgctggtgacgaggccaggcgggagctcatgaaggaaggctgcagcgttgactacctcgctggggtggtgctggttgaggcgttccttctcaggctctgcctcaaggtgcagaatgcaacaggggtgcctcgctctgagctgcagaaggagctcaagatctgggcagtcagctccatcccggtcttccagagccaccaattcttcggggtcctgctgaacatgctcttgaactctccgctgcctgtttactctctagtggtatgtgtttcctgactaatgagcaatttgagagcatgacacaacaagctagtattattatggattcactgcttattaacaaaattataagagtattaattaagcattcacaaggcatgtggtagttgtatggaccataaaaatattaacaaacatggcaaatagcttataaactcatttcatgaattaagaaacatgagtcatgatcatgctttttcattacctgttctgtaaactagttatttacctttgtgaaataagaaatgtgcaacttgttgccttgttcttcaactgtgcttggaatcaggaatctttcctaatttgtggaaactaaagaggagaacagaacggtatatgactattgtgtatcgcaaagctggtgttactatagcattttgctgtcatcatctgcaaggagcatgatttaagatggagttgtgtctcatctttgtgatatgcaaacaggttgaagcctgaactgtgagcgctgatgatgaaatcttggtgagggatgttctatatgattctcttatcctggtggattattcattcattaacaatggtgctggagttgatctcttgcctgtatatgtgtcgagattgattatcactcttgatgctgtcaatgatgccaggtgataaagagtttttgtaaccaaacttagttggggggggtggaaatatcttctcatttcatttctgctgacaggaggaaaggtgatcaaggtagagcagtgtcatttattaatgccttctcaacctcaaatattcccaattttctcatcaagtgggctacttgtcaagctggctctggtgcactcagcaaaccaatttgcaatacgccccaagctattctcagtatgtgcaaatatggaacaacatcattggttttcatttatcatgtcttgtggactgtttactcaagcagaaatgtatatgttttcttttcacagagtggcttattgaccttgaagataaggggctcaaagtgtttggagattacagttcttgggttatgaggaggtttgtttgcaatgaggtcaagaatgggtatgggaacatggttcagtcagatgcagaccttttctttgttgataaacagagtggtagggaacttatggacaccaaaggcagcgaggatgatgaagctgttgaggagatggagactgcaggtaatgcttttatggctgctgcccagtcaatgaagggggtaactaacggcataaggaagaggaagagctgcggaaacgaagatgcagctgctgtgaagtttgtgaagtacaaggtagaagacagctcagtgaagggctacctgttagcagctaatggcatgagcagtggcagtgaggtagagaacccacagtcggatgatgagatggaagaatccgactgatgcatagaaaatgacagcacccactaatgcttactttggggagagttgctttgaagagtttcttggacaaccgcctttttggagtctggaccagccttgtttcagatgccgcttcttaatgatgtcgtgcagtaccctgttctaggccaataatctgcaggagggcccctctccagctaggctttttttcggatatagtggtaaccgttagctgaccctacttgacaaggagcatgtgatgtctgctatgagctgtatcgtgttctttgttattataatgctatatagtagagacctcaatgtagtcttgcttcattttgcttttgtaatagatgggtacgttgttgttatcccacggaaccagttggaactaatgaactgttaacctttcctgtgtatagcgcctttctgtgcttacttgtgtatggtgtcttttttgtgctgacgaggaagtcc

SEQ ID NO: 29583 - DNA, 276 bp, Zea Mays
gctctgctcaatcagagtgctcattttgcgttgcctgcttccttcctccctctcgttgccatatactaccttcctcggcccgtcgagcctgcatccattaaaggcggtggcggtagcagcagcagccctccaaccaagaaaccagtgaaactgaaccaccaggaactgtctatctgcatccatctcttggccacacccactgaccgcaccacactacaccacaccacacctgaggctcccccctcgcctcgagatgctttacacggtgtagctggc

SEQ ID NO: 29584 - DNA, 1943 bp, Zea Mays
cttcagcattgcctccacctccaccacctggaacgagctccagtccacgtccaccccctccaccatgctattcatcaaaacaatcatccagccccatgggcaaatcgatgccatcacctcctgttccgccaccaccctcccatggaggacgcaatggagcttctggtaacattgtacccccgccagcaccccctggcagtaatgctaaactgtttggtcctcaggggcgtggacctgcacctccttcaggtccaatgtcaaagagctttcaatctggccaggctgtgttgagaaggtctaatttgaagccacttcattgggtgaaagtaacaagagcaatgcatggtagtctgtgggcggagtcacagaagcctgacgaaactttaaaagctcctgtgtttgatatgtcagaattagaaaatcttttctcagctgcactgccaagttcagattcaaggcgttcagataagtcaggcagtcgtgcatctgggtcgaaaccagagaaaattcatcttattgatcttcgccgggctaacaattgtggaatcatgcttaccaaagtcaaaatgccactgcctgacctaatgagtgcaattctggctctggatgatactgttctggatgctgaccaggtggagaaccttattaagttcactccaactaaagatgaaattgaacttctaaagggttacaaaggagacaagcaagttcttggagaatgtgagcagttctttatggagcttatgaaattaccacgtgtagaatctaagctgagagttttctcatttaagattcaattccgttcccaggtttctgaccttaagcggaacctgaacattgttaattcttcagcagaagagatacgaggttcagtcaagttgaaaaggattatgcagacaattctttctctcggaaatgcattgaaccaaggcactgctagaggttctgctgttggtttcaggttggatagcttgcttaaacttagtgacacccgtgctcgtaacaataagatgactttaatgcactatttatctaaggtgctttctgagaaacttccagaacttctagatttcccgaaagacttgtctagcttagagctggcagcaaagtctttagcagaggaaatgcaggctgtcaacaaaggactcgagaaagttgagcaagagcttactacatctgaaaatgatggtcctgtgtcagagatcttccgcaagacactgaaggatttcctcattggtgcagaagctgaagttaggtctttgacttcactttattctaatgtgggccgaaatgcagatgcgttagcgctttattttggagaagatccagcacgatgtccatttgagcaagtagttacaacactccaaaattttgtgagattgttcacgcgttcccatgaagagaactgtaagcaactggatcttgaaaagaagaaagctctgaaggaagcagaagacaatagtaaacaactggaccttgaaaagaagaaaacccagaaggaagcagaaacagagaaaataaagaagaaatctgacagtgagaaagcttgtaagaaagaactggaaaatgataaatcttctaagaaggattcagcaaatgagaaaggcaagcttaacaatcccatcaaagagctagatatatcacttcaatcacctgcacaaactgccagtgccaaatgacgaccgtaccagatgaactaacagtagcttttccgaaagaggaaaactagttttggctgctcccaacagtgcttccttttgacgaatcatgcaggataaggaagccgaaaactgcacttttaatacgttctcaggggattgtcgaagaaattaacctggcgacaagctgtacagatctgacataataatagccttttcttttgggtaataatagattattcttacaatttttctgtcttcttgattatatgtagctaatgtctg

SEQ ID NO: 29585 - DNA, 3327 bp, Zea Mays
tggcggattggaagagggcaggaggcatcgtcgcactagtgtggaggcactgaggacttgcccgattgatctgaaggaggcagtagccagtgttatatttgcatcaatgcggtgttcagatgtcacagaactagcagatgttcggaagcatttcaaaagcaagtacggaaaagagtttgaagcagcagcccttgaagtgcgacctgacagtggtgtaaatcgtctgataattgagaagctgtcagcaggagcacctgatgtgcagactaaaatcaaaacattgagctcgatagcagaggagcacaacatcaaatgggagccaaaagcgtttgaggagaaactgcaacaaccaactgaaggtcatctgtatggttctgcaacatattctggaggaaatacttcaactatgggatcatctacttctagcatatcaacaccacagcctacatattcaggtgttagtgcggcacctgtggactcagccactatccatgtgccagcaaataaaactgcatatggcagtgccaattctaatactttttcgaaagaaagcattcataatagttccagtgcatcagtacctcctatctcccaacatgggccgtctgcttactcttcagcacaggttcctggttctaacaatatctcacatggaaatccaggaggtccaccttaccctcaatacagcgcaacagtcccagacgcagtatccaggaatgaagatagcaatcagaatagggaaagaaaacctttggtgactggtgccaattggaatgtggaattcaaggatgcaacatctgctgctcaggcagcagcagagtctgcagagatggctagcattgctgctagagctgctgctgaacttgctagtcgtggaaactattctggagataaaggcactggagcctatgattcagccgcatacagtagcaaaaacacagtgaggaagcaacgggcggaacatgtagtgaaggatgagagtttccatgaccagagttcaggtgttaatgatccaagcgagatgccaagtaactcaagaaatttttttggaggaacagaaacatcccatgttgatagtgagaatatatcgacagccccatatcaacagttccatgcctacaatccagacagccatccatatgtttatgaaatgccaactgaaccacctcgtgctcattcacctgacccacgttttgatgatttatatgagagggaaagtgacattggaagatctgaagttgatccgtttgattttcctagagaaaacttccaagatactgcatctgttgggcacaatttcaaggatgtggaaatcaggacacctagctacgatcaagaaagcacagatgactactatggtaattttaattcttcacatgatacattggcccatggcagcagcaccactgcttgggataagcaaaacgacaaagctcaagacaactcttcacctgttgtttttgatcaatatgattctgatgttgaacaagagaatttgttggacacattctcctcaaagcatactgaacaactacctgctcccggagatcatatgagattctcaactgcagattggagtgaacagcataccagtgaatctccatccaagcagagaacgtcagccctattttccagaacagaaacacaactatctgataatttaggaacaaacaaaagtgatattccttcacctcattcttatcataacatgcgtcctgcttttgattcagatggtggtagctctgatgaggaaatagccacaaccacgcatgcagtgcctttaaggtcacattcaggaggatctgcttcgtctgtcctgaacaaaggtggtggacctgatgcttcacccatatttgattattcaggagcacatgcagtgaggaacttgaaccgtgtgcaaagcagagattctgatctttcggaagaagagacagatttagataaatttaaaggttcatccttcgccagagcaaatgagcagcagctgttgccttctgccatacgtacttcagcaacttctgatgataaggaagatgacatcagcctgaactttggtaagttaacgcctggactaagaaacaaacccaggcaacccccaccatacaccaaagtttccagggagagcattctgcctaagcagtccttgcctaaggtttctgctggcactgaagagtcagtcgattctgaagagaatactacattcaaacaggatagaagtagtccccaaagctcattttcagccaggacttcttcaggtaaagactacgacagtggactttatgaaaggaaccgaagtgttggaacacactgggaagcaaaatcaaccatagcaagaaattcctctggtttagatgatgctgagaagttatctgatctacctactaatataagtcttccaacaactaagagttctgaacgctggaattcgagtaaagtgccttatcatgaaaaaccaggtattggaacacgccgagaagtgagatcaacactggctagaaattattttgattcagatgacagtgaagaagaactagagcaacagcagattcctcagtcgaagcaatctggagtgctgatacagtcacgcaggacacgggaggtgacatcagacacaaagagagatggtcgtttccaaaccggagctcagtatggtgatgaaactgagagtgtgacaagtaagacacaagtccatcaaggattcaacagctcaagtactgaacggagtgaaaggagggatccaagtgtgtaccccagggttgcagtacagcgctcttcgtctaaagctgagcagattgaatctccgatggagagagggaagccacaaggagctgaaatgagaagcaccttatttcgaggaaatgaagaggacacagaaacctcatctggaactccaaaagaaagcacccccaaaacaccccctgcacatgttcatcccaagcttccaacagactatgattctttcgccgcacattttaggtctcttcgaacaaaccggccttaggtttacacgacatatagagtttggagtttcagttgaattaagtcatatatacgatactatgatacgttttatggaggttgagttgagatttgtacattatagcaacactgttttctggacactatcgtgctgtgctagtttgggcgtacaattcttttgttctcttgtatcctcatatactcaatagaatcatattgtaaagactttaatttcctgttagtgattattaataagcacggcatgttggcatatgtatagaacatgcggggttctttcattccattgtaacgggatctgctacactcatgctatgagattgtttcatg

SEQ ID NO: 29586 - DNA, 3204 bp, Zea Mays
attttatcgtcgtcgacgtcgatccctctctcgttctctcaacaaatcgacgaagtccctgaactcatttccagcctctccgcgccccaaccaccgccaccgcgtgcgagatcacaagcctccacaccgtgaccaccggcgccgctgcggcgtcctgagcaggcggcgagcctcgtgcacagggcaggctcggctcgccggggcggacgagatgagcgggcacgactccaagtacttctctaccaccaagaagggggagatccccgagctgaaggaggagctcaactcccagtacaaggacaagagaaaagatgctgtcaagaaagtgattgctgctatgactgtaggaaaagatgtctcatcattgttcactgatgttgtgaactgcatgcagactgagaacttggagctcaagaaactagtatatttgtatctcatcaactatgctaaaagtcaacctgatcttgccattcttgctgtgaacacatttgttaaggattcacaagacccaaacccattgattcgtgctttggctgttaggacaatgggttgtatccgtgtggacaaaatcacagagtatctctgtgatccacttcaaagatgtctcaaggatgatgatccctatgtacggaagactgcagctatttgtgttgctaaactttatgatataaatgctgagctagtagaggatagaggatttctggaggcccttaaggatttaatatctgacaataatcctatggttgttgcaaatgctgttgctgctctggcagagattcaagatagtagtgttcgtccaatctttgaaatcaccagccatacactgtcaaagcttctgacagctctgaatgaatgcacagagtggggtcaagttttcattttggattctttgtcaagatacaaagcagcagatgccagggaagctgaaaacatagtggaacgagttacaccccgtctccaacatgcaaattgtgcggttgttctttctgctgtcaagataatccttctacaaatggagctcattacgagcacggatgtagtcaggaatctctgtaagaaaatggctccccctcttgttactcttttgtcagcagagcctgaaattcagtatgtagccttgaggaacattaatctgatagttcaaaagaggcctacaatactcgctcatgagattaaggttttcttttgcaagtacaatgaccctatatatgttaagatggaaaaactggagattatgataaagcttgcctcggatcgaaatatagatcaggtgctcttggaattcaaagaatatgccacagaggttgatgttgactttgtgcggaaagccgttcgtgcgattgggagatgtgcaattaaattggagagagctgctgaaaggaagctataattgttatcaaagacatcttcagacgctaccctaacacgtatgagtctatcatcgctacactttgtgaaagtctggacactttagatgaaccagaggctaaggcatccatgatttggataattggagaatatgccgaaagaattgacaatgctgatgaacttcttgagagtttcttggaaacatttcctgaagaaccagcattagttcaactgcagctgctaaccgctactgttaaattgtttcttaagaagccaactgaggggccacaacagatgatacaggctgttctcaataatgccacagttgaaacagataatcctgatttgagggacagagcttatatatactggcgacttctgtctactgatcctgaggctgcgaaagatgtagttttggcagagaaacctgtgatcagtgatgactccaaccagcttgactcatcacttcttgatgagctgctagcaaacatttctaccctttcatcagtttatcataagcccccagaatcatttgtcagccgtgtcaaggcagctcctagggctgatgatgatgagtttgctgatacagctgaaacagggtattcggagtccccatcccagggagttgatggggcgtcgccttcctctagtgctggtacttcttctaatgtacccgtgaaacagccggcggcagcatccccacctggtccagtggtaatgccagaccttttaggtgatttaatgggtatggataatgctattgtccctgttgatgaacctgcagcaccttctggccctccgctacctgtcttactgccttcgaatacaggtcaagggctgcagattagtgcacaactaacacggcgtgatggccagatatactatgatatatctttcgagaatggcacccagggtgtcctagatggatttatgattcagtttaacaagaacacatttggtcttgctgctggtgaagcacttcaggttactccactgcaaccaggccaatcaacaaggacacttttacaaatgaacacgttccagaatatcagccctggtgcaccaaactcgctattacaagttgctgtgaaaaataatcagcagccagtgtggtacttcaatgacaaaattccactgcatgttttctttggtgaagatggaaaaatggaacgagctagttttcttgaggcctggaaatctttacctgatgacaatgaatttacaaaagaattcccgggctctgtaatcagcagtatagatgctacagttgagcgccttgcagcatcaaatgtgttctttatagccaagcggaaaaatgcaaacatggatgttctgtatctgtccgcgaagatgccccgcggaatcccctttcttatagaggttacagctgcggttggtgttcctggtgtgaaatgtgcagtcaaaactccaaatagagagatggttcctctcttctttgaagctatggaggctctcaccaagtgacgccaaagttaatggatatgtggttctacaaaaatttatcagtcgatgagctgctataggtgtttggatgcggcattttttttttcacggaagcttgtgtgaattgtagtttttgtattagattacagtatttaaactgatagttcctggttccaaagtttttcgccagaaatactggagatgttcttgcctcacataatctgtacatcttaccctgttggacctggaaattttcatcttgttatgcatagcatatgaaatatgactagttttctacacggctaatgtaaactgatactacctccgttgacaaatatttgttgcccgctagtttatttttgaactaaacgg

SEQ ID NO: 29587 - DNA, 988 bp, Zea Mays
atggaattgttaccatgacttcaaacaccatcccatttctatattttagagttttgctttgagatccttctttgactcaccagcatcatttcttcgaaaactggccattttaaatagttttaggaaaaatatgttgtaccacatgtgtgcgtaaaggttcacctcaagttaaattgaagactcctttatctgccaacaaccaaggtagccaggaatttggggaagactttgcgtgctttccaaccaaccattagagagatacaggatgtatcaagggagttcaggagcactcttgaacgagaaatcggaattgatgaggtttcccagtcgacgaattatacacccacgaccatgaataacaaccaacaacctgctgccgactcaaatatcaagcctgcacctgcaccttacaccagcgatgaacttgtgaaagtaactgaagaacaaattgctgcatcagctgctgcagcttggaacccgcaacaacctgcatcgtcgcaacagcaagtgtacactactccgagtgaggacgctcctacatcaggaggaagcgatggtcctgctgctccagctcttgctgcgagtgactcggatccaaagcaagtgaatctggacaaggcggaaacacagagatgactccgcttaacagcttgacactggatgggatgagcacactgaacacgtcaggacgagcagtcttattttaattttgtaggcgatggacttcagattaaagccagttatttggactgctgcagctataatctatagagacataacactgtaaaaatagtagaatccgttttagattaaagccaaacgagatgagagcgttttctgtgtttactaggcttgttctgtagcagcatgcatgggcaggttcatacaaaaaggctatgtgtatgcgtaacataaccacgagtttatatggattaaatatatttagccacgttgaaaaaccggttcagttaataaaataatgtcagtt

SEQ ID NO: 29588 - DNA, 3354 bp, Zea Mays
cccggctgtcccgtctcgaccaccagcaccagttcagcccatccaccgccaccacctcagacgctcctagtcaccactcgctgtcctcggcttctcctaaaagctcgacgcgatggcgacgctggtgcggccgcccgcgctgcacgtccgcgccgtgagcggcggcgggaacaaggacagggtggcgccgcagcggccttggtggggcgggaacaagcccatctcaccgcgccagtcgggcgggagcggggcgcgaggaggcgcgggcggcggcggcgtcgcgctggaccaggtgctaggtgtgctccgccgcgacggcgaattcgtccaggccgccgtcggcgccccgctccgcgacgtcttctggctccgcttccttgagaagaagcagcggaagcagcagcagccgagacctaagcacaagcctttccggcagcagcaggaagaggaggaggtggtagtggtggacgagtcgcccccggccttcccgcccccctcgtacccgtcagggttgtcgtgcgtggagctaatggcggccgacttccaggccctcaaggtgtacgccggtagcgcgcggcactctctcgcgcgccgattcctcggtagcaatagcaagggaaagtctgaacagcaacctaaacccaaaccccaggagcagcagaaagagcagcaacatatacttcaggccccagccttccctccgccctcctacccaccaggattatcctgtatggagttgatgatggctgaccttgaagccctgaaactgtacatcaactactattcggccatcctgactacgccgctcccccagcattatgatcctgacctccttgcccagtacttcgcctcacgtccgcatatccttgcctctcgcgtcattcagatactcttcacatttctctcagctgtggtgaagatgcggatttcaaaaagagctcagttaaccacagatgctacctatagtagtggtaacagcggcaacgggtttgatgatactcaatatatggtcggccaacttctcaaggagacatttcttaaccttgggcctacttttattaaagttggacaatcactttctacaagacctgatatcataggttcagagatttgtgaggcccttgctgagttgcatgaaagggttcctactttcccaagagaggatgcaatgaagatcattgagggagaatttgggtgccctgtgtcgcatatgttcagttatgtttcagatgagcctgtagcatctgcttcctttggacaggtctaccaggggcgcacagttgatggttctcttgttgcaataaaggttcagcggccagaccttctaccttctgtactgagagacatctatattctacgccttgggcttgctttcatacggaagatagccaagcgaagaagtaacatttctctttatggtgatgagttgggtagaggtttcgtcggcgagttggactacaatattgaagctgctaatgctaccaaatttatggaggttcattccagatatcctttcatgctagttcctaaggttcttaaacaacttactcgaaagagggttttaacaatggagtgggtggctggtgagaaccccaaggatttgctttctttgtctaaaggagtttctgaaaaatttactcaagcttcagataatcagaagttggaagcaaaatctcgccttcttgacctggtcaataaaggtgtagaggcatcgctagtgcagcttcttgagacaggcttgttgcatgctgatcctcatcctggtaacttgcgttatactcctgaaggccgtgttgggtttctagattttggtttgctgtgcatgatggagaggaaacatcagcgtgctatgcttgcaagcatagtgcacatagtaaatggtgattgggcttccgtcgtttatgatttgactgaaatggatgtagttccaccaaaaaccaatctacgtcgtgtgacaatggactagccgtggcagcagatgggactttcaaaacatttcaagcagcatacccatatgttgttcggaagcttctgtccgaaaattcacttgaaacaagaagactcttgaatcaggcaatttttaacaaaaggaaagagttccaatggcagaagattgacgcgtttctaaaattggcttcagcaaggaccaacttcaagtataacagtgaagttttgccagagcctgacatgaagtccatgaatgtggctagccttgtggagatcagtgatgcatattcacttgaccgtgctatagctacaccagagagagcattgcatactgcaaacctgtgtgtgaggcttttattatctaaggagagcattgtgattaggagacttattatgacagcgaatgcaaaatctcttgcccgtgatctgatctccagagatgctttgatgttccgggtgctccttagtaaggttattgcggatgttgtctaccaatggatgttgagtgccacaggcttgaaacgagttatggagaccaagatccagacgcccatgaccacaggaaagaacgagggacatctggtgctggctgaagaaccatcgaccctgatggtactccaggcggcagtaaaagaccgaaggattcagctcatgttcaccaagtttgtgagggagttgagagaggagcccgtcttgatgattagggtgagctggaacgtgttcctcatctcggtctcatctgccgctgtaggcctgcaccgtttcttggtgttcttcttgaaggaggatggtgccaggttcttggatgacaaggtcaagaaaatgaagatttggctgatggagttctcgaagcggacggctaatctggagattcaaggaattctgtgaatgttggtggcttttggttgaaggatttaatagctgcttcgcactctggtttttggagttactttctgcatcgagtgaatccagttcctgtttacgctggctgtctgagcttgcttggctgctggtgttcccagagatttataaaaacagggttttcctccgtcattccgccgcagctagtatataatagatggttcttggttgttcatgtactgtgtagctgtatataatagaaacattgcaggatcagtgagtaattctgtggccgagtaaagtgcagtggtggaaggcatgtgttacctactggatataaatatgatgatgtgaatgttcagttgaaaaacttgggtgacatgaactgatgaactatagctgatgcctccactttagaaatttagctgttttagtttgtctaaaatcaaacctttctttgacaagtaacttgcataaactcgggcgaaatcgtttgggtagatcatagatgtttgtaaatttgtccgattattaacatgaacagtg

SEQ ID NO: 29589 - DNA, 1536 bp, Zea Mays
gcgcgttgtgcatttgtgcacgggcggtcgtttgtggacccgatacgagccctcgccaaacacatcggcgcatcaggttcggccaccaccaaccacccgttccgcgcccgtcctcgaccctcccacctattcgctcgctcgctcgccgtccgcgcccgcgcgggccgcgagatctaggccagtcgccgcggccgtggccgcgggctgacgggatctctgtcctcccgacacgacgaacctctaggaaggcgcctaagacgaggaggaagcgggggctatggaggcgtcttcctgggacgccgttcgcaagcaggcaaggaggttggaagctcagttagatgaccaaatgattgcataccgtaaattggtttctatgaaatcagacggttcagaggacaacattgagtctgatatagaaagatcactgaagcagttacagcaagtgaattcgcaaatgcaaacttgggtatcatcaggaggttctgaagttctttctcatactctgactcgtcatatggagattttgcaagaccttactcaggaattctatcggcttcgatcaagtctcagggcaaaacaacagcatacttctctccttgacttgagagattttgacagagcaaagtttgatgttgaggagccgtcagactcagctgatcaagttcttctcagggaacaagctgcgattggcaggagtactggacagtttcagggagagccttctgtcgagctactacttttgtctggaatactacatgtttcacttcagaatgatgaatgctgtcagttgtatgcctgaggagttactgtatgtttaatgataccagatggataacgtgatatcacaagctcaggcaacacttggttctctcatgacccaacggtcaacattcggtggcatcactacaaagataagcaacgtcagcagccagcttccaacaattaaccacgtcctctcatcgatcagaaggaagaaatccatggataccatcattctttcgctcgttgcatctgtctgcacgtttctcatcttcatctactggctgtcgaagtaggtttaccagagcaaagatattacagtgttgtaagcttgggaccacaccaccagtaccggtacagatagtcttcattggtgtttgtacaatattattggttgattgaatgctgttacgattcgggcgtgctgtagccaccgtgtctccagctgtgcaactgctgccaatactgtgaactgaactctgtacctcgtgtacttcggcataactaagggtggagcaactggcgttgctttagctgccccatgttggcatgttgctcagatgtcggcttaaaggtggatcttcacctatgactatagttgacaatataggctctatattttatacaataaaatataaggatgaggctctatttgtttttatttttgaactaaaaataatttagaaccctatcaatttgtaaagaaacatttggatcacgatctattaccacccctacctatgtcgtaagcctctgttatcagacattttcgagtca

SEQ ID NO: 29590 - DNA, 1250 bp, Zea Mays
gtagcattgcaccactgggctcggcagcggcacagcactgcggaggaggagcacggtcggtcgcacccggtcggtgagttgaccatgccacccgacctgacgcatctcccttcgccaaacacatcggcgcatcaaccaccccttccgctcatcctcttccctcccaccgattcgcccgctggctcgccgcccgcccgtagcctgcgcccgctcgagatctagaccagacgccgcagccgcggccgcgggctgacaggatctctgtcctccctacgcggcgaaccgctaggacggcgccgaagacgacgagggagacggggtcatggaggcgtcttcctgggacgcccttcgcaagcaggcacggaggttggaagctcagttagatgaccaaatgatcgcataccgtaaattggtttctatgaaatcagatggttcagagaatgatattgagtctgatatagaaagatcactgaagcagttgcagcaagtaaattcgcaaatgcaaacttgggtatcatcaggaggttctgaagttctttctcatactctgactcgtcatatggagattttgcaagaccttactcaggaattctatcggcttcgatcaagtctcagggtgaaacaacagcatgcttctctccttgacctgagagattttgacagagcaaagtttgatgttgaagagccatcagactcagctgatcaagctcttctcagggaacaagctgcgattggcaggagtactggacagatggataacgtgatatcacaagctcaggcaacactaggttctctcatgactcaacggtcaacattcggcggcatcactacaaagataagcaacattaaccatgtcctcgcgtctatcagaaggaagaaatccatggacactatcatcctttcccttgtcgcatcagtctgcgcgttcctcatcttcatctactggctgtcgaagtaggtttaccaaagcaaatgtattacggtgttgtaagcttgggatcacactaccggtacagatgatcgtgattggtgtttgtacaatattggttgattgaatgctattacgattcgggagtgctgtagccaccgtgtctccaagctgtgattgattgggcgcatggattgagttggcctatcagcaacttatattataatggagggaaaaaatcatttggtgttattgcacgaagaacatgaaagtggtcctacaatgaacaagctatttttcagattggatcttgaagcaatga

SEQ ID NO: 29591 - DNA, 1871 bp, Zea Mays
aaaaaccatgtaaaaatatatctaaataaaatataaaataaaaggctcgacgtcgtcgtcacctctctcgccgtccacgagtcacggcgggcgggcggcggcggcggccgggggtcccggttgcacacggctcgccaccatgcctgaccccaccaccaaactcccctctccacgcccccgccggcgccgcaggctcttcagcctctgcctcggcacagcgctcctcgcgctcatcgtctccgcgctcgtccacgtcgtcgcccagccgccgggtcccgctcccgcctccgcgcgcttctccgtcatcatagacggaggcagcacgggcacccgggcccacgtcttcgcggcggggcccgacggccgcccggatctggcgcgctccaccgtgatgcgcgtctccccgggcctctcgtccttcgccgccgacccggcgcgggccggggagtccctgaagcctctgttagattttgcgagggataagattggcggcgccgttagggaggcggaggtgcggctcatggccaccgcagggctgcgcctgctcgaggagcgcgcccaggaggcgatcttagcgtcttgtagggacgttctacgagcctctgggttccggttcgaggacgcgtgggccaaggtgatcccaggctcggatgaaggtgtctatgcttgggttgcggcaaattatgctcttggaagacttggaggggatcctaacaaaaccgttggaataattgaacttgggggcgcttcagctcagcttacctttgtttctgatgaagtacttccacccaaactgtcatataattatacttttggtgaaacaacatacactctctataccaacagctttttaaactttggtcaaaatgcagctcaagactcattccatgaaatgctgaggtcaagaggctctttcaaaaatggtacacttgctgatccttgtgctcccagaggatattcacgcaatgaaggtgcttcaaggtcaacattagagaaccagtatgttaataatgggactggaaactttacagagtgcatatcttcttcacaacttttactgcaaaaaggaaaggaaaagtgccagtatcaacaatgtcacctgggatctacttttgtacctgagctgcgtggatacttcttgggaactgaaaatttatattttacttcaaagttctttggacttaagaagtcttcatcactatctgatttcatgtttgctggagaacaattttgcaaccagcatttgtcgagtcttagaaaaaggcatcctaataggtcagatgaggatttttcacggtattgcttctcgatggcatacattgtggctctactgcatgacagtcttggtgtaccactggatgacaagaggattgagtattcaaaccaggttggagacattcaggttgaatgggctctaggagctttcatcacactgatgcaaaatacgagtttaaagccattacacaccaccgcagaatcaacccatagcaatagaccattgtttgctgtgctgggaatgtttcttttatgtggagtactctttgtatcaagatggaggaagcccaagacgaaaatcatatacgacttagagaaaggccgatacatcataacacgcatcagctgacgctaaatcttgtgcagaagaactatatttatacgacatgaatagatgctgtgttgtgcaacaatgtacgagttcaattctttgtgtttttacctttaggtagcagagctgggtgggtggagcaggaagatagcgcatttgtgcgtatagaagaatgatgtgtagaacaaattgccatgtgttaattgaattatttgatgaataattatagttgctttgttcatctaatgaggtcgatatttctcac

SEQ ID NO: 29592 - DNA, 3691 bp, Zea Mays
cgtggaccggaccggagcgggatcctggacggatcgcaagctggacccagtaatgaccgtaatacccaagctgctcttgttcttaatgcttcacgacgttttagatatactcttgaccttaaaaaggaggaagagaaagagattataaggaggaagatccggtcccatgcgcaagttatacgggcagcatttcttttcaaagaagctgggcaaaaagatatcagagaagcttatactggtataaatcttgcaacggcctctcgcagttttccaattgaactggaaaagcttaacacattaaacagggaccatgacagtgttcttcttcaagaaattggaggagttaagggattgtcagatttgttgaagagtaatttagagaagggagttagtccaaatgaggatgaattattacaaaggaagaatgtatatggatcaaatacatatccacgcaagaagagaaaaaacatactgcgttttgtatttgaagcttgccaagatttaactcttgtcattctgatgatagctgctgccatatcactaacattgggtatgactacagagggtgttgatgaaggatggtatgatggcggaagtatctttttagccgtttttcttgtgatacttgttactgcaacaagtgattataggcaatctctacagtttcgacatctgaatgaggagaaacagaacatacaagtggaggttgttagaggtggtaaaagatttggagcttcaatctttgaccttgttgttggtgatgtagttcctctcaaaattggtgatcaagttcctgctgatggtgtcctgatatctggccattctcttgcaatagatgaatcaagtatgactggagagtcaaaagttgtccacaaggatcaaaaggcaccattcttgatgtctggttgcaaggttgcagatggctatggttctatgttggtaacaggggtgggtacaaatactgaatggggtcagttgatggctaacctttcagaagataatggtgaagaaacaccattacaggttattctctgtaaggatagtgcaaattctcgaatggacaattactgaaggctctctttggtttatgctttgaccctttttaggttcgcttgaatggtgttgcaacttttattggtttggtgggcttgtctgttgctggtgcagtacttgttgtgctttggataaggtattttactggacataccgaaaatcctgatgggacacctcaatttgttgctggaactactggtgtgaagcaaggatttatgggggcaattagaattttgactatcgctgtgaccattgtagttgttgctgtgcctgagggactcccattggcagtaacactgacgcttgcatattccatgaaaaagatgatgcgagacaaagctctggtgaggcggctctcgtcatgtgaaacaatgggatcagctactacaatatgcagtgataagacaggaacccttacattgaataagatgacagtcgtggaagcatattttgctggaacaaagttggatccatgtgatgatgttagccagatgtcagacagtgcagcgtcacttattattgaaggaattgcgcagaacacaacaggaactgtatttctgccagaggatgggggagcagctgaacttactggttcgcctactgaaaaggccattctttcttggggccttaagatagggatggatttcgacgatgtgaggacaaaatcttcagttattcatgtttttccatttaactcggagaagaaacgtggcgctgttgcagtacagttagatgatggtgttcacatccactggaaaggtgcagctgaaatagtgttatcatcttgcaaaagctggctttccgtcgatggctctgttcagtcaatgagtgctgagaagcacgatgaattcaagagatcaatcgaagacatgggagcgaattcattacgctgtgttgcttttgcatactgttcctttgacattgaaaagatcccaatggaagacataacaagctgggagttgcctgaggatgacctgactctgcttggcatcataggaataaaggacccctgtcgcccaggtgtaagggatgctgtacgcctgtgcactactgctggtgttaaggtgcgcatggttacaggagataatattgaaacagctaaagctatagctctggagtgtggaatactagatgcaaatagtgttatttcagagccagttgtaatcgagggaaaagtgttccgtgagatgtctgaaagtgcaagaggagaggccgccgacaagataattgtgatggggagatcctcgccaaatgataaacttttgcttgtccaagctttaaaacgaaaaggccatgttgtagctgttactggtgatggcacaaatgatgcccctgcattgcacgaggccgatataggtctttcaatgggcatttccgggacagaagttgctaaagaaagctctgacattataatcttggatgatgacttcacgtcagttgtcaaggttgttcgttggggacgatctgtctacgctaatatccagaaattcattcagttccagctcaccgtcaatgttgctgcacttgtcattaatgtggttgctgctgtgtcctctggtgatgtgcccctaaatgctgttgagcttctgtgggtgaacctcataatggacacacttggagctcttgcattagcaaccgagcctccaacagacaaccttatgaagagaaatcctgttggtcgaagggaacctcttgttacaaatatcatgtggagaaacttgtttgttcaggccctttaccaagtagcaattcttctgattttcgattttgatggagtaaggattctgcgtctgcagaatgaaagccgatctgatgctgagaagataacaaatactttcatcttcaacacatttgtattttgccagatcttcaatgagttcaatgcacgaaaacccgaggaaaagaatgtcttcaaaggggtcacgaagaatcacctgttcatgggaataatcggtataacgacagtatttcagatactgataattcagttcctggggaagttcttcaaaatagtgaggcttggttggagactatggttggtttcagttgctatcggccttgtgagttggcccctggcttatgtgggtaaatttattcctgtgcccgtaagacctcttccggactatttcaaaccccgctgttgttggaaaccgccgcgccgagacgaggaggaaggtgggcagagctaaagcgcaacgagtgggcagtgtaaataggcacgtgataaaaaaatggagataaattgcactggttgattccatggtagcagcatcctggggatgtacgcataagatggcaggtagtcggcctcgtcgttttcttctaggagaagcagtcggaagaaaagaagtactatacagaagccaaacttgtctacccctatccagctggtgtgtctgctatgcggcagcgaaacttgagtcattagattgtagcctgaatgaaagcagcgctagcttgcgatgtagcagtacctttttttccctggcgatatcatctgactgtaaatttgtaaatgctttcggactacgagttgttcttatttttcatccacctcttctctacggaacgtttttttctatataagaaaataaagtcaacagagcagttctaaaacgactgttttttttttcctgaa

SEQ ID NO: 29593 - DNA, 1648 bp, Zea Mays
acatatcacccgcttccctctgttgaatcctccttccgcgccgccgccatctcctcctcctctgactccggcggcctcacgccctcctcacgctccgcaacgccgtacctggatgttggtttctacttcgactctccgagggatagagaagagacccagtgccacaaggttcccgtagtctgtaatcggggagctgagaatctaggccataggcttcttgaagccgttgggagacaaaggaggccggacgagcgagcgaacaaccagatggaggcggtggtgcggaaggtgcagcagcgggtgaggaaggcgcgggaggagatggatcagtgggatgacctcaacactcggctcctctcccaattctccaatgctgccgcggtcatctctcgccttcaggcccttggagaggacaagaattatggccccttgcgtgctgtacccaacatcagagtggacctcattgggaaccagatggaggttctggagctcattttcgttaaaattagggagacactggagaagttcaatgacgtcgtgaaagctttaaataaggctctgcgtgataccaagcagatggtgagaggcgggtcggcactcacggcgaaacagatgcagttacaagttggaattttgccatcgattgcagaatgcttggatggatttcaaacattatgtgaaatgcaccatgatgagtttacgctaaaatcatcagctatctccttgctgacttggaagacatgttccagtgacattgctgtactacgccaactcttagtagaccagccaaacattccaaaagatgaagtccaatccatattcgacattatatttgcagatgaaatttgtgagaccgagtcagtgtggaaactttatgttaacccaattgttgaggcattgtggacgaggcaagtcttcatctctgtcagcaatcggtgattgaagacccagaggccggacctgaccattgtgtgccggtcaccggagtgtgagtggtctgaacttgggatggtaatggctttgcctgtccatcctgcggggtgtggacagtgatagaacttgaacaggcttgacccctcctagcaagggattgtgaattgtgatcaccaatccatggttcagacttgcaccaatcatgtggcttgcgttttttagaaataggtgcaccattgcctcttccaggtggtgcccagaaggtttcgaccaaggtctgtgaaagaagcactttgcaatcagcggtgggttcagatatatcacatgaacgagcagacaaggaaacattctaacttggaaaaagtttctattgggttctattcggcaatggaaaaacggtgtatcatgtaaattaaactatactagttcactttggttttgtaagttaaacttctttaacgctgatcaagacaataccctaaaaaagtggtacatgtatgcactgcacttgtccaatacattatgcaactcaacgcaccaatcacacagaggcctaggactaggaggcctgtgggcaccagagactccagaagctgagaaacgttgacatcactgcatcagcatcacgaggaccaacagcggacggaaaaaaaacaaaaagaaatcacaacggacgggttaatttttgtaatctgttaatgtatactagagttac

SEQ ID NO: 29594 - DNA, 843 bp, Zea Mays
tcacatgtcagtttccagcaaggattggccaccaaggtcgtggagtatatgttgcccaattttaatgaggtctggtgggatatcattaccttagatatcttgatatgcaaatagtttggtgagacatttgaagataattaatgttcatgtcacaaacattcagttaccttgtttatattaatgtgatgtgcaataagttagaattaagcagccgacatgccctccgcttgcttgattttatacaatttctttacatcagatatatatctattagtcagaaaggaaataaaaactaatacatatttgacatacttctgacatcacattttgtttgactatactatttaatgttatgccacttgtcaaatatgcatggtcttgggaatccaagaagaattgttggcatttgtaataacattatttggtaatgatagttctaggttttctacttaaacaacaattatttttgatgcaggtgtttggactggaatgcgcacagtctgttactttgatggcaaaacgcaacgaagtaccatgggtaaggatgtgctggagaatgaaagcttctgtcttaaaacaataggatacaagaagcttgcaagtggttttgtgaaggcttttgtgaatcacttgaatcattagttcttttaagaatggttttgtaaagcgttagcaaatatgtgtaaaacacaataagatgtgtggcaaagtcagtgatctagttgtacagttttttatgtttatgtgatatgtggatatttcattgtgcaatgttaatgaactgtgtatgtctatgtgattatgtgtataaaatatatgttttgtggtgcttttgtgataata

SEQ ID NO: 29595 - DNA, 3406 bp, Zea Mays
cacaaggaaacacgagcgctagtggcaggtggcagcgagtgagaaggataggggaggatggatttgtccaggttcgcctccggcgtcgggcccagccgcgtggccccgcgggcgggcctgcagatcggcgccgccgagaatggcttccgggcctgctccctgcggcgagcacggcaccgcggcggcgggaacgggaacctcacggccgccgcgtccaccctccgcggccgcggcgggctcttctacctggctcccacgcgccggagtcatcccagtctccggctcttctacctgcttcccacgcgcgggagtcatctcagtctccgcgccagatggcggccgcgctgccagggcaacgactcattggcctacgtcgacggccccttggagaccgctaagggctccggcgaggtcgacgacaacgtgcccaccagctcggggtccgacgacgacaggggcctcgccgacgtcgacggcctcagggagatgctgcagaggtccaggaacgagctggaggtggccagggtcaacagcaccatgttcgaggagaaggcgcagcggatatccgagtcggccatcgcgttcaaggaccgcgccgacggcgcccagagggatgtgtgcgcggccgtagccaccgtgcaggagatcatcagcaaggaggcggacgccaaggaggccgtccagaaggctaccatggcgctgtccatggccgaggcgaggctgcagctggccgcggaggcgctggaggccaaccggggctcggtaggcccgacggaggttagcatcgaaggcatggagcaggaggccctcctgtctgcacaggaagagattaaggattgtcgggcagccctgtcgcggtgcgcggaggagctgagtcgtgtccaggacaagaaaatggagctgcagaaggaggttgataggctgacggatctcgctgggaaggcccagatggatgcgtccaacgccgaagaagatgttgccaatataatggtgctggctgagcaggcggtggctcttgagatggaagcctcacagcgtgtcaacgatgcggaaatggtgctgctgaaagcggagaaggccatagcctcgattgataccgtggtggagctaccgtcacctgctgaagagcagagaagcactgaagaagacagcgtttctgaagggtacgagtatagcagcgatgtcactgatgatgtttatgtaagggatgaggtgtcaagtatcgagcgcctaatggtcggtgacttgactgttcagggctttgagcagcttgaaccatcccgtgaaatatatgatgaagaaagcagtaataagatgtctgttgagcctcagaaagaagctgagtctgattcagataagtcgaaacaagggaagaagcaagaaatggaacgaaaggagcacaccaaggaaccactgagtgctccaaaagcactggtgaagagatcatcccgtttcttctcggcatctttcttctcctccaaagttgatggagagtttacacctacatctgtcttccgagggttaatgaaatcagtgcaaaaacaagctccgaagcttgttgttgggatattgcttctcggtgcaggggcattcttcttaaatagggctgagaagagtcaactatttcagcagcaaggcattgccacaagtattggaaaggtaacctccacaacaaagcccatagttcttgagatacggcgaattccacagagagtaaagaagctaatagagctcttacctcatcaagaggtaaatgaggaagaagcttcacttttcgacatactatacttgcttctggccagtgttatttttgtaccattatttcagaaaatccctggagcaaatactggcttaatatcctgcacctgcagctttctgtggaaagactaagctcgatgaagaagtgctggctactactgctgctgttggtgtgatagctcattgttttgccgcactaccaggaccagcagcaattgttgttgggagtggcttggctctgtcatccacagctgttgtcttgcaagtattgcaagagcgtggtgaaagtacgtcacgtcatggacgtgctacattttctgtgttattgttccaggatttggctgtggtggttctgttgatattaatacctctcatatcacctaattcttcaaaaggaggggttggtttccaagcaatagcagaagccatgggaatggctgcagtcaaagcagtagctgctataactgccataattgctggaggtcgtctgttgctccggcctatttacaaacaaattgctgaaaatcagaatgctgagatattttcagcaaatacactccttgttatttttggcacaagtcttcttacagcccgggctgggttatcgatggcacttggagcttttttagctggtctgttactagcagaaacagagttctcattgcaggttgagtcagatatagctccctatcgtggtcttctgttaggacttttctttatgacggttggaatgtctattgacccaaagctgcttctgtcaaacttcccagcgatctctgtgatattgagtctcttgataattggaaagacattgttagttacatttgtcggcagggtgtttggggtttctgctatagctgccattcgtgttggcctcttgcttgcacctggtggtgagtttgcttttgttgcctttggagaagctgtcaaccagggtcttctatcacctcaattaacatcgttgctatttttagtcgttggcatttcaatggctctgacaccatggttagctgctggagggcagtttctggcatcaaaatttgagcagcatgatgtgaggagtttattgcccgtggaaagtgagactgacgatttgcaagaccatatcattatattaggctttggacgtgttgggcagatcattgcacaactcctgtcagagcggttaattccttttgttgcacttgatgctggaagtgatcgggttgcagctgggcgtgcacttgatcttccagtgtattttggtgattctggaaagcagagaggtactgcacaaaaattggagctgaaagagcttgtgctgctgcaattactttggatactcctggtgcaaactacagagctgtctgggcgttgaacaaatatttcccaaatgtgaagacatttgttagagcacatgatgttgatcatggtgttaatttggagaaagctggtgcaacggcggttgtccctgagaccttggagccaagtcttcagctagctgctgctgtccttgcacaagcaaaactcccaatgtcagagattcaggaaaccatcaacgagttccggaatcgtcatctgtcagagcttacagagaaagcttctggcaaacaaaaggatatgcagcgaaacatggcaaaccagatttcttaatggtagtaattcaaag

SEQ ID NO: 29596 - DNA, 3184 bp, Zea Mays
ggacatgtgcgctttctccgcctttcctctcgtctcctcgtccgttgggggctcgggcgctcggctggatccatttcgcgtggcgcgcgcggtcgacgggaggtcccagccagccagcgagagagggagccggggccgggcggggcggcacctcgcgagatggcggcggaagcggacgacccgtcgctggcggcgaccctggagaagttccgcctctacgagacgcgcgcgaggttctacgtgatcgggagctcgcgggagaagcgctggttccgggtgctcaagatcgaccgctccgagccctccgagctcaacgtaagcgaggaccccgtctggtactcgctgcaggaggtcaagagcctcctccagcggatcgacgagggcaaccgatccaccgggggcctcgccttcgtcaccaaggcatacggcatcgcaggttgcatcaagttcctggagtcatactacctgattttagtcaccaaacgccgtcaaatcggttgcatttgcgggcatgctatatattgtatagatgagagccagatgatcaccatcccacactcatcagtgcaaacagatgttgcgacctctaagaatgagctgaggtacaagaagcttttggctagtgttgatctcaccaaggatttcttctatagctacacatatccaattatgcagagcctgcaacagagtgttacttctgcagggatgaaagaaatgccttatgaaaatttgtttgtctggaacacttttctgacagagccagtacgttcaaggtgccacaatactctctggacagtagctcttgtccatgggcacttcaagcaggtcaagctatcaatttttggcagagagataaatgttgttctcagctctagaagatcccgacacttcgccgggacacggtatttgaaaagaggtgtgaatgaccatggaaaagttgctaatgatgttgaaacagagcagatagtctttgaagaagaggctggttcctggaagggaagaatgagtgccgtagtacagatgcgaggatcaatccctctcttttggtcacaagaggcatctcgacttagtcctaagcctgatatttttgtgcagagatatgatcccacatatgaagcaacaaaattacattttgatgatctcgcccggcgatatggacatcctatcataatacttaatttgataaagactgttgaaaaaaggccacgtgaaatgatgctcaggcgtgaatattgtagagctgttgaatatcttaatcaaaatgtcccagaggagaagaagttgagattcatccactgggattttcataaatttgctaaaagcaaatctgcaaatgtactgggtgttttaggaaaagttgcgggtgaagcactggacctcactgggttttactacagcggaaagccaaaagtccagaaaaaaaggttaattcagcttagtcgaactagcactgcaagggatggctcccttgatataagggccagttctggagatctttcaaggctcagggatggctcccttgatataagggccagttctggagatctttcaaggctctctagtaatgctgaggcacttagttctacaggctttcaagatatgagaaatcaggctaacaaacaagagtttcttggtgatactccctgttaccaaactggagtgctccgtacaaattgcatagattgcctggatcgcacaaatgttgctcagtatgcatatggccttgctgctttggggaggcaacttcatgcaatgggactgacagatgttttaaaaatccaccctgatagcagcattgcttctgctttgatggaaatgtaccagagcatgggtgatgcacttgctcatcagtatggaggatctgcggcacataacacgacatccagtactgtccaatgaacacaatttcaggttttccctgagaggcaagggaaatggaaggctactactcagtctcgggagttcctgaaatcaattaaacggtattacagtaatgcctacactgatggtgagaagcaggatgctataaatctatttctggggtattttcaaccacaagaaggaaaaccagctctttgggagctggatactgattactatcttcatgtgacgacagctggggatgatcttatgtctgatagctaccacttgagttctgcacctggaaataatgtgttcgtggggtctggagctgcattgaaccctgggaccatattgagccctgtcccagcatgcaaagaggatttctcacggaagaagcttacttcgttcgacaaacttatagaaagaacatgtagttctataaggaatgtaaggcttcattgtgacgctgatctaaagccaagtggaggtgttggaacttctggaatggcaccagatgcagctgagatacagcttaaaagccccaactggttgtttggtcaaaggaagcatacggagacaatttcaaccgcaagagttgccccggttgaaaacgtgaacgaggggaacagagacgagtcaaatgtgtctctttgtggggaactaatttggctatcctcctcagttgaatcatgcgaggaggacattttcagaaggtaccttgcattcacgacagcggatgtagagaatggctggtatggcggaacactgctatatgaccgagatgaaaacagcggggcttacaggcactattctgagctctgccagggagctgtcatggatccctttgagcatgaccctgagaaagagcggcactacgcggaggcccttagcgtggatctcggcgatgcacgggtggaggccgaaatgcaggccgcgctggatgactaccaggtcatagggtcggacctgagcatcatcccttcgtgcggagcactcgcagaggacccgagccagctgacgaggtggatcattggagatgagaggctgcttgtgggtgctgctgcgcagtagaccggtggggttctgtcttctactcttctgtggaaggttgtacagagcaacagattgccattcaccgacccagcctttgtgttttatagatacttccctgaaacaattactccatgtatttagcagcaggtgttttatagacacttccctgaaacaattactccaacacgtgcatgcaatttattgttgtgcagcaggtggtattgctgctgggattagctttggcaataatagttgattgttgtgcagc

SEQ ID NO: 29597 - DNA, 1752 bp, Zea Mays
attttaggcttcatctatataattagattatatttaatatcattaatcatcattcaaacatttgatacgataaagattaaaattttagttgttagatccaaagccattcaaaataaaataactggccggctgctgcgttccaattcaaatacacaatcaacaggcacctgtatattaattttggtctctcaacgatgtcctcggaattgagccgctggcgacatacataagcaacagcctagtcgccatcttttttgtaccgtacgtgccttgcgcccttgcccatccaagtccaacctccctaaactactcctgcgtgctgcctgagcgagtgagcggcgatggaatccttgggtgtgctgctcctgcacccgctcgacacatacctggagcaagaactggatcgccgctgccgcctcctgcgcctctgggaggtgccgcatgaccgccgtggagaattcctccgtgcccacgcatcatcgatccgcgccgtggtcattggcggcggctcgggcttcggcggcaacccggctctcatcgacgacctcccgcggctcgagatcatcgcgtgctacgccgtcggctacgactgcgtggaccttaccagatgccgcgagcgcggggtccgggtcaccaacacccccgacgtgctcaccgacgacgtcgcggaccttgccgtgggactcgccatcgccgctctccgcaggatcccgcacgccgacagctacgtccgcgccgggctgtggaaggccaatgatggccactacggtctcaccactcggtggcaaaagggtcggcatcattgggctgggcaggatagggctttccattgccaagcgagtggaaggcttcggttgcccggtctgctactaccagagaacaaggcaggatgcgtaccccaactacatctatctcccgacggtgctccagctcgcagcaaacagcgatgtcctcgtggtggcctgctcgctgaacgagcagagccgcggcatcgtgagccgcgaggtgatcgaggcgctcggccccacgggcgtgctcgtcaacgttgggcgcggcgcgcacgtcgacgagcccgagctcgtcgcggcgctcgccgatggccgcctcggcggcgcggggctggacgtgttccaggccgagccggacgtgccgcaggcgctcatggcgctcgacaacgtcgtcctggcaccgcacatgggcagcgggacgcatgagacccgcaaggccatggcggacctggtgctcgccaatctggaggcgcacgctctcaacatgccgctgctcactccggttgtctgacactgacaataattacttttaagccgagcttccgcggcatgtatggaatttggtcacttgttttcaaatgctgtgaattaataacaaagcaacacaattgttaagtatcaagaaactttgccttccaaagcattacctcctcgcggatataatgtgttgtaattttagggttttctctttattaaaaaaatattgagacaagctaaactgggccacctcaagacccaataggccgggtagcccagctggctggtgagagcaactagggcaccagggtgccgagctccgaagttggagcagagaagggagtgggggcggcggcaattcaagggaagtcgtgctttgcgctgctcgttggtccgatctgctcgcaaatcagttggtctcctctccacttcttgtctccataaaagcatggccggtaaattgctagtgttggaactcggctcttct

SEQ ID NO: 29598 - DNA, 2235 bp, Zea Mays
attgctggcgtcgtggtggccgatacccaatagtgcattcatcccgttcatcactgctggtgatcctgacctggcaaccacatcaaaagcattgaagattctcaattcctgcggttcggatgttatagaggttggcgtaccatactcggatccactggctgatggaccagttattcaggcttctgcaacacgggcgcttaagaaaggcactacactcgattctgtcatagaaatgctgaagggggttacacctgagctttcttgccccattgttcttttcacatactataatccaattctgaaacgtggtgtgggaaacttcatgtcttttatcaaacaagctggcatacatggacttgtagtgcctgatcttcccttggaggagacagcgttgctgaggagcgaggccattatgcacaacatagagctggttcatacccactctcatctttgcatgcaccacttgcacaaagtttgttgcgtacttgtgttgctatctgggtgctaactaaattcttactcgagatgggacctatcaaatcttcagattgggctctgcccattccagacctgcaaatatacacagttgcaaaagatcttctgggcctttgcagcaacccagccctagaagcgggtctagctacttgggctcacacatgtcaacagggtttgtccagtccactaaattcaggataggttacatcaaggccttttttttatttcttgtaacctggtttggtaccacaccgaatagctttgcttattaatcatggtggaccaatcaacagaatagatatcttgagtgtaatgtacttggtatttttataaaagcttcctttatcgaaaaaaatcttgagtatcagccatataccatttttttttgcatgattgcttgcaggtgctgcttacaacgccaaccacgccaacagatcggatgaagggaattgcacaagcttcagaaggatttctctatcttgtgagcgctgtaggggttacaggtgcacgctcaaatgtaaacttacgtgtagaacaccttcttagggagatcaagaaggttagtaaactataacctgtttgtcgtcagtaaagagtgaacgagttttaatgcaccagcatggctagagaaatttgcgttcaagaatggttatgagaaaattcctggtatgccatcagattttatactcatcccttgtgtgccactgagtgacatataggtatattttttggtgtctatgacatgtggggccagtggcatacaaatggttatcttcctggctttacaggttacagacaaaccggtagctgttggtttcggtgtatcgactccagagcatgtgaaacagatcgtgggctggggagcggacggtgtgattgttggcagtgcgattgtgaggcagttgtgtgaggctgctactcctgaagagggtctggaaaggctcgaggagtacgccaggagtatgaaggctgctatgccgtgagctgatctcactccccgtcacaggcaaggtaaatagaacatggttttagcaatattctgggcatgggtttggcatccagaactcatcttagtgctgtacgggtcgttctcgggtggtgagaacgaagtctggctttgcctataatagaaaagggttaaactgagttagtgcgacattttgatggaaaagcgagtgattgcgagatatcagttcatgcttattggcagatcctttttttttttttttgctgaaagatggaaatgttagggatgaggttgccctggcctcttgagaggataggaataagagaggataagttcgttatgatttatatggctttccgcttgaaccccaccagctggtgtccatggggatgcgggcagagcagtgtctgattggctgcactgaaaatgacattaccttcagacaattcgccttgctctcttctggttctggagtactactttcgaggtccgtcagactgggtcacaagatgatcccaaacggccccagatgctgggtttttggacaacggaaagtcgattctgacctctgttaatgtcggccactcatgggtcatgaccaagccatgtttatggtcaaatcagtcccggatgctaacacgcttctctaatctctatctacggggactttttccggtgcttatcgtatcattatcatgcatgttactggtagttacatgttgtctgaacagattctttagctctgccatggcagcatgaagtgtatctggatg

SEQ ID NO: 29599 - DNA, 3478 bp, Zea Mays
cccttccttttcgcagtccgggcgtcgtctccatcgatcgcatctttactaactattaagagcctattgtagaccgcccccgcctcctacgcccgcccgcaagcccgcaaatcacgccgcgaaccgccgcagactgaccccgactccctacgcccgcccccaatccagccgcaatccaccctgcgaatgcggcgaccgtcgcgttccggccggccgcccgtccgcccgccgctatggcactatccactaaccagacacagcgtccagccaagcttttgccgccgcccacttctctcccacctcccctccactcttttgcttgtcgcggggttagaatcccatggcgctatcggccgagatccgcttcggccaccagatcccctatcccactacgacactgactcctacgaggaggaggaagaagaggaagaggaagacgaggaggagttcgagggggtggagggcggaggagatggatgaggtgacggtttcgtctccgctgatgctgccggcaacggaggccaggggaggggtgtccgtggtcgagatggtgatgggggcgcttcggaggtcgctcatgttgtgcagcagcagcgccggcgccggcgccggcgtgcgcgagccggagcaggaggaggacggggtgactcccccgggtggtatgcaaataggggggccaacggatgtgcggcacgtctcacacgtcaccttcgaccgcttcattggcttcctcgacctccccgctgacctcgagcccgacgtgcctcgccccgtgccgagcgcaaggtcagtgttccaacaccttttactccccaattgtttgatctgtctatgcgcatagtttcctgcacgggatccggcggcggccctgggcaaatgggcggccgagatcagagaccctagcaagggcgtccgcgtctggctcggcacttacagcaccgtacgacgccgaggctcgcaggatacgcgggaagaaagccaaggtcaatttccgggatgaagcggcggcagcaggtgctcagaagccagccgcaaccgcaactactccaactgcttgtgccagcgcagcgaggctaggtcctccaccgccgaagttccgtgctgacgaggttttcgggaacatgaacggtggcagcaacgatctgttcgcgattatgttcgcgttcagtgacagtagtagtcaggtcgttcgtgtggagccaggtgagggcgccgccggtttcctccccgcagtggaagtgttggacgacgagcctctgttgcccggcagtaagaggtctgcggctaacatgctgctgctctccggccagagcagcgactcgtatggctcttgtgacttggggtgggactgggacgatgacaccatgacctcagactacgcctcagtctttgctcctgctgctcccagtaacgttgtgccagcatggtacacgcaaggtggaccggcgtcgaagagaacgaggagcagctatggctacggtgtggcgatgctccagcagggagatggcgcgcaggccatgccgggcggctttgaccctgagacgaactaccagtaccagctgttgccttacgtcgtcgagagcagcccgtcggacggcgcgtcgacgcacgacatggactgccttcaaatgatgcgagctggtgatgttccacaggatggggcgagcagtggtggtggtggtggtggcggcggcgatatctggagccttgacgagctgctcatggccgctggcgcttactgagaaaagctatgtgcatcgcatgtactagacggttacttgttgtgccgtgaatggagtgtttctcagtttcgttttgcttttaaatttttttattattccaggtctcctgcttgtggtgatgatgcaggagagccatggtgggtaggtactatgcttttgctgccagtggaactgtaagacaatgtttatatagtatctactatgttggtgcgtcgatggttggttggaggcgagtttgagactgattcagtaatttaccttgtgttctgatgcagtcataactatcggtattctgatatagtaatttaccttatatagtttgagactgtaagacaatgtttatatagtaatttaccttatatagtatctactattttaattttgtgttctgatgcagttataactatcggtattgagccttgtgtggagcagaaacttgtaacataatatgcataatttgaggattatatgatttctgtgtagttgcctttttacttctgtatttcgacatcattccattttttttgttgttgcaaatcatttgattccttgaaacagaaataaatacacaatacatgctaatgaaaatttggcaatacatgttttgctttgtaaattttgatgtagtcattgcaaatcatttggcatgtattggacgatatctgtttgcattcctgatcttctcaactaccaggtgaaagcatacctcgatcgcaagtcactggcaaattctctgaacgacataaagaccgtagttatgcaacttcacgacctcatcagtgttatagacttatagtcatcattgttacactactatttatgggcattgcgacaaccaagattcttgttgtcatctcgtcccagcttctggttgcgggattcatatttgggaatgcatgcaagactgtatttgaggcccttatatttgtattcatcatgcatccatttgaggttgctaaccgctgtgttatcgacgaaacacaggtacctggagagcaaaccaacgcattggcaccctacccacactgtaaatctcaaggacatcttggatgtgaacaagattaacatgtctctctcagtccagcacaccatgaactttcaaaacatccgggagaagaacatcaggaggtctgagctcgttatggagttgaagaaaatattcgaggagatgtccattcggtaccaccttctaccccagaaagttgaactcacctacgtcgactcgaacccactgcccatgggtccttctcatacaagatagaagatgggtgaagacttttaagtctcatactgacaacttgatccgtttcatgggatctgacaactgatggctagctgtgcagtctgttctgaagttactaaaactctgcatagtagatattagctcgtagaataatttgtcagataatgcatttgtaagcggtgatggtactggtgatcaatgctttgggattggccattacaccatttgattatctacaccgtttggtgcatcacaatcgaaaatgttgcgaaatagccactactaaagaaattcagctgggagattgaagtgggcctgtcgaaatgttattcttcacaatagtaccatgtaattcagctgtgagactggtagtcactcttgtgcatattttttgttggcaaaaatctacttcatgtccggtgttcaagaggttcctgagcttcaagaagaagcatagggggagggaggtcactgtaatcgactgcatgtcgcc

SEQ ID NO: 29600 - DNA, 7546 bp, Zea Mays
cacactttcaacacaggtgctgcgccggatgatcccaagagcagcaaacaaataataaacccctccaggcatacgcgagagcactctagtctcgagcacagcacaaggccgccggtcccttctctcccactcccactactcgcgctcgccgctggatcctccacccgccgcggcgccaggccggagatccagcagctgggaccacggaggtcggccggttgctccgttcccgctggtggttgctcttcggccgctggagatcggcagacggaagcagttgacgccacagggcttcgtgctgccgaattccccagatattctgggggttcaaccgaacccccatgcccgacaacactgggcttgaaattggccttaaaggctccaagggagccccaatgccaggaacggaaggaagagtggcaaaggatttgaagaaagctcctgcctccttggaggaaagcaatgcttctcgtgatgaggatcctggcggagggcctgccttgactgggaagaaaaggaaggaccggaggggttccgcggatgacaacaggaatgtgacaagaagggtgttgaggtccgacgccatgaagctgcgtgctgaggctgaggcaccatgtggagcgggtgtggaggttagcaaaactgatagtttggagaggaaacactgtgacactactgtggaggctgaggcttgcaaaagtagtgtgctgatggaagttgcctgcaatggtggggaagccaacggattagttaacttggatgcgagcgatgtttcggaagaatcaactaggtgttctgataataatatgggaatgcctggtgttcctgcaacagatttttctcaagatggtggcttagctcaaggtagcattgcagaatcagatgataagacagtcaagtcagatgaggtgtccgctgtaactcattcagagcagaatgactcccaagctggaataaacagttataatgctgatgaggcccaagataacaaagtgagacatgggccttgtcaggatgaggtcatagactcagcaattactaatggtgccaacacaagtacagatttaaccaaaaccagccctaccagtggatcagaatctgttaagcaggatgatagtaagcaggagaataatttggttcatactgaaggagtgatactccacagtggtgatccgaaagttgagaatcattctcaaattgaggacacttgtacagaaactgagatttctttgactgggaatggaagatgtgcagctgataaccacactgatcgaactgggtacactaagcaggaggagaggggcagccctgtgaacgaaaccaatgatatttcggcacatgacattgtttttacaaggagaggtagaaaatcatgtgaggcaaagcaggggacatgtgaagaggagtcacggtttgagaagcgagttacgagatcagctacagttagacagagagaagtttctggaagcttatgcaaaactaccacgaatgagactgcactaggaagcagagggaggaagggagatattattgctcactatacaaggaaagtgagcagtgcagtatctccaaaaggtcaccatgctgagctgggagaatgtaataccagtatggagaatcaaacagtgaaacaaaaggtggttgatcgaagagattcaggtgccactaagaatgataatgatgcgaatgacacaaagaataaggaatcagaaaagacagagatcaatctgaagacgcaaccacctgttggaagtgttagcattgtaaataaaacaactgtaggagctgtttctgtggtgggtcagagtatctctggttcagccatcactgagagaaatgatacagatcatactgattctgatggagttaaatatgaaaatatgactcttgtgcagaaactactactgtctgttggcgcgaagattgttgccagcaagaagagggtattggaagcaggtcctgataaaaccactggaaggtcaccaattgctttgccatccatgaaaaagacaagaaatacgtcttctgatcctgagatagatcaacctgataagtcttctggagagaagcttattggaaataactgtgatttgggcaataaacgtgttttgagggaacggcagcatcagaatcaaacatatttgtcaagcaggtcttctaaccagtctaatcaaaatgctatcaagcagacacaggatcaatctgacgatgatgacatcagcagcgatacttcctacaggagaactcgtagcggacgtcgtcgtggtgctgcccgtcttgccgtgccaaaacaagaggactccagtgattctgaagaagttgttgttgtgaaaaagaatcgacggaaacgtaagaaatctgtgcataaacacagggctggatctaagttgaagcatacttctggtagtcctcccaaaacaggtcgtttgggtagacctccacttgtcaaatctgaatgtggctgcttacctctgcagccaggaaaagggaaaatgaatgtgcctgaaggtacaggagctctacgcgaagaaaaacaaaaaataagtgatcagataaaggccatgcttctagatgctggttggacaattgatttaagacccaggaatggtagaaactacatggattccgtgtatatacatcctagtggcaaagggtcttactggtcagttacaaaagcatattacgtgttccgtgcagatatggaatctgagcagaaggaaagttctaaagaccatattctgtcaaaaaaatctgttggtagccccggcaaaaggcaggtctctagttcttcaggctgtactttaacagatgatatccttagcaaattaaaaagagttgttgtaaacaaacgaacaaccaaagtagagattcaaaggttgagacagaagaaggaaaagaagaatactacaaattcaacaagattgcatttaggcaatgaaagaaaaaagagaggtggctgtgctctactcgttcgtggatcgaacaaggagtctggcagcaccactgatggttttgttccatatgaatggaaacgtacgatcttctcctggctgattgatctgaatgttctatcagtcaatactaagctgaactgtttggatgaaagccactcaaaggttttactagagggttttgtcactagggatgggattaactgcagctgctgtagcgaggtcatttcagtgccagaatttgtgactcatgctggttctgaagtaaataagccatacagaaacatacttgtggatgggctagacattgaccttttgcactgtctcattaatgcatggaatatgcagtctgatgctgaaagacaagatttctttcccgttagcattgagggagatgaccccaatgatgacacctgtggtatttgtggagatggaggcaatttgatctgttgtgatggatgcccctcgacatttcacatgagttgtctaggactggaggcacttcccactgattattggtgttgttccaactgctcatgtaaattttgccatgaacattctagtgatgatgctgaagacactgctgatgttgattcttcattgcatacttgttcccagtgcgaagagcagtgtactgatccctgtttatacttactctgtagttcttttgaatttcgaaatcttttgacactttttattccattttcattattatcttactatattattttgatgttcaatcatgtctttgagtattttatacgataatgtctgcagatcatggagcctgctctcctgatattgattccatagctactaatctttctagtcagacaggcaatttattctgccaacaaagctgcagactggtaacgcttgtcagattattgttcttttttccttgaccttgtttctggatatgctaccttgtggttttcatgatcataatttaaatggtgacacttgctattttactttcatgtttgaggcagatatcgttcccttttttaacggctcatgttgggtttgggactaaaaggcttttgctgttgttttatgtttaagaccttaatcactaatgagatgtttggtttgaggaataagctagtccatcatcttcgcactcctcacttttttgtttggtttgcgaaatggaatgagttgatccattatcacctcatttgtcatagttagttagttagtactaacacgaggaatggggccatctcaccaaatttgaggaatagattcatgatgcaccaccgcatcttggatgaagtgattcctcaaaccaaacacctcctaaatatctgcaccatcccgctctgttagcttcctttcttgatcatatgcatatatgtttttccttctaatagcaatatcatagcaatgtacatatattcaggttgctggtttttatttacatggatttcattactacaagtgattacatatagtaaggtactatatgagtgtggtattttgtcatggggcggcaacccagggcatggaggcttagattggataagattgagttagttacttgggattagattagataatattgagttagttacttgggatccaagtcttcctatctatataaggatgaactgtacctccttaagaagaaaaaggaatgaagaagaattagtcctagatctctccaatagtctagtccctcccatgctgactctgcccggctaccttcccggcgctgactaggattcataacatatggtatcatgagtcaggtatcctttccatgacttctgctgcggacgatgtacgcacatggcgtgaggagctcgctcgtgccagggcagatctggagcaggcccgatctgctatcctccagctagtgatctactcacggcaaaggtggagtctgactgccgatcagcggcgacaacgcgactgcaggaggctgtgcatgggttcctggcgtgacgtccagtgtggcagcggcttgccgtcttcaggctacgacacgtggcttcctggcgcggcgtcaagcacagcaagcagcggcttgccctcttcaggttgcggcacttggcttcctgacgtggcgtcaagcacgacaagcggcaacacggttgcaggctacggtccgccgttccctggtgcagcgacttgcatcggtattgcgcgttgaacaacacgcggcacgtggggcgacaaggccttcagcagggttggccgatccttagccatgtggacagcaagaacaagtctggttgggtggtgctgtctccactggaactcgcggtagctcaggccgtaagactggtgagctgccacgtcttggcctttgcagcctggaagaggttgttcccatgggatccagggtggcatatgttaggttctttattttatttgttaataaattaaagcggagatgtaaaaggcttatagttagggttgcactttcacatgcatatcaagttagacagcaaggttgtttccatgcaccgagaacgagctgtcttcaaagggtgggggaatgtcatgtggtggcagcccagggcatggaggcccatagggataggctcagggttaggattagtgaataaagattagataagattgacttagatacttgggattagattagataaaataagattgagttagttacttgagagccgagtcttcgtatctatacaaggatgggctgtacctccttaagaagaaaaaggaatgaagaagaattagtcccagatctctccaatagtctggtctctctcaagccgactccgcctgactaccttccggcgctgtttatcacccctatgaactaggattcaaaacatatttgaactattatttagtgacttgagaaccttgtcattttaatccagctattaaaagctctactcttcttttggattgagtcgctatatttttatttctgaaactagacagttggtatttagtcataagaaatgtgtaatgcaaaaacaccatggaagttgtgtatttttgaaaatgctgtattaaacactattttttaccatcaaatcaaacacacatcctgtctagatcctttctatctatttgtggttttatttatcttctagtttattaatgtatgtataccctccctacaagccgcaactgacccaagaacttccaaacttcaaatggtatagttgcataatctgaaattactagttctgtgatgcagctgtttgaggaattgcagaatcttctcgcagtcaagaaggatcttgaaccagaatactcatgcagagttgttcaacgcatccatgaagaggtaccagaagaagtccttgctttggacaaaagagttgagtgtaactccaagattgctgttgcactctcattaatggacgagtgcttccttccgattgttgaccagagaactggcatcaacttgatacgcaatgttgtgtataactgtgatcaaattttgcccgattggatttccgtggattctatataattattttagaacgtggagatgaaataatagctgcagcatctgtccgaatacatggaaccaagttagctgagatgccgttcattggtacccggaatatgtataggcgacaagggatgtgccgccgacttgttgatggaattgaaatgcgtgcgccttacatggttgaaccaactgtggagcatattttcaaagatcctcagctctctcaatattgagaagctgatcattcctgctatcacagaacttgtggacacctggacatctaaatttggatttagtccactggacgattctgagaagcaggaagtgaaatccgttagcatgttagtttttcctggtacaggtcttctccaaaagccattgctgaagacctcaccatcggaagatcaatgctcccaaggagtcaatgaagattcgctttgctctggtgcaagtgccgaccccctaggttcggtggtcaaagagcatggggacaccagcaaagatgccgatgatggtaagatttggttgcagctttctgggcccccccaagctttatatggacgaaacctccgtttgtttttgtacctctcgagttttgactcagcagccagcatgacaaccatccgtttggcagaaagaggcttccggttttttgcagattagttgccggggcacccctgtagttgtactcagaatttgaccattgactcgtcggcctgggaaaagaatcagcccgtgcagtactgaaaagcgtttactccaaccaggaaccagctaacttactgtgcagctgaaaagtcagtatgcagaatgtggaggataatatcacttcttttgtttttttttggtcgttaacttagaactccgagggcgagtcgtcgtaaatgttacaccagttgttattttgttaatagctttttttttaaaaatgttttcgctagcgcattcctagaaccttctcatttctgtaagatagttctcgcctctgtaagataaactaatgtatgcgcaagctagaaatagtccgcctgatccgtcacgcggaattggttacctaaaccctgttaatgtttcgttttgcatcgtgttggaatgtgtgtgttcttcctgtgaaggaaagcttttgcgggtcattatactagag

SEQ ID NO: 29601 - DNA, 2466 bp, Zea Mays
acgaaacctgtgtgtgaatgtgtgatgagggcaaaaagcaagtaacccatctatctagggttggaagcttgtacatggccacctcggtggttgtggcacgcctcgcgggcgaggcctcgcagcccaaggtcctaccttctgcgaatggagtctcatccgagagctattggcgggtagctgctacgcgccgttggcagggccgcggtgtccggtgctgcgcggccggtttccgcggtgggggcgccgacgccgacgccgtgatcgccagcgaggactttgtggggttctttcgggaggcgtggccgtacatccggggccaccgtgggagcaccttcgtggtggtcatctccagcgaggtcgtgtgcgggccgcacttctaccgcgttctgcaggacatatcacttctccatggtctggggattaaatttgttcttgttccaggaacacatattcaaattgataagctgttgtcagaaagagggaagaaggccaagtatgttggtcagtacagaattactgatgaagatgcaagaaaggctgcaatggatgcagctggtagaatacgattgacaatagaagctaaactttctcctggtcctccaatgttaaatcttcgtaggcatggtgttattggacgctggcatggtcttgtggatagcattgcaagtggcaatttccttggtgctaagagaagaggggtggttaatggtattgactacggattcaccggggaagttacgaaaatagacgtttcacggataagagaaaggcttgatagtgatagcatagttgttatcagcaacatgggcttcagttcatcgggagatgtgttaaattgcaaatggtcaggtatttgatgatcatggacgggccattcaatacatgtctattgaggaggctgatttgttgattagaaagcgtgctaggcaaagtgatattgctgcaagttatgtcaaggttgtggatgaggaaggcatcaattctttgcataaaggggacgacagaccatcattgagtcccaaggcttacataaatgggtatgctgcttcttttcgaaacggattgggttttaacaatggaaatggtatttattctggcgagcaagggtttgctattggtggtgaagagcggttaagcagatcaaatgctgatccttttaaaaacgggttgggttttaacaatggaaatggtatttactctggtgagcaagggttcgctattggtggtgaagagaggttaagcagatcaaatggctatctttctgagttggtcgcggcagcatatgtgtgccatggtggtgttcaaagagttcatattatagatggatgtgttgatggatcacttctattagaattgtttacgagagatggagcaggaacaatgattgctagggatgtttatgaaggaacaaggatggctacagcggaagatcttcctggcattagaaaaattattcggccgctggaggattctggtgttttggtgcggagaacagatgcacagcttcttgaagcgctagagtcattctatgttgttgaaagagatggttcaatcattgcttgtgctgctctatttccattccctgaggaacaatctggtgaagttgctgcaattgctgtatctgaagaatgccgaggaagaggtcagggggacaagttacttgattacgtggaaaagatggcattatccctgggtctcaagaaattattcttgcttactacacgaactgcagattggtttgtgcgacgtggcttttcagagtgctcaattggatctatccctgagcagaggagaaaacgtatcaacttgtcccgtggatccaagtattacataaagcagctgtagccaaagcctgctgggattatcgccaacaattttgtcatcaggtgactcagcagcatgcacagagtttggttccacacttccacttaattaagatggtaccagccaagattacaccaatttcgcggttgcccaaaggcatataattgcacaaagaaacaaaacaccattttactgtcactgtgtttgaaagatggttgtctttgtttaagtatgtgacagaagtttgttttgccaatagaatcaaggcagagaagaaatagctgattgaattatatgtagaccctatttaacaagcaataccaaagatgaagtgctcgtacagtatcatctctggttggtgcctcattgtgtgcatcatagatgattgaacttgccttttccactcatagctgattggccttatcttttctacttttgttgagagaaaaaaaagagctagtgaaacaattggttctcttgtatcagatgtcaaagtatccttgaatgaaaacaaaaaatatgaagtgctcgtctgttatcatctctggttggtcgctcactgcgtgcatcaggaaagaataaaagataagttgcccttttctcttcgcgtgtgtgggtctgcaaaaaagaggcggattttgt

SEQ ID NO: 29602 - DNA, 856 bp, Zea Mays
gtcatttgtttgagcatgagtttcttcctcgagttgatcctggctcatcctggtcccatgaaaagatgtcagtgctccttttggacagtattgttgacaaacatgcaatagatattgaaaatgattacctcaaaatggtcaaggacatgataactgccagctctgatcctgccagcacaacaagtgcaaaggagaaacattttctttatgacattgtcgctaatggtcgcaatggtatagatgttgacaagtttgactacattggccgtgactgcagagcatgtggtcttggatgtaattttcagtattggaggttgatggaaggcatgcgagtgatgggtgatgaaatttgctaccctgccaaagattacttgagcatccataaattgttttcaacacgtgctgatctgcaccgaacagtctacacccatgccaaagtgaaggctgttgaactcatgctcgtggatgcccttgttgaggctaatgattacttggggatatcattgcatgcacatgatccagaagatttttggaagttggatgacacaatcattaaaacaattgagactgctcctaacaatgaactgaagaaagcaaaagaaatcattcaacgtattcgccgaagagaactctacaagttttgcaaccagtattctgttccaaaggacaagctggagcatttcaaaaatattactgcacaggacatagtttgttcacaggtttgcagtttttccccattttattcagtgtggccgaaataatctggcctctctgaaggattcacaccttttttaatgttgactcaactgtcctcagaaatcttctgaggtgctgctgaaggaagaggatgttgcag

SEQ ID NO: 29603 - DNA, 1008 bp, Zea Mays
cgccactctagctaccgagcgagccatgtcgcctgcgcggcctcctccgccttccgctcgcctccgcgccttcccccgcgatggagtcctcacctccttctatgccggtcgattccccagtatccctggatgccttaatcgccgatcctgcggccgcgccggccgcgtgtactgcctcttctctggcggtgataaccgcaagaaacaggatgaagctaggaaagcactggaaaatgccctagggaagaaggctgagtttgacaaatggggtgtggaaattgaaaggaggcaaaggggctaccctagagatcctgctgcttgtggtggaggatggtcaggaggaggcagctggtttaggcggcttactggtggaggtttctgggatgcagcaaaacaaactgttcttacaatccttggcattatcgcggcgtttttcctgattgcaaacttcaatatactggtggcttctgttatcaattcgttgttgcttgtgctgcggcagattcggcgcatactctccttcatagcttactgtgttttccagggcgcattggttgaaaggtctggaccaaagtcaagtacccttggccttagcaatgtggctggagtgcctgtgaaagaaaaggctggaatgtctgcgaaagaaagagtagttgggaaatgggcaatggactgaagtagtgcacagttatgtcttgtgagcaactctctctgtttcaatgtatgtacgacagtagacatgttacaataatttctatgaaactatgaccttttaaatgaaatatgttgtgatgctagtcaatgttagaaaaaatttgaccaaaaggattcctaaaatcagacggagtatttcttgttcagagttttgcagacactgaaatgttgatgtttgccgaattgtttgagatgaagaccgtgattagtggttgttcagagttttgtatcagcgttgccactcaatatgaagtacgagcattcgtgttttaagttgtttttattacgtgtaac

SEQ ID NO: 29604 - DNA, 1475 bp, Zea Mays
cttggcccatctgttgtctcatgtcttggcccatcttccaccatctctttacttacattctggtctgcggggcagccgacctcaccgacggcggaatgacaaaaaggacaatatcaacgacgccgcgcgcttcaacgccacagcccatcctctgagacaaaataggataaggagacccacccggcacgactgctctccgcacccgcaacgcccatggcgttcgccgccgtcctccgcgcccgcctcctcccggtgcccactccgctatccagctcctcgccgccgccattcttcgccccttcggcctcaccgcgcggccgcggcgattacagcgtcactcgacctgaccgaggacaacgtccgggtggccctagacgaagccaaatccgagctagggcagctgttcgacacgtcggtgggcatcacagggcaagttgacctcgcggagttggacgggccgttcgtgaagctccggctcaagggcaagttctggcacacccgcgccaccgtggtcgcgcggatcggaaactacctcaagaaccgcattccggaaattttggaggtggagatcgaggacgagaaacagctggatgatagtcccgctgctttctgaggggtaccgcacgatcaccaatttagttcaatgctgtgtgtgattcatcagtatgtgccaattgtgaggttcaggagaagggacacgttttcagttttcagaattagtactggttcagggagaattcttatcggaggctacctttcgtacacagttaagtatggtactccttactctgctaatgtcaaaactacagacttatgaacacatgaattccaatcaacattttctggctgacatgacaagagcattcatcatcctcgatgtgtaaagctgaatctatggatctgagtctgaaggagcgaatatacagacctgaattttctgtatttcccataatcacagctccagcttcggggaatttgcagttgcctttgtggtttgcattatagcatatgcacattgattgcagatatccaatatttggaggtgcttgttctattattacgaagaagctgcatggtattacaaagaaacaaaatgacaagactatggctgacactagtcatactcaattcttgcatttgagcgccatccatgatttgtgaagacttccatcgctaccacttccaaagcttgacaaacatcgttgttgtgattcctccttttgtagaaatctctaaaatctgaaccagtgagtacatctaaaaataacctgcacaactgatggggaagctgccctaagtgtccgtttggttggatttttggggctgttttcgcttctcaaaacccaaaagttgaaccaaataccaaaggagcgagctgtttttggcttcctgcttttttgaaataggcggagtgaagaactttttcacggttgtttcaagagagacatagatagaaggtacttgttataactaaa

SEQ ID NO: 29605 - DNA, 253 bp, Zea Mays
acaggttctctggaggacatggttgctagagtgacttggccgtccatcttgccaccgggttggactatcgagtgggaccctacctcggctgaggaggagcatgaggagtgatgggacaggcttccccatctctatgtttaattaccgttagttttattccgctgcacttcgaacactgatagctacttttgcaaaactccgatgatgatgtaataatttaatactctttaatgcatggttttatgctttattg

SEQ ID NO: 29606 - DNA, 226 bp, Zea Mays
cgaacatcattcgttttgtcgtcgtggactctactgcgcagtacagccggaaaaaggctatagatttcgcatcacgtacgtacgggtcagcatatttgacggcaaaaaatgcgatcgcatctcagcatataaagacagccaagttctttaagcagagccctcctctgttttttctaagcggtggcgaaaagcaaacatctgtcgtttctgcgtgtgccaaaagaca

SEQ ID NO: 29607 - DNA, 854 bp, Zea Mays
ctgagagcggaggggtcgaactcgaactgctgctgtgcagctatccactctccagtgctccacgctctccaattctctctcgaccgcggcatggccgccggcctctcattcccccgcgccggggccccgttcatcctcctccgcacctcctgtttctctccgtgggcagctctggtgccccgccgtcgacttctctctgggcctcccactgccggtgatcccccgcccccggcgctcccgccaacttcgaagctcgccgccccgccggttgtgggaacgccggagcccccgctgccgtttagggccgtggaggcggagatccttcgcgatattgaccccgtcgtcctgctcatcaaggatatcctccactccgatagatacggggatggcgaatgtctctgcccaagggacgaaaatgtcgtcgtggagaagctcctctcctaccatccacgcgcgcaggacaaaattgggtgtggacttgacgctataatggcaccctgagttcagaaagtcaagatgcctcttcgttgttcgaacagacggtgtttggattgatttctcataccagaagtgcctccgtgcatacatccgggaaaagtacccgtctcatgccgacagatttatacgagaacatttcaagcgaacatgaagcaaacccaaaagtaatttgaatacattgtatttttatgagttttggcatagtttatgtacatcattgaccctcaaagcctgttggtctattcatcgctttcctagcacgcgcgtgtatgactggaatctagagcgcacctttgcaaaaaaaagtataaaggaatgcatgcaaggttaataaattgtccagagaaggtaatgtg

SEQ ID NO: 29608 - DNA, 1026 bp, Zea Mays
cttcccagttcggcagttccctccctccctcctcgtcacctaatccgccccgtcgcccccggaagcttcaagaaggtggacggtcggagggacgggctacatggggggctgcttctggtagcttcggtcgcccgccgcgccgccgccaggagatggtgaccatgagagggaattggagctaattgacgatgacaagaatgaagaaatgcctttgtcagttcttcaggtaaatgctatgagaaagttggggtcggtggaagaggtgcctgtcccgctcttcccgtccaagggtcttcggttgaagcaaaagattaaggactggttggaagggttccagaggctcccttatgtatctccatatgagaatttcagccacatcaatccgggtagtgatgtttcagagaagcgggcagtcggggtgctccatgagctgcttagtctgtttgtgacatgctctgctgagaggcgacggttacgctgcctgcggcagcacctagggctgccacagaagtttcatcttgtgttcgagcggcaccctcatgtgttctacttattgttaaaggagaagacatgctttgttgtcctcaaagaggcctacatagctggagaagacactgcaattgaggcgcaccccatgttggaagtgttcaagaagtatgttgagttgatggagcagtcacgggaaatcataagatgtcgacggagcgggaagcctattgaactagagtccaaggcatgcggggatagctgagaagaaggatgggaatacatgtgcaaatatgacctctataacaagaatgtggatatgtactcttggtaggagctagtttatttctcattatttgcagagaaatacatcaagtgctgaaacagcttggtgactatatttaatctgcattcttaatttccagttgttcattacttgactgtgtactattgatgtcttaatcacacaatagtttcgtcagagatttctgatttccaggtcttcgacttaacttgtatcgatcaattcttagttcttct

SEQ ID NO: 29609 - DNA, 2948 bp, Zea Mays
cgggcacgtgcgcacgcgccgcactagggtttccgcagcatacctacaagtactcgaaaccccgtctctctccccctcttttccggctgcgccttcccctcgcagccgccagccctcaacgttcctaccagctgccaccgcctgttacccgtgatgtctcccgcccttgccgctggcgtggagcccatggccgtcgacgattccgcctccaagaaggccaagcgcaagcagctcaaggccgccgccgccgccgcggaggcagaggcggaggccgcttcggtcaagaagaaagagaagaaagagaagaagcgaaaggtgaaggagccgtcccctccgctcccatcggccgcgtcctctgatgaggaagagaaaagcagcaccagctccgaggagacagcacccgcggcgaaaaaagcgaaggagaagacgaagaagaatgttgatgtctcgtcttcagcctcagatgacgatggcgagatcacagccagcagcgatgaggaccccgcggacccgaacgcgctgacgaacttcaggatatcggagtcgctgaggcagagcctcaggtccaaggggatcaagtcactgttccccattcaggccaccactttcgatctcgtactcgatggcagcgacttggttggccgagcgcgcaccggtcagggaaaaactttggcttttgtcttgcccatattggagtctttggttaatggggcaaacaaggcatctagacggactgaacatggcaggaccccaagtgttctcgttctactaccaacaagagagctggccaatcaggtgcacgctgactttgagttttatggtgcaacatttgggctctctgcatgttgtgtgtatgggggatcaccttatcgtcctcaagaaatggcattgagaagaggtgtggatattgttgttggaactcctggtcgtgtcaaggatttcattgttaaaggaactctcaatttgaaatgcttgaaattccgtgtccttgatgaagctgatgagatgctaaacatgggttttgttgatgatgtcgagctcattcttggcaaggtagaagatgctaccaaagtacagacgcttctgttcagtgccactctgccagagtgggtgaataagctctctatgaggtttctgaaagttgacaggaaaacagttgatcttgtcggtaatgagaaactgaaggccagtgcatctgttaagcaccttgctcttccttgtaacaaggcagcaagggcacaagttattccagacattatccgatgttatagccatggaggtcgaaccatcatcttcactgagacgaaggattctgcatcagagctttctggtttgattcatggatcccgtgccttgcatggagatgtagcgcaagcgcagcgtgaagtaattcttgctggattccgtagcgggaagttccaagttttggttgcgacaaatgtggcggcgcgtggtctggatattaatgatgtgcagcttatcattcagtgtgaacctccccgggatgttgaagcttacatacaccggtcaggtcggacagggagagcaggtaatactggtgttgctgtcatgctttatgagcccagatataagcacagtgtcagcagactagaaagggagtctggggttaaatttgagcatatctctgcgccacaacccactgatgtagcacaatctgctggcagtgaagctgcagatgcaattgcgagtgtgtcagacagtgttattcctatcttcaggcagcaagcagagcagttgctaagctcttccagtctgtctgcagctgacttgcttgccaaagcacttgcaaaggcagttggttacacggacataaagaaaagatcattgttatcttccttggaggattacagtacactacatcttcaaactggcagaccgatgtggtcacctgggtttgcttttactatattgaaaaggttcatgccagaagataaacttgcagatgtaaagggtgccaccctcaccgctgatggaacaggagttgtatttgatgttcctgcagcagatgttgaagattacattcaaggtataatggtccttcccttgttcgtgaaatagttatcaactagcataggcatgaaaatattttcctgatgtggcccctgaatccgttttcttgttatgcaattcaaataagcctgttaatgccttgtttggttatttctataccatatggattggatgagattggaaaaaattatgaaagattttgacttgtctgggatttaaacctacccaatctcacccaatccacatggaatgagagcaaaatgaataagccttaaagtgtctattattttctaaatgaaattcgactatgaaaaccttttggatatgtggcaccactcgaatcactacatcctgcagcttcggagagtgccgcacaggtgacaattgatgaagtcaagcaactgccacccttgcaagagaaggaccagtcgagaggcaactctgggggaggaagatttggccatggaggtggccggagattttctggtggtggtggcggcggcagagggttttctggccggggaggtggcggcagagggttttctggcagaggaggcggcggcagtagatttaacaggaggaattagaagctgcttcaatctttatggacatttcagaattcagagaactatgtttgtgttcgacgtagttttgatgaagagggagggaatcgtctcagttttggctgcaactgtatcgtgcttttgtttatttgttagccttcgtcaacgaaggcttattttgttagtgatataattgaggcatggggaagagggggaggtaacagtctcagttttggctgcaaattgtatcgtgctattgtttatttgttagtgttcgtcaacgaaggcttatttgttagtgcttttattgtggcgtggtgaagagggaggaaatagtctcaattttggctgcaa

SEQ ID NO: 29610 - DNA, 2073 bp, Zea Mays
gcacgaatcttatcgtagtccactcgaagtcgcctcccatttcgcgggtcaccggctcgccgctgcgtcaagcgagcgcttccccccagatctcgacttctcgagcctgtcctccgccccccacaggctctgctggatccagaaccttctagaacccctgcactgcgcggctgccaaagaatcagtggccatgggatctgctatcctcaacagcattgcccccgaggagcctaaagtggtcgtgccagagtacggtgagacggctgatatccaggacaaggaagttagtatggaacagctctgctccataagcacctatgatcagtggacgccactctctgtttctggccagcttcccaaaccacgctataagcatggagctgtggtgattcagcagaagatgtatgtctttggtggaaaccacaatggccgttaccttggcgacattcaggttttggacttcaaaactttgtcatggtcaaagctggaagctaaatcacaagcagaaccatcagaatcagctggagcagttccgttttctgcatgtgctggccattcagtgattcaatggggaaataagatcctatgtcttgcaggacataccagagaacctgcagaaagtctcagtgttaaggagtttgatccacaaacctgcacttggtctaccttgcgtacttatggaaggtcacctagttcacgtggtggtcagtcagtgacccttgttggagacactctagtggtctttggcggtgaaggtcatgggagatctcttctgaatgatctgcacattcttgatcttgagaccatgacttgggatgaatttgagaccacaggcactcccccttccccaaggtcagagcatgctgctgcttgctttgcagagcggtatcttctgatatttggcgggggttctcattctacatgtttcagtgacctacacctccttgacactcagacaatggaatggtcaagaccaaagcaacaaggtgttactccagaatcaagagcaggacatgcaggtgtaactattggagaatattggtttattactggtggtggaaatagtaggaaaggtgtctcagatactcttgtactcaacctgtctacgtatgaatggtcagttctcactaatcttgaggcccgtgcaccccctgtaagtgagggctcaagtttagtaatgcacacaattaatggagaaaattttctggtgtcatttggaggatatagtggccgttatagtaatcaggcttatgctctcaaggcaagtctcaaaccaagtgtcccatctcaacaaataaatgaatcagatacaaatggcttttctcccttatctgtggcagaaaattctagcaggaaagtcatatttgaaattgaggaacttaaagatgaaaagcctggcaatagggcagataacagcaaaaccttgggacaagtagttatggttgaacaaaacgaaatagaaaacagacttaatcaagagcacttgcagagtctccgcctgaagcaggaactaactggtcttgagaacagaaatgcagaacttactgaggaactccacttagttcaagatcaactttctatcgaacaaaccagggcttccaaatttgagaatgaaatttcagatattcaacaacgactacagaagatggataccctagaaaaggagattgaatcacttcgctatgaactggacagcactgtatccgaagaagaatcttcaagtggcaacgagttgcaccgcagtcggggcttttggaggtggaatgggtgaactcctcgagactcaaggagtgagtattgaagagaatactcttccaaatagttgtcattattttaatttttatgtctttcacaaaaatatatgaattcgtggatggtactagttcggaagcatatagaggatctaagcaaactgcagcaacatcaactgtgaaaagcatcttacagaaagtaaaacgagtatcatgtggcccagaatttcctatgttagaatagtttcttatctgataatgacaccgacaatgatcaccataacgaattattttttttcatacatatgtggtgggatattaa

SEQ ID NO: 29611 - DNA, 2823 bp, Zea Mays
cagcgctcccgctccttgctcgcctccacccgcggccaccaccgccctgcggcccccgccgcttgctagcctccaccgcgccgcgagtcacgccgttcatgcaccggctggtcctggagcacgggaggacgagcatgtcctggttcggccccagccccaaggtgaccatcgtcgacccggacctggccaaggacgtgctgtccaacaagttcggccacttcgagaagctcaaggtcccggcgctgtccaagatgctgggctccggcgtggccagccacgagggcgagaagtgggtcaagcaccggaggatcctcaaccatgcgttccatcttgagaagctcaagcgcatgctgccggcgttttctacgtgctgcgaggagctggtgagcaggtgggcggcggagtcccttggctccgacggctcgtgcgagctggacgtctggccggagctgcagaacctgacgggagacatcatttctcgcaccgtgttcagcagcagctacagcgaagggagaaggatcttccagctacaggtcgagcaagcttcgcttgtcatgaccaacattcggaagatcatgatccccggctacatgtacttgcctaccgcgaacaacaggaagatgcgcaggaacaacagggaggtggagtcaatcctgcgagagataatcgggaagaggatccaggcgatggaacaaggcgagggcaccaaagacgacctggtgggtctactgctggagacaaacatgagagacgacatggggatgacgatcgaagacgtgatcgaggagtgcaaggtgttctacttcgtcgggatggagaccacgttggtgctgctcatgtggacgatggtggtgctcagcatgcacccggagtggcaggaccgcgcgagggaggaggtgacggctctgttcggcagggacgacaagcccgagtatgacggcctaagccgcctcaaagtcgtgaccatggtgctctacgaggtgctccgactgtacccgccggccacctccgtcgtccgacaaacgtacaaggagatggaggtcggaggcgtcacctaccccgccggcgtgatcctggagctgcccgtgctgctcatccaccacgacccggacatctggggaggcgacgcgcgcgagtttaggcccgataggttctccgagggcgtgtccagggcctccaaggaccccggcgcgttcctcccgttcggttggagcccgcgcatctgcatcggccagaacttcgcgctgctggaggccaagatggcgctctgcatgatcctccagcggtttgagttcgggctcgcgccatcctatgctcatgcgccgcataccatgataaccttgcatcctatgcacggtgcgcagcttaagctcagagcaatatgatctcgacacgatgggtgtcccatcgttgatgccattgttatgtataaccttacaattcagataggcattcggccctgttaatgtctgaaataagtatcttcgcgttggcattttgtaatgtgcttttcacgtaccattggtgctttattgccttttgtatataaacatgtggatatatgtaactcatacattacacaaacaaacacaaacacaccagagccagagctatagggtggagctataaactgtggctctacttttgtacacaaaactggctccacatgttcttccaatcctgcaactgcgtttttcgcatccccgtttgattgcaaaaacgggactgctaagcaagctaagatttcaatggcatattccttcatacataggccattgagcgacgaggcacgccgcgtcagcactcccttggtggtcacttgcaatgaccagagacgggaggtctccgttgcccagaacatcgctaacaaggaaattgaccgcaccgttgcattcgacaaggtgctaggtccaaagtctcaacagcaggacgtcttcaaccatgctgttgtgccacttgtcagcgaggttttggacggttataattgcacaatatttgcatatggccagactggaactggcaaaacatacataatggaaggaggagggggcaaagcactgaatgctgacctcccgactgatgctagtgtcattccaagtgctgttaagcgcatatttgacatcctcgaggcacagagtgcagagtacagcatgaaggtttcttttcttgagctgtacaatgtggagctcactgatcttctagctctacaatgagattgcaagaacgggactgctaagcaagctaagatttcaatggcctattccttcatacataggccattgaaccggaagattttgtcggtattcggtaactataggatcatgtggttgttggtcgagttggaccaattatgctggctcatttgttggatgttttgacaagtcgattctagcttccttatgatctatgttagatttgatcaatgaataaaaggattattcatatcaatgtccatgcaccttctcagaaaatccttttgtgatgttggtgttggtttcctggacctgtactggtacatatgctaagtcatccacaaatctgacccagaattgtaccgttctttttatagccatgtttggtacttgtttgagtgctccatagttcgcaagtttttttgttatgatgtattttgacatttgaatctcagacatgcttaggaactactgatttgaatttatgggctaacagttccagtatttcaaatagaaagtatgctatatcaaataagttgatgatacttttggtactggagaatgaagctagactgcatttgatattagaagtctgtttgtctgattgcagttgattataaagaagctagag

SEQ ID NO: 29612 - DNA, 1642 bp, Zea Mays
gaccctttattagttcttgtgtttgaggaattagagactaaaaagaactaaaaagtagggactaaagattagtcctatggaaccaagcagagcctaagtcgcaccgtccaggtgtcaactgcaagggaaaacaaagagtgtgtgctgtgtgttatccatttcttctcctctctgctctgttcacttcgttctagtggggagcgccgccgcggcagcggctgctgctctgcgcgtcaggcggccatgcgctcgcgcttgcgcttgggccccctcgcagcgaccgcagcaaggggcactcgtcagcctcaagccttgcgcctcactggcaccacaagctcctctgtggcgcgcggagtcggatgccgcggggggtggtgccggcgccggcgatgtcatgggcctcctcctccgggagcgcatagtcttcctcggcaacgagatcgaggacttcctcgcggacgccgtcgtcagccagctcctcctccttgacgccatcgacccggactctgacatccgcctcttcgtcaactcaccagggggatcccttagcgcaacaatggccatctatgatgtaatgcagcttgtgagggcagacgtgtccactattggaatgggcatagctggatcaacagcttctataatccttggtggtggcacgaagggcaagcgatttgccatgcccaacaccaggattatgatccatcagcctgtcggaggtgcaagcgggcaggccctagatgtagaggtccaagcgaaggagatattgaccaacaagaggaatgtcattcggatcgtatcaggcttcacaggccgcactcctgagcaggtagagaaagacattgacagagatcgttacatgggccctctcgaggctgtcgattatggactcattgatggcgtgatcgatggagacagtattatcccacttgagcctgtcccggagagggtgaagcctaagtacaactacgaagagctgtacaaggatccacagaagtttcttacaccagatgtcccagatgatgagatatactagtcgaaaagttgtattttgtgcgaatgttaagtctgttcttcagcaagcagatgtttttcgtcgcttgtagctgtcaaaccaaccatagcactagtagcttattgatcttgtttactgactggatggtgattcgagcaggcaactagaacctgttggttgtgtttctggtgttacattgtggtgttagaatggtccggctgtttcgttttgagtcctgaccatttcaggtgtggtacgttgagatcagttaactgttcgtttttttttttttgaccaccagcaaaagcttctacatcccatttcaaaacattttctttatcatgataagtcttataaaatacaaagaatacataactgtaaagtcagtatggcatgcaattgtgactgctcgattgacgattggctggaaatccgtgtttccagagacagatttcaaaggagagtaaaaagttctcagctcaacgtgttctctaatttattcgctgtcatgtggccaccaaaacaggatgaagagtttgccgtgaagtatttctttcttaagctcaaaagtacagtaatggatacaacaatcagattatttagaataggagaaaaaaaagaatacaccaa

SEQ ID NO: 29613 - DNA, 1262 bp, Zea Mays
gatcattaggtaaatagggatggagagaagctttccaacctaggaggctgtcaaccaccttgtcattgagaggctggagctcacttttagtgggtttgcgaactgttaggtgaaggccaaggtggcttcctgtggagaattcagaagttaggaaggatggaataaaaggaacatacagagtggatgttgacattcctgctaatgattggataaacgtcaccaagttctatgatgttctaattttcaacactggacactggtgggatagatataaattcccaaaagacactccccttgttttctacaaagggggaaagccgattgaacctccacttgacatgcacaacggactgaaagtagtcctgaaaagtattgcttcttacatcgaaagggaggttcctaggaaaacactgaagctgtggcgcacgcagtcacctaggcacttctatggaggtgagtgggatcacaatggcagctgtgtatctgatagacgtcttgaagagcatgaggtgtggttctgacgatcaaactgtttcaattcaggttatgcatttcaaagctgtgaattgtttattcctcttcacaaatcttgtgcagctcaattcttggtttgatccccagtttgggggagtgaacaaagaagcgagaaccgtgaatttagcaattcaggaagccctggctggcacggaaatccagttgctcaacctcacttacatgagcgagttccgtgctgacgcccatccagctatctggctcggcaagaaggacgcggtggctgtctatggacaggactgcatgcattggtgcctgcctggcgtgccggacacttgggtcgacatcttggctgcacagatcatgcatcacttcaagcaggagaaaggctgatcacaatttctttaaatctgtagttttgcgataactacagcaactgtgctagaactttttagatttgtattttagggataacataacaaacattaaatagttttgcaaatattcattaggttaggtctcccataatgctatagtgatgcacaaaactaatgggcaccacaccgaacatcggaacatcccagtgctggagttttcaaataaggtcctctttaaatctgtagtgtttaaataagggtttggtagagtttctcttaattctgattcaccaaactaccaaagcatgttcttgccctgctataagttttacaggcatgaattagtgtcacataaaagcatgttcttgccctgctataagttttgcaggcatg

SEQ ID NO: 29614 - DNA, 1440 bp, Zea Mays
cttccactggagggccacacttctcttttgaggaccagtccaccgtccactcccagagtccaaaaccctacgatccgcgccaccatgccgcgcctcgccgccgccgccgccgtctcacgccgcgccggcgaggccctgcgccgcggcgcgtttgggggactgcggcctctctcctccctgcaaccgttaaacgccgcctccagcgacgaggtgctcgttgaaggaaagacaagtgcgcgcgctgccgtgctcaaccgccctggctacctcaacgccctcaccaccaccatgggagctaggctcaataaattttatcaatcatgggaggacaacccagacattggctttgtcatgatgaagggcagcggccgagcattctgtgctggtggggatgttgttagattacatgaacttatcagtgaaggcaagctggaggaatgttgccattcttgatggcattactatgggtggtggtggaggtgtttccatccctggaacattccgtgttgcaactgataggacagtctttgcaactccagaagttcatattggattccatcctgatgctgcagcctccttttatttgtcgcatctaactggccatgttggggaatatgtggccttgaccggtgaaaagcttaatggaacagatatgattgctcttggccttgctacacactatttcatgagtggccatctggatctgatcgatgaacgacttgcaaagttagtaactgatgatccatcagttattgattcgtcccttgcacaatatggagacatggtttatccggacaaaaaaagcattgttcataggctggaggtgattgataaatgcttcagccatgacacagttgaagagattgttgatgccttggtgagtactgattaagctgttttttactgttcttacatacatcattgtttgattgatttgataatgaatgaaacatgaaatattattcattcatatatactattttgtggcttggtttgtgaccttttgctagcgtctcactatttactgtgaaactttcatgaatcttataattaacctttgatggaaacttaccatatcttcttgatatgattctcatcattgcaattttactgccctgtatggtgttggagtgttctggacttctggtcaacttggtacgatttaaaactaagttccggcataatcaggaaagtgaagcagccagctcaaatgaagaatggtgtatcttggcgctgaaacgattgaaagaggcctctccgttagctttgaaggtttcactgcgatcgatacgcgagggtagatatcagacacttgatgagtgccttgtccgtgagtaccgcatgtccatgaatggaatctcaaagcaattttctcatgaattctgcgagaaacttctaaaacttgaagaatgcatactatcaaacttgtgatctggaaac

SEQ ID NO: 29615 - DNA, 2451 bp, Zea Mays
ctactacctcttttgaggggcgcgtggactgtggagtggagaccaggatctgctggagcgccagcaaggcggtctctccaaccctccggagtccggaccagcaagggttctgatctcccatgccacagtttataacgttgaaggattcaaaaatctacagaactagatgatacttgcataatgcagtcctcaggtatttggaaggcgcatgctggttcatcacagtcagagggttcgggtctggatatggagaggaacggatgcaatcataattattgtccatctcctctccaaccaattgcctcagctggtcagcactctgaaagcagcgctgcatacttttcttggcctacatctactctaatgcacgggtcagctgaaggccgtgctaattactttgggaacctacagaagggtgtactaccaggacatcttggtcgcttgccaaagggccagcaagctaccaccttacttgatttaatgattataagagcattccacagcaagatcctccgccggtttagtcttggtacagcaataggctttagaatcaggaaaggaacattgactgacacacctgccatccttgtgtttgttgctcgaaaggttcacaggaagtggctcagcgctactcaatgtcttccaactgcccttgagggacctgggggtgtgtggtgtgatgttgatgttgttgaattttcttattatggtgcaccagccccaacaccaaaggaacaactttatgatgagcttgttgatggattgcgtggtagcgaccctattgtaggctcaggttcacaggtggctagtcttgagacctatgggactttgggtgccattgtgaagagtcaaactggcaataaacaagttgggttccttacaaacaggcatgttgcggttgatctggattatcccaaccagaagatgttccatccgctacctcctaatcttgggcctggagtttacctaggtgccgttgagagagcaacatcatttataacagatgatgtttggtacgggatttacgcaggaacaaacccagaaacttttgtccgagctgatggtgcatttataccgtttgctgatgactttgacattacaagtgtcagcacatcggttaaaggagttggagtcattggtgatgtaaaggcaattgatttgcaatcctcaattggcagtctcattgggagacaagttgtcaaagttggaagaagttctggtctgacaacaggaactgttgtcgcatacgcacttgagtacaatgatgagaagggaatatgcttcttcactgactttcttgtcgttggggagaaccaacaaacatttgatcttgaaggggacagcggaagcctcataatcttgacaggacaagacggtgagaagccacagcctatagggattatttggggtggtacagctaatcggggaaggttgaaacttaaaagtggccagggtccggagaactggaccagtggagttgaccttggccgccttcttgatctcttggagctagatctgatcacaacaagtgaagggctacaagctgccttggaagaacaaaggattactctagccgccgctgctgctgcggcaactaattcaactgccacagaatcgtcacctgttgctggccctcaagagaatgataaaatcgacaaaatctatgaacctctcggcatcaacatcattcctcgggacagttcttccatatcaacagaccaacccaacgagaatgtggaagagctaaacctgatgtctccgatgcgcaacggtcaagaaggcaacggtgacttgaataacttgatggacttggaactggaaaattcacctgatggtatttgtattgccctgaacctgggagagcgggagccaaaaagactccgctcagattttgattcgaccctggacatggacttgcagaaatgaggctgttatgctgcagacttgttgcaggaggctctgcactattcagcttttgtgttgatcattgaaggtatggccataaaggaaataatatgtttctggacgactggacctgttgtcctgcttggagccggtctgggttaagctgtgaagctcctgctgcagttttgcgtctagtgtcaagtgctctagtatatctagtgttgcgtaagatgtcggcacctcaatttgacagaggcgccatacttcttgcccatgtaatgttgtcatttgttgtatgctcgtgtatatgtactacatgaagcattgtaaaattgagcaacagcaaccggagctcgagaatcttaggcgcatgcgcaaccatccaccaaccccgtacctgatgaattgacaataaagctggatattttaggtgtttggaaagtgtgttgctcttggaattttggggagagatttgggtactaactttggtaaaggcaggccactggtgttgtccttgcctgcctgatcaaacaacatgctggctag

SEQ ID NO: 29616 - DNA, 2978 bp, Zea Mays
aaggtacgaaagcccaacgggccccaaacagtccagaaggggctctcacaccggatccgctctggctccaacaacgtgatgggctccatggaagcgtcgaccgcgccggagaacggctcctccgctgccggtggcggagccggcggcacggcgtgcaacggggcgggcgccgcgtctaacggaggaggcatggagaggcggctgaggtcctcggccgcgtccgcgtcgtgggcggcgcaccttcccctggaggtgggcacgcgcgtgatgtgccggtggcgcgaccagaagctccacccggtcaaggtgatcgagcgccgcaagggctccgcgtgctcttcccccgccgactacgagtattacgtccactacaccgagttcaatagaagacttgacgagtgggttaagcttgatcagcttgatcttgacactgtcgagaccgttgtcgatgagaaagtagaagataaggcaacaagcttaaagatgacacggcaccagaaacgtaaaattgatgaaacacatgtggagcaaggacatgaggagcttgatgcagccagcttgcgggaacatgaagaattcacaaaggtgaaaaatatcgcgaagatcgaactggggagatatgagatagacacatggtatttctctccttttccaccagagtataatgactgcccgaagctgtttttctgtgaattttgcctcaacttcatgaagcgcaaagaacagcttcagaggcacatgaagaagtgtgatcttaagcaccccccaggtgatgaaatctatagaagtggaactctatcaatgttcgaggttgatgggaagaagaacaaggtttatggacagaacctttgttatctggctaagctatttcttgatcacaagacattgtactatgatgttgatttgttcttgttttatgtcctctgcgaatgtgatgatcggggatgtcatatggtgggatatttctctaaggaaaaacactccgaagaatcttataatttggcttgcattctcactctccccccataccaaagaaaaggatatgggaagttcctgattgctttctcatatgaactttccaagaaagaaggtaaagttgggacaccggagcgccctctctctgatcttggtctgctcagctatagaggttattggactagagtgcttctggaaattctaaagaaacataagggaaacatatctataaaggtaacacccttccatccagatatacctttttcgttgtacaaatttcgaaagctgattgaattatgatgcagcagttctagaaagaaactttctattggctcctcatattaccctacttaacccttgatctatgaccaaaaaaggttagcccctgtgtttcatagattacacttcaataaacaggtggattttctgtgctgcaattgcgtgttagtcaaacattccctgaataaggacatttagtagtcttctagaacataatgtatggtaatggtctttttggatgagaaagatcacctcaggaatgtttaggtttagtccagttccaacatcctctttccaaacatatcttaaaataccaggttacatgtggagtcagctttatattactcggtgctgttatctggtataaaaactggcttttcatcttagttatcctgctactgcatgtcttgcctgggccctgaaacttttgggtgcatgtgaagcgactagtttggtggtagatatcatcatctggaattctggatatttatgggatcgtagttgtcagcacagtgtactgtgtcgctattcggggaggtagtatgtacgggtggtagattgttatacctggcttcagctcttcaagcagtagatttttttttttaccgaaaaacaggtggatggagcagttagtcgatgttattcttttcactcctaggagaatcatgtttgttatcgaaagcactataacatcgcagaagagacaaaacatgtaaatagtaacatatatcatatcataggcagctgtaacttgtaacatcagatgtgcaaggattgtagcaaacaatatgctagacttcaaaccgagtagaagtgtactgaatagctttaattctataactgtgaagcccagtgcaatgttgacagggccacgtgcacccagtgaaatatgcagaaacttcctgcatggaaggacatttgatccatgtgctctgtgggtcttctgtctgtgccctcctgtccgtgttgctgctgcccttgaaaaaatttggacgtaggaagtatgcaaagcagatcatctgacgagagtacatggaacaattgtattctgaacgtcattgctgttgccttcttgtccttgatctgtaccagtgtttgttggtagagtgcacatgctcgtagtagaaccttttttttcatgaagacatgtacatgatcatagggtgcccctctagcattcatgagtgtttctgaatccaaaaggtagcataacactgttctaacaagctagttcgtacatgcatttttttttgtaacaaactcttgtgcttgcgcgcaggaactaagcgacatgacggcaataaaagcagatgacatattgagcacgctacagagcctggacctaatccagtaccgcaaagggcagcacgtcatctgcgctgacccgaaggtcctcgaccgccacctcaaggcggcggggcggggcggcctggacgtcgacgttagcaagctcatatggactccctacaaggagcaaggctaaaaggcgaactgctccgtgtctcagatttagactcgctgaccgatgcgatgcagtccctgtacatagcatctccccacagctcacttgacttgacttgactcgtgtaccgtgaaactctacttgtaactttgaacatccacatcgttgtctcctcatttctccttgcattaaccatgctacctttttttttttcttggataagccagatcagagcgtggaaccagcagcgaagtgatgctgg

SEQ ID NO: 29617 - DNA, 153 bp, Zea Mays
gcttgtagtgaacacatagcttctattgtaaagttaaataatgaagtggctagtctcaatgcccaacttaagactagcaaaagtgaatttgataagttaaaatttgcaagggatgcttacacaataggaagacatccctcaattaaggatggg

SEQ ID NO: 29618 - DNA, 1692 bp, Zea Mays
ggccgccacgcttcgtttgcttcccgctcccaccgccaccacccaccaatcgcactcgcagttggcgcgcgctcccgtcctaaccaagcaaaacccacaaccctagcctccgccggcgccgccatctgccgggcctccctccggtcccggccgaccgtagcctcgcagcaccctaaccctatccctcccccgctgccgcgggagcagggtaaaaaaatgccgcgtgagatcatcacgatccaggtggggcaatgtggaaaccagatcgggatggagttctggaagcagctctgtctcgagcacggtatcggcaaggacggcctgctcgaggacttcgccactcaggggggcgacaggaaggacgtcttcttttaccaggctgatgatcagcacttcatacccaggtctctgcttattgacctggagccgagagtgatcaatggaatccagaacagtgagtacaggaacctgtacaaccacgagaacatatttgtcgctgagcatggtggtggtgccgggaacaactgggccagtgggtatcatcagggtgaacaagttgttgatgatatcatggacatggttgacagagaagcagatggaagtgatagccttgagggttttgtcctttgtcattctattgctggtggaactggttcaggtatgggttcttatctgttggagacactgaatgatcgatacagtaaaaagcttgtgcagacatatagtgttttcccaaatcagatggaaacaagtgatgttgtcgtccaaccttacaactcacttttaactctgaagcgtctgacactgaatgctgactgtgtggtggttcttgacaatacggctcttaataggattgcggtcgagcgtcttcatttatcaaatcctacatttgcacaaacaaactctttggtctccacagttatgtctgcaagcacaactacattgcggtatcctggatatatgaacaatgatctggttggccttcttgcctccctgatccccactccaaggtgtcattttttgatgacaggctatactccactgactgttgagcgccaggttaacatgatacgcaaaacaacagtattggatgttatgagaagacttctgcagacaaagaatgtaatggtgtcatcatatgctcgaacaaaagaagccagccaggctaaatatatctccatattgaacatcattcaaggggaggtggaccctacacaggttcatgagagcctgcaaaggatacgtgaaaggaagcttgttaactttatagactgggcacctgcaagcattcaggttgccctgtcaagaaaatccccatatgttcaaacaacccacagggttagtggtctgatgttagctaatcatacgagcatccgccacctgttcggcaaatgcctgggacaatatgaaaagctaaggaaaaagcaggcttttcttgacaactataggaaattcccaatgtttgcagataatgatctctctgaatttgatgaatctcgagagataatagagagcctagttgatgaatacaaggcctgtgagtcgccagactacattaaatggggaatggaggaccctggagaggcaaacgttgcagcagatcttgactctaagttggtagtgtaaatataaagggatttgtaaaactgatcaatgtcctcttcatcgaagtgcctttccattctatgcatg

SEQ ID NO: 29619 - DNA, 1983 bp, Zea Mays
gtagtattctagctctacctgctttccccactcgtgctctcgccattcgctcgaaccccgaagaactggcagtggcaggttactagaggatcactactttgaactcattaaagtgtctaatgatggctgctgttttaaaaacaagtggcagtttttgtagtacacaacagcagcattttcagcaatcaagaagggatcagtttttgcatggttcttattcaaatttcaaacattgcaaaagcaagaagataataaagcctgctccactgtgtgctagagtgacttcctcgaaagtggaactagatgttaaggatccatattggaagcagaagtttcaggaagactgggaaagccggtttgatttgccaagtattactgatatatatgatctgaaaccaaggccaactacattctcactcaagaaaaacagaactcttacaggtgatgaaaatgtggatatgtggaatggttatgttaacaatgatgatcgggcacttttgaaggtgataaagtattcatcgcctacttctgctggagcagagtgtgttgatcttgactgtagctgggtggagcaatgggtgcatcgagcaggaccacgcaaggagatatactatgagccagaggaagtaaaagctgctatagttacctgtggaggtctatgtcctggtttgaatgatgtcatcagacagatagtattcaccctagagacctatggtgttaagaatattgttggaattccatttggttatcgtggatttttcgaaaagggcctcaaagaaatgccgctttcacgtggtctagtggagaatataaatcttaatggtggaagttttcttggtgtttctcgcggtggagctaaaactagtgagattgttgatagtatacaggccagaaggattgacatgctttttgtacttggtggaaatggtacccatgcaggagcaaatgctatccatgaagagtgccgtaagagaaagctgaaggtttcagttgtagcagttccaaaaacaatcgacaatgatatacttttgatggataaaacatttggttttgatacagctgttgaagaagcccaacgagccattaattccgcatatatagaggcacgtagtgcttaccatggtattggcttggtcaaattaatgggaagaagcagcgggtttattgcaatgcacgcttccctttcaagtgggcaggtcgatgtctgcttaatacctgaggtcccgttcactctagatggagaatttggtgttttgcggcaacttgagcatttgctaaagagtaagggattttgtgtggtttgtgttgcagaagctgctggacaagatctactccaagaatcaggtgcgactgatgcatcaggaaatgtgatattgagtgacattggtgttcacatgcaacagaagattaagatgcatttcaaggacattggtgttccagctgacgtgaaatacatcgatccaacttacatggttcgtgcatgccgtgccaacgcatctgatgcaattttgtgtaccgtgctcggacaaaatgctgtccatggggcatttgctggtttcagcggcatcacttcttgcatctgcaacacgcactacgtgtaccttcccatcacggaggtcatcacagcaccgaagcgcgtgaacccgaacagcaggatgtggcatcggtgtctcacgtccactggtcagcctgacttccactgatctgccatcgtcactgcataaccaaattcgcatagtttgaggtactagatgatttacaattctttcgctgatgtgctccattcacatcgtgaggttccaagattagttaataatgctaaactgagtggacttgtctggtttgttcacgaaggtggtgttgtccattgttccgaagctctggtatttgagaaatttgcatatttaacactataaagatgtgactccacagatttgccattttcaagatgggctacgcaaaattgccacctgtttcattgtc

SEQ ID NO: 29620 - DNA, 490 bp, Zea Mays
tgtagataacaaaaagcgcaaaaataaagcatggttttttgcttaagaaaatagcatgaaactattttgtcggcagggcgatggcctgctagacgaaagccaggtcgaggcgttgcgcaggaagggaatggcgacgcctcagcgccaacacaatgacctcgccgtgggcggcgctaacaatgcaacgacgacgcgctcccacgagcgtggcctgtgaggggcatggcgacgtctaggctttcccactcacttctcccatgttgcagacagcttaccgctgagcctgagaacgaaggggcgcctaggagagggaggggactagggaagagtatggggggagactagggagagggagggcaaacagcaaagcacgccacccgcttggttttgctatatatagtcctcaacctcgtcctttgtcgcgacctccctctccgtatgtgttttgttgctcgcaactccgcacgcagtgtgtcgctctggctagctt

SEQ ID NO: 29621 - DNA, 2035 bp, Zea Mays
cacgcgagagccacttttgcggccaggaccaggaggacgtgagcgattcagagccgtaggccccagatcttcgcgctaatctacaagtacactagtgcaccgcctgccgtcaaatacatgcattcgcctgctcgatcatcagtcactaccgtatgaggtccatcaagcatgaaacatcgggttaggttaggtcccgtccatgcggccgaccatcatcatcatgcaatgcacggggggcaccgtaggcaacagacagagccatgcatgcagaacggattatcgctgctgagctagctccctgcctgccttcccgagccagacgcgcacgcaacaggcacgggagggaaaatggtccggccgtgcaggattgaccctcaggtccccgactccggaccaagctggcaagctttagcttacggtgcacccccaacgcggcacggcgaggagtctggatggatggtgtctgccatcgtctgctcattcatttctgcctcgccgccactcgccagtgcgtcagggtgaaccgctcagcccgatccgatctgatcttcggcgggcgggcgggcggcaaccagagcccctggtatgctcaccttctgcttggcttgcgcgcgcttgggccgtcgcacgcacacgacgcggcgacggcgaggaaagaaagcgcgcggcgcggatgccggatggacaaggctaggggctagggcctagggccccacgagcgtgtcgcccgcccccttcctttttcccggcagcccagcgtggcgcctaccacaaaccgagggtccgcccccggatggcgtggggccccgtgccgttccgaaaaccagtcactggttcgctccctccgtcaggtaggcagaggcagaggcagaggcagaggcgggacagggaaggcgaggcgggcaagcaagcaaccggggcgaacatgcaggcctcgtgggaggcgcgcgcggggcccatatgcccctgcctggagctggtggtcccaccgcgcccatgttgcgctgggcaacggtggccctcagctagtactgtactgtactactgtacaccgcccacgccctggcggcccggaaccggaagcctctctctgcctctgcgggtcatggagacagaggcatcttcacagcagtcgcccccccggccggccgtcgaccgacgcgtgcctccccgcttgcttgcttgcttggggcaagcgcccgaattttttgtattttggctatttttcggaaaaaaatacacgtttgaaccctaaaaaattttaattgcatttttggaccctttgctcggcgccataggtaacacagctcggcgccataggttatggcgccgaggtacggctgcgttggcataacccggacaccgtggcgttgacgtggcaccgagctcggcgccacagatcttggcgccgagctcggttgtgttatctactgttttgctgcaaaaagatagcaccaagccatctagctcagttggtggagcacaaggttttgaaccatgaggttgggggttcgagccctacactcatctattttttttatcttttaaataactcatttttttaaatctggcggtttctgctgcatttgatgcctctttctcggctgcacacgagcgcgaggggagaaagattattaatcaactgattataattaagcatgatatgcacggcgtatgtgcatgggcagatcagcgtgtctgtgtgttagtaattaagcacctttcaagtctggcgcccggcgttctacccgggttttattcagcctgttgatgatctcgttacccgggatttttgctacataattacgtatagcacatgtgtgtgagtgtatagctaggaatattgtcgctcaggcgtgagtattatttgctagctacaggcgcaggataaaaaaaatctaggcgagaaataaatttaaacggacacaccaacgatataaacaaaaaaaacaaaaaaaatgcaaactagggggcttgaacccacaaccacatggttaaaagccttatgctctaccaagtgggctagatgggcttt

SEQ ID NO: 29622 - DNA, 6342 bp, Zea Mays
gtggttcctctcacccagagtcgcagcgacccaaccacctcccccccccgtccctctctctctcccttctgctggtctagttttggtttccctctcgctttccttcgctcctaggcgcggctccggcgggcggaagaggagggagaggcaggcggcggcccccggcagttcctccgtccgcggagcccagagggaggagggggaggcctggtctggggctgtccgctgaatctgcttctccgaagatcgggtggaccacgggactcggcgggcgcgcccgatctgctccgccgtcgaggtgaagtcggctgatatgacgtacctcatttggataacaatttgatcggcaccataagttacagaaatatgcaggaggagctagggcaaaggatgcatgtacctcatggtatcaatctgtgtttctcaacttcttccgagctctttcaggtggaatcttccattgagctgggtactgcagaagtgaaccctgtaccatctgaaaagttatctgctaactcacaagctgttagagatgatgctggagcagttgaaggtattgacatgaatggaaaacctgtccaaaaacctaagaggaaaaaacataggccaaaggtcattaaagaaggacaatcagcaaagttgcagaagcctaaaactccaaagcctcccaaagaaaatgggaatcagcctactggaaagagaaagtatgtcaggaagaagggactaagcacaccagccaaacaaattccatcagaaggtgctgatacacacactagagctaaaccaggaatagcccaaagatgtttggactttgatgtggaggaccaacatggacatttggatctggtatcacaaacccaggaaacggagatacagactggtcctggggacacacagccatcaatatctggagttgaaagaagtaatgcccaggtatcatgccattggggttggggtggtacaagcagttctattatttcagctgacccaatagttgatatacaaggattacaggcagactgcatacctaaaagagtcaattttgatttgaacaattctatggcaagtcagatgccaaccaattattctagtcgaatggacagctctggacaatttttccagtttggtttaggagaaaaagttcaaacaaatcagttactggattataattgtaatctgccagctagacgtgtctctcatctcagcagctcggtcgatcatatgcgacaccccttagccaattttgaccaatacataagcacatctcaagtttgtacagaaaattcacgcagacattatcagatgcctagtagttctagaatttcagaaaataggacagcagcttctcagtatactgaaagggtgtcaatggggggcaatttcaatcccggagcttgtataggagaaggcacggtaatcaaacaaatggcccaatgttatagacttccagaaagtccacttgtacctcccaaacataatgaaagggatgtgatgaatggaaatctaaacgagttttctgtgtataatgattacttgaatttttctagcaatagtaactaccaaactggagcagcttttggttttcatgattctccagtctattcagatgttcttgcaatgggtaaaaaaagagaacacaatgctatcagtggtcaccagatttcttttgacatcgactttgttaactcaaatagtacaaggaagttctgtattgatgaccttctttccactagctctcaaacatcttattatcctgaagcatgcaaaaggatgagaccagagaatcatagcaatcagctcaatgtaactacgggaaagctttcttcttcatcagcattttctggtagtttgaatacaaataacgtttcaactataaaccctggaattggtaccttggctgatatacaaaggttgatggcccttgagaaatcacaagcttcacaacaaatgattgactttattacgtcgcaaaacaacatggccggtgaaagtactgaacttgctcagcaaaataattctgacaaaggatttgttgctttacataataaaaagttccaaagcctcactgcgcagaacataccattgcctgacagtactgtgaaccaatcgggagaaagtaatatcttgaggaatggaatacatcaaacacaaccttgggaaattacatctaggtcgcatcactctagcgacaattttgctttgccaaataaatggtctggttacttgacagcagggaacacacagttatcaagcatcacagtaaacccatccacagaaaactatattcaaagtaatgctatttatcaatatcaatgtttagaaaacgttgtggctaaggtgccagtattgtctggaacacacaatacttccagtcaggagggccataaccacagcactgctgctactaatgagcatatcagaactacaagtgaggaagttgttagatcctttacccaacgagcaagtgaaccaaccacacatgggaactacaatctcaactcttctagagtaactgcagaagcaaactccactgagaagccaagaaaaaggggccgtccaagaaaagtagtaaaacccaatggggagccaaaagaaagaggtactaaagggaaacaaaatgttagtcatgaaaaacctacatcgcaaaaaggttcacatactgacattttgaaaactaatggtatttcttatgcttctgaaccttccactggaattactcctaggatggctattgtggagtcgaaaagctctgatcaagataaggaaattcatggaggtgtcattcctcaagctacagcaatatcagttgatcttttagatggcataattcaaaagattaagctcttaagcataagcagaccagacaatgttgtggcagagataccaaaagatgctcttgttccttatgaaggtgaatttggtgcactggttgcatttgaggggaagacaaagaaaaaccgttctcgggccaaagtgaacatcgatccagtcaccactatgatgtggaacttattaatgggaccagatatgggtgatggtgctgaagggttagacaaggataaagagaagtggcttgatgaagaaagaaaagtgttcagaggacgtgttgattcattcattgctcgtatgcatctagttcagggggacagacgtttctctcgatggaaaggatcagtcgtggactcagtcgtgggtgtatttcttacccagaatgtttcggatcatctttctagggcaagatgttcattgaagagataagtgatgttagatcattaattactacagaagataatgaagaaagtaatagtaatgaattgattggaagctctgccgggtatggagtaaaccatgcaactggaggctgccatgtttcttataggaagtcactaactgaatcccatgaaaatgggctttcaggatctgtttttccaactaccggcttttcaagtgtagtagaaactgaagatggctcattagaggatgttatttcttctcaaaattctgctgtttcttcccagaattccccagattacctttttcacagaacggatccaataggttctagttcgttgcaaaatttcaccgaagagggctatatcatgagaaatatatccaacgggactggcagctcaactgactgctcagggtttctgccaattcaagatccaaaaggcacgcttggattgtcagaatattatggacataatcctcttctagtttcaggtgtgaacaagggtgtgttgcttgatctaaacagatcatatcagccattacatacttctatgccctatgttcagaatagcgagtctgatttcacaggtgtgtcatgtttcagccatatggataaatcattccacacaggccctaatagagtgaatctttctagtgttacacaatctgaggccagtctttaccctactgatcctttgcaacaagacgagttttcaccagtaattaaacaaaacttccaaccattatatagttcagacaaagtgtcattattcaaggagcactgttcctatggaaatgatttttcgaggaacaaaactgaagctgctattatggaaccacttgtctactcaaatcctcaagagctgtacactacctcaacagagcaaatgggtgttgaacaatttcaatcaggatgtggccaacaggacaatgatgtgagagttcagacaacatcatatgaaaggcatcagtcttcaaccttgtgtggaaaccagaactctcagttagagatcttgcaaggagttgcttcaggctcaacacagaagttcattgatactcaaaagagtccgtcagaagttcaacaaaacggatcaaaagctaagaaggtacggggtcgacctaaaacgaaaacttatgactgggacagtttacgaaaagaagtgttttctaatggtggggataaacaaagaaataatgatgcaagggatactgttgattgggaggcagttaggcaagcagaagtccgagaaatatctgaaactatcagagagagaggaatgaataacatgctagcagaacgaataaaggaattcctgaaccgattggtgacagaccatggaggtattgatcttgaatggctaagagatgttccaccggacaaagcaaaggacttccttctaagcattagagggcttggactcaaaagtgttgagtgcgttcgtctcttgacgctacatcatatggcttttccagtggacacaaatgttggtcggatatgtgtgaggcttggatgggtgccgcttcaaccattgccagagtctcttcagttgcacctattggaaatgtatgagcttcactaccaaatgattacttttggaaaggttttctgcacaaaaagtaagcctaattgcaattcatgtccattgagagctgaatgtaagcactttgctagtgcatttgcaagtgctaggcttgctcttcccgcacctgaagaaaaacgtttggctacatcggaggatccaaatgttgtagagttttgtcaccaaacatacataaattcaggggctgttggcgaacttgagtggagtgcgaactatcctaagcatgctgtttgtggtaacctgcagccgttcattgaggaaccactgagcccagaacctgaacctgaaaatgtagaggcgaaggacggtgcaatagaggatttctttaatgaagaccctgatgaaattcctactattaatcttaatattgaggagtttacacagaacttgaagaactatatgcaagcaaaccatgttgagattgagtatgctgacatgtcaaaggcattggttgccatcacccctgaagctgcttccattccaactccaaagctcaagaatgtcagtcgtcttaggacagaacaccaagtttatgaactgccagattcacaccctcttctggaaggatttgaacagagagaaccagatgatccctgtccatatcttctttccatatggaccccaggtgaaactgcacaatcaaccaatgcgcccaagacattctgtgattcaggggagactggtcaactatgtggaagtttaacatgctttagttgcaacagtttacgagaaatgcaggctcagaaagtcagaggaacactcttgataccatgccggacagcaatgagaggaagcttcccacttaatgggacatattttcaagttaatgaggtatttgctgaccattgttcaagccaaaatccaattgatgtcccacgaagttggatatgggacctcccaagacgaactgtttactttggaacctcagttcctacaatatttagaggtttaacgactgaagagatacaacaatgcttttggagaggattcgtttgtgtgaggggctttgataggacagtaagggcaccaaggcccctttatgcaaggttgcattttcctgccagcaaggttgttagaggcaaaaagcctggagcggcaagcgtcgaagaataataggtacatcgaagaaatatagaggagctaacaaaacggatggatagccctaaatgagatgctgacccaataagtcgccgaatcacctccaagttctaacccaatttttgaggcgacatgacctgttaaattatgttccatctatggtaacagcttagatgttcttgtgagtcgcatattctttactctgaaattcaatatagcaaatgaaaaaaaacacagtgcatagtctagttctaattgtacctgtgagtggaatcagttgttgtacaacatgaagatgggcctatttgtacaatggtcatacatgttctttgatcatatactataaacaatgtaacctcatcggccgttatttgattgtttcaaaacaaaggaaaagccttttcaattcatg

SEQ ID NO: 29623 - DNA, 2179 bp, Zea Mays
cgcacggccattaccagaaagcctgctccgctctgcttggttccattccaagaagcaaaagaggaggaggaggaggaggaggaggaggaggcggcggactcagactgcaatgagggaggagatggacatagacgcgaccggcgcgggctggctgtcgtggcgagaggcggcggtcgccgtgctcgcgtggctggtgttgcacgtggcgacgcgcgtggcggatgcgctttggtggcggccccgtcgcctggaggcacacttcgcggagcagggtgtgcgcgggccgccgtaccgtttcctgctggggtccgtgaaggagatggtggggctcatggcggaggcctcggccaaacccatgtcgccgccaacctcccacaacgcgctaccccgcgtgctcgccttctaccactactggcggaagatctacggaccgagcttcttgatctggttcggaccgacgcctcgcctaacggtagcggagccggagctggtgcgcgagatcttcctcacgcgagcagaggcgttcgaccgctacgaggcgcatcccgtcgtgcgccagcttgagggcgacggcctcgtcagcctccacggagacaagtgggcgctccaccgccgcgtgctcaccgacgccttctacccggacaacctcaaccggctggtgccccacgtcggcaggtcggtggcggcgctggcggcgaagtggaacgccatggcggccgccgctgggaacggcgaggtggaggtggacgtagcggagtggttccaggctgtgacggaggaggccatcacgcgcgtcaccttcggccgcagctacgacgacggccgcgtcgtgttcgccatgcagggccgcctgatggcctacgcctccgaggccttccgcaaggttcttgcccaccaagaagaactggcagtcgtggaagctgggcagggagatacggcggagcctgacccggctcatcgcccggcgcagcggcatggccgaggaggaggaggaggttcaggccggccactccggaggcttccgcgaccttctcggtgccatgatcaatgccggtgagaggaagacgccggcggcgatcccggtggcggacatgctggaggagtgcaagactttcttcttcgccggcaagcagacgacgacgaaccttctggtctgggccaccgtgctcctggccatgcacccggagtggcaggagcgcgcccgcagcgaggtgctcgacatctgcggccccgacgagctcccgtccaaggagcacctcccgagactcaagactctgggcatgatcataaacgagaccctccggctgtacccgccggcggtggccaccatccgccgcgccaagacggacgtgcagctctcggacgggtgcatgatcccccgcgacacggagctgctcatcccgatcatggccatccaccacgacgccaggttctggggccccgacgccgcgcagttcaaccccgcacggttcgccggcggcacggccagggcggcgaagcacccgctggcgttcatcccgttcgggctgggctcccggatgtgcatcggccagaacctggcacggctggaggccaagctcaccatggcgatcctgctgcagcggttcgagatgaaggcgtccccgaactacatccacgcgccgacggtcctgatgctcctctacccgcagtacggagcgccggtgatcttccggccacgttcggcgcatccggcagcctcatagcgcagatgcttcgcctgtcccccacattcttttgttgattgaaactgatgggaacgccgcaggtctgcctggtgctcgaaagccataggacgtgtcccaaatactccttccgcgaccccctgtgtatatgccaagtgatactagaagccaagaagcactaactttctgtcctagcctgcgcctcggggcctacccaggttgcccgccggaaatgccctcgttaatagaccagatcaggcccagccttttttgttccctgccccatggcgtttgtgtggtatgtgtatgtatttgtaatctgtatagaggtttgctattccatcttctacgttcctagtagagacgaaaatgcaatgggaaaaaaacagagattgagaacaatagcatttgtttaacttgtactccctctgtttttttatttgtcacgctttagtttaaaaatattttaacgggca

SEQ ID NO: 29624 - DNA, 2278 bp, Zea Mays
agcgggagtattgagaagaagacaaagactaacattgatatccttttaggtttgatgaaaagattgatcaaggaccgagcttcagatttaaaagttttaatcacctctgcgactcttgacggtttaaaagtttcaaagttcttctcaggatgccctgtgttaaacattcctggaactttattccctgtggagaaattttacagcactgatcgcccaacaaattatatagaatcttcactcagaacagctatagatatccatgccaaggaacctcctggagatgtcttaatatttatgacaggaaaggatgatattgacaagatggtatcaaaattggaggaaagaattcgaaatcttgaggagggctcctgcatcgatgctcttgtccttcctcttcatggttctttgccacctgagctgcaggttagagtatttgctccagcacctccaaactgccgacgcttcattgttgcaacaaatgttgctgaaacttcgctgactgtagatggtgtcgtgttcgtgattgattgtggttatgtaaagcagcgccaatacaatccatcaagtggaatgtattcacttgatgttgtccaaatcagcagagtgcaggctgatcagcgagcagggcgagctggtagaactcggcccggcaagtgctataggctatacccaatttccatatatcagaatgagtttcttgaggcaacagtccctgaaattcaacgctcttctcttgctggaagtgttctgtatctgaaatcgttaaatcttccagacatcaacatactgaagtttgattttctagatccaccatcacgtgagtcattagaagatgctttgaggcaattatacctcattgatgcaattgatgaaaacggacaaataacggatgttggacgagttatggcagagcttcctcttgagccgtctctttcaaggactttgattgaagcaaatgaattgggatgcctatctcaggcgttaactgttgcatcgattttgtcagcagaaataacattgcgatcagttagcaaggacgtggtggatggaaagaggaaaaggcaggagctccctgatgggtctggctggggtgaccatatacaattgcttcagatatttgaaagctgggaccaaactggctatgacacaaaatggtgctctcatcatgatttgcaggtgcggggtatgaaattgagcaaagatgtgaggaaccaactatgtcagattattcaaaaaattgcaaaaggttcaactgatgtggatgcaaggaaaagccggaagaatgaccctgattatagaaagctgaggagagctctctgcgtaggatatggtaaccagctagctgagaggatgctgcatcacaatggctaccatactgttggctataggacccaacttgtacaggtgcatccatcttctgtactggaaggcgatgagtatggaaagtttccaatgtacgttatttatcatgagctgataagtacaactcgtccatacatgagaaatgtctgcgccgtcgagcaagcctgggttcagcctatattaaagaagctcgacaaattagacataaacagattaagtggtggttcgagtgcaccgggagattctgaacttctgggagacaataagcaagtgaactcgtcaaagaatgacgtgggtgtaaaacaatcagaggtggacagtaaaatccaggcagctcgagagcggtaccttgcacgaaaaggcaagaaatgacaatcgacacgtttaactgatcgctcagcatccttctggtcagcctgaagcttctctgaagatcataccgaggaaccattcgtgttattgtgggtggtgtatgcttcaacgtgcacaaacaagagaatttcttatgtaatcttttgtttgaggactctaaccttttcttttatttggcattactgtgatgtgaccttttccttgggccgaaatattttacaggcttttctgcatgggctagattcttttcccccatattcctatatggtgttgtctgttgaggtcttgtccctcctgcctagcatatgttgagtcccaagcaaggcaacaccgcaatatgatgcgatcttggaagtgatactgatatgcgctctgcttgggtttctctaacaaattttagagtcccgctctccctccctccgttccaaaatataatttgttttagattaattacacattcattaagtaacatatgaatataatttgtatgtatattcattatcatttgaatgaatgtggacaaaaaaaagtgggctagaaggaa

SEQ ID NO: 29625 - DNA, 2622 bp, Zea Mays
atccctaggtacggccactacaacagtgcagagcatctgaagcgtccgattgtctttgtctccatagcagcgttggtcttcgaggtgagaagtcagcgaaggcaaatctgaagtctgcttgattgcttgagtcagatctgatccagtctttcggcaccgagaaggcgagaaccgaggaggagaacatggcgggtgacggcaacggccgcgcggagcttccccggatcgcggtgatcggcgccggtatctttgcgcgcacgcagtacatcccaaggctccgcgagatcgcgcacctcgtcgtcctcaagtccatctggagtcgcacccaggaatctgcaaaggcggccgcggagcttgctcgtgacttcgcgcctgatatcgagtgcaaatggggtgatgcggggctggaggagatcatgggagatagttcaatcatgggcgttgctattgttctcgctgggcaagtccaggttgagctttccctaaagatgctcaaggctggaaaacacgttattcaagagaaacctgcttctggataagcagaaactgcactgtcaatctaccactcatttcaaaacctgttcccgcataaacccatttgggcagtcggagagaactacagatttgagcctgcctttattgagtcaagcaagctgatcaatgatattggggatatgatgcacatccaagttatcatcgaagggtcaatgaacagttcaaatccatatttcaatagcacctggagacggaattttgtgggtggtttcattctggacatgggtgttcacttcattgcaggactacgaatggtaacttcatcatgttatatttcgaagtctccttttttttctcaaaaaacacaggaaatctgggcatcattaagaagaatagagggtgtaagaacccaacagcacttacaccacacacccaaacacaacgcactcacacaacacactctacagcagccttaaaacacagacacaccaagacagctgaaggtcaacccgcacagacccaaaaaactaatcacctgggaggtgagcggacaagaggaatagtcctcaggaccctgccatggcccacaactggcgttcctcaccatccatgactaaagccccaacaacacttggacccgattcataaaaaacacaacgattatgatggttccaaagaatccaagctccaagaataattaaggaattgacacctttccttcaagactatttccagcggccttaatcatcctatctcctattttaaactctaatctgtaaacagtatagtctacagtgcaaacagtgttttgtatggtcatatgcatgatctgctggtcacatcctaattgctccaaagtagcattatctcattcccaccaataagaaaggaattttcattaggttgtgggtcggcctagagactgacctgccttagcaaatgaaatatggatcagattctgagaatatggatcggactctggcctatgctaccagaagcaacattgtttagttaataactctaatcaatttttagatttggcaccccacatccacatagaaagtttagtcctgaaaaactgcttgtgtcatcttaagttgaagtggtcagatttgccaccatgtaactcttttgatagttgtaccctttggcccaagtttcttagcaatgtttctacctactgaattgaagtgtttaagataacaaattcattcactaattcccttgtctgctttgtgaagatgaggatctttctctaacagcttgtaggttcagaaatcacaagcgtatcttctatctcccgtcatgtggatatggctttgccgccaccagataacatatgttccctcttccaactggaaaatggatgcgctggtgtctttgtgtttgccgtcaattcaagatcaccaaagatattatggcgggtcgatggaacaaaaggaacaattcagttgcacagtacggtcataaaggcttttctttgcttttgttttcaaccatattatggtaggtctgtatgatagcattatgaatcaaatcgattgttacaagtaagtagttctgttcaaacaaaaatgtttgtgcacaaatattgtactcatgaaccacctgatgcatttgcaggtgttattctctggtgaaaatgggcagtgccagaagacattttacccgttctgtggagtgaatgaagaactgaagacgtttgtccatgacatgttggaagctggcaaagatggagatcacaaggctgcaccccgtggttcttatgtcgaaggcgcccgtgatgttgccgtgctagaagccatgttggaatctagtgcgaagcaaggagccccagttcaagtgaagagattctaacagatccgaaatgtcacataaaagagactacgtttcttctagggtgatttgtccattggatcatatattttcggtagtaaaatgaacattgttccaaattcatgtacataccgtcgaggttatatattaaatatatatgtgaaaaaatgacatacattagaaccaccattcctacactcgtaaaaatcatgtaccttttcttatacactagatatgttgccctattagatattataaatattagtttttttacgggaaatacgaaagaga

SEQ ID NO: 29626 - DNA, 795 bp, Zea Mays
atttggtatcaatgaccagcacagagtcatggactgccttgcctgtccccattaacattgcaaccgcgtctcccatgaccggccttgctatcccttcactcctcagttgcagctactcttctgcttgctcctgtgctactccgtaccgctaacgccatatccaatagaatttgttttctaccttaccgattttcttttacgccatccttgattgtacctacttgtccacaggaagtttcccacgtttgaggatgtggagaggcaactcgagttggcaattaaagagcaagaagcaacggtagaactctttgcagaagaaaggaagtgccacgaccaagaggtggaaaacctgaagcggaagctcacggaggcctcttccaccattcaggatctgatggagcagctcaatgctgcccggaactgctgcaagagatgaagcagcagacgaagcaacttcaccccccagtaatacgttagtacgtgtatgtcaccagcatgctcttagcataaataatgcccagatggttgtggagctgttagcagtagcagaccagaatgctctatgtatgtttcacgtcctgttgttagatgtgtggtagcaagtgtaagatgattgaatgagactaacgtgatgaattccctaggccctcatggttcctgatttagtgtaataataattagagaggatattgagagtgaattgcaactggctttgtttgggagcaatgatactgaaggggattagagggcctaaaatctgaatagcaagaggattttagccttttcaatctcttt

SEQ ID NO: 29627 - DNA, 991 bp, Zea Mays
  misc_feature (991)..(991): n is a, c, g, or t
ctcctggattgtaaccctagctcgtttgttctggaacaaatccaactcgccgcacgcgactgagatgagcgcgccgccgcacgtttcttacaccgcgctcccgccaccacctcctgctcccactgccacctccttctcgcagctcccgcctctgcccgacgtcgtcggtggatgccgcgtcaaggctggcgctaaaccacctgggcccggcgcaaatccaccagatccattcgcagctcttattgtccctactcttgtgagagtcgcgaggacgagctttccccctcttgagatccgatgtctaatccatttttcaagcatgcggttcctaaaacctccctccaatcaagtacatgcaaaagttcgcgaagataaccgattttacccttactttaagaattgcctaggttcaatatatggaacccacgttccaatatcaatgtcacctaatcaagctgcaccattcaggaatagaaaagggacacttagtcaaaatgtgatgttcgtttgtgattttgatctcagagtcacttatttgtcagctggatgggaaggatcagcaacagattcaatggttctcagatctgcaatgaccaattctataggaaagttctaactagtagatggtggttatgccaatacagcttcctttcttgcgccttatcgtggggttaggtaccacttgaaagagtttcttggaatgaaaaaagatgcatgatcattgctgaaccaacgatatgggacaacattatcactacatttcttagagctaagaagttccgcaagaagtcttttcctctcaaccactacaaaattctgatgaaggagagaaatttaaaaccatagaagtggaagatgaagatactaatgaaccacaagtagatgcgagaatagaacaagatgaagatatagtaattgttgaaagggttgaacagaggttacctaaaaggtcagatgcaccaattgtcaatcaagagaaggagacaaagan

SEQ ID NO: 29628 - DNA, 1303 bp, Zea Mays
ctcatttccattttattatgacgggaaaataaaaatgatatcaaattacaagtgtaccttcagctcgtaagaaggtaaaagtacaaatgtgacgcaaaagccaatgtcaaatccgtgtgaacagtacagggatactgtccacctatttataggcacgggtcgcagcccatggaaaattacaataatgccctttacatttatcaataactctatgataactcttcgaggtctaatctggtttttcatttttaagtcggtttccttttccgccgctattccgaagctcttctacacacagcttcggctctgcgccaacctttgtgctttttcgtactgtggctctgatccgagtccgaaggtacctgttaatgtactttactccagaaacattgttaaatcatgtttttgaggatcttcggaagccgaaggcccccaacaatgccaaactcccagacgcgacggggaggacataggacgtggggcacacgacacggacaaaagacgagtgccggggctgtcagctcatcgcgcgatcgggtgacgacgacgaacagccgagcgctgcaaggaggtggagaacgacgacggatcaaagatcaaacagtggagcttgcacatgcagggaggaatatgagcgacgacgactgtgtaaggagtgccgagctggggagggtgggattcgacggcaaacacgaacacgtcgaagcccgaagaacgagaagcgagcgcgctgcaatgacgacgagcaggcgcggccgagtctgcgcagagattcaaaaccacgcgcgcagcgatggtgatccagtggcgacaggagcagggacggagctcggcaaggtcgcggccgggcgagcaccagaggagctcgcaacggatccgagtaggggccggacgagcaacagagaaagcagcagcggccagcacccatggcgagctccagccaccagggagccgagcgtgatgaggcgagctgccggatggaatagggacggccggtgccatggctgaaggcagggaggatggccgagcgagctggaacaggggcgcgacggccatggcgagggaggctggagggagctcggcgagctggaatgcgcgcagggagggaaggaactcggctcgacgcgcaggaaaaaatggagcttgcagggaagagagaagatggagtgagcggtggaaagaaaaaatctacagggagaggctgaccggcagtggacagaatcaatgaaaatatcagtagtagagggcagctgggaggatgaggccaagagaaatatccagagagccgtaagggagatattag

SEQ ID NO: 29629 - DNA, 5157 bp, Zea Mays
cagcccgcgtccatccaccgcccgtgggaaggcagagcagtgagcgtcgcaggcatcggctccagctccggctccgcccgccgccgcaccggcccaccctcctcccccgatccgatcgccgatcaccggccctcgcttagcctcgccacgcctcgcgacaatatttggaacccctgttaccgatcgcctcatgccgtaccactgaacgatcccaccccaacaccgtacccccgccgcctcctccgccgtgcccacagtcgcctccgcctttcgcctgctaccccgtagaggctctatatcccgatcggactagggtgcggacgatggctagcaacgccgaccagcatgctgccgttgtctcggctgccccgtccgatagcccggttggggcgaagaaggctggggcggcggccgccgtctggaaactccccgcggccgcggcggttcccgtcgcggaggtggttgaaaaccccatcatggacgcacactcctggccggcgctgcccgggctgtcgtctccgccgccgccgccgccgccgcatgcggggccaacagccaaagcgtcaccgaaggccgcttctccagctcccactggggcggcgacgtcgcccgtctctttgggcaatcctggcgcgccggatgctagccatggtaacgatgctcgggtgcgcaatcctgtggcccggcgtgccctggtgatgcctgcggcggatgggctggagaagagtgcccctgcaccggaaccgtcccctgtttatgtgcctaatgcccggagcaatggtgcagatcctcatcagaatggacgtcctggctcgcatcaccatggccgaggtggtggctatggtgggggaaacaggaggggtaatggtggaggtggggggcgtcgcgggagtgagcaccacggtggttttgatgggcaacggcgcggaggtggccgcagagatggccatggaccggttcatcagctgcgtggccatcagccaacatacattaaggctcctgttgtagcaggagcacctccaccgcctccaccatttgttagccccgctactcctcagacaccaccttatggaccacctatgggcttccatgacatgtcagcgcatgtttactatttcccggcacccacctcggaaggcattcaaggcctgccttttgtgcctcttccagcaagcccccaagctgttctaattgacccttctcgaaagaaccttctggagcagatagaatactatttcagcgatgacaatttgtgcaaggacctttacttgcggcaacacatggatgggcaaggttgggtgccattatccctgatcgctggctttcgccaagtaagtttgcaggcctcttgagtttatttcccatttaaaatctactctgaatttttgttttgtttcttagtcagctgtctagcgagcttgtgcgcatgttctgtgtctgtaattacttgcactactgaattagaggggctgcatatagtgacatggattaatttaagtatttaactgaacagcaagacagcccttacacaataaggaattggattatattactgacgtggttgataacatggatggcacagctgcactgaattgttgcattctaatatcttagtagtatctgcatttaagaaattaaactccacagttatgtttgcaagtggtaatgttagtgtggaacattcaccatatgattaggatagcgatatgtatcgaaaacagaggggggcactatttttattttctgacactttttgcagtggtattatcatatgacttaagctcagttttagtgaaacagctgttgaccaggttatgtggttacatttacttgagtcgtgagttactcaaaacaggggtcagtagcttcaaggcgcattttttttcaaggttcattgcaagctgagttcatcccaactaacagcagtggtacctccatttttagtgtattcagctacacatttgtacaggctgtttgatgatgcatttactacttatttcttattgctggcatagctttgtatgacccaagccacaaaccttatttcacttccatttgttgagctgctacagatattttgtatggaccaagttctgtgcccatatgcatgttcattctagctttactggataagggtgaactcttgaattgataagtactaatattctattgtttatggtcatatggtgtgatgcattattttctctttctaagttgcatgtaacctttaaaagttacaatatgtgctgggttagttgggtatgtacacaattaatttgcttttagggtaaccttgtccaagctttgcctgggctttttgcaactaatataatacttctgatagttatagaaaactcacggagtaggctagtgctaaatatttaattggatatagttatagtggatctaattggttgcctgcattagcttgtatgcaggcttgcacagttctcaaagctgagcattgtccagtattctagatttttcctgtattagacgatgcagatttgcataatccgatgagcatacaaaaataaaatattttctcattctctacctttactagagacttcagatctctaatcactactactttaaagcacgacattcattgtgtgtcacccgagcgcctcgcgcgcgtgcccagccgccacaccttccgcctcagcttacgctcgcagaaataacaaaaaatggagggtacgacaccaggaatagaacctgggtcattgcgaccgcggcctcgcgctttaaccaccgcgacacacatatgcttgtgttatataaagaagcgatattataaatatgtatatactgttatttggaaaattaaaaatataatcatgtttgaataaaaatctcatttaaacaagatctacctatatgatatatagaaaccatagcaacgtacgggcaactaactagtagaacatataatgtgactatatgcaataatatgtaaacaaacaaacacaattttattagacgcggcttgcatatgcagaacatccaaacgcgaaggtgttgcatacatctatgctggcttaggcagtgcggcataaggtctaatgcaagctaagcctgatacaagcaaccaatcagacctgttgtaacaaagttagctgaggtcactatagaagttaatgtggcaaagtaagttcatttcatacgaaggatgtctcctcacagaagtagtatggtttgatttcacttttgttttttaaggcaattttgcttttttcaagggactttatatccatctttatgagtagtatgtgattttttcagcatgatttcttccatcacaacaacatagcctggcaggaaactggtaaataagggggtgactgcttgcaattgagggtttgtctttagtgttttgatcatatgtttctgcgaaagggcctctaactgagttagttacgtggtctgagtagcattactcaggtcctgattttgactcccaacaattttaggctaggattaaaaaaatcctcttgtctgacccacgccaaagcagaggtctaagacatggccctggtcgtagtcattctcacatgggttacggtgcctctgtgtatgtgtggagcagaggtttggagattttcttgatctgcatgaggtctttttcttaatataatgcctaggggttgtcttacccaagtaggtcgagttttgtttatatgtttctaggataaccatttctctcttctagtcttcaccatagaagtctctagtaggaaattgacaggtatttctctcttacccacgtacgacatattgggatttttttttgttgattgctaggagggttttgtaacatttcattaaggaataaagaaagaagagtgcttattcacaacacctcgaccccaccatgaaactttgtacattttgggataatggagtacataaggtttatgcctctgtttctgtttgtcttttcttttgtgtgtaatgcgcttagtcatgatttacagctggcatactaatgtatttgttaatacaaatggttttgtgacacagaatccattaatatatggaactggatattgttaatccagtaaggtgtctttgtggagtataacagtcgaatcagataacctttttgagaatattcaaatagatgttttgcactccctctgttctaaattgtaagtcgtttagtttttttctagatacatagtttttaaattgtatctagacataatgtatatctagatgcgtatcaaaagctattttactggaaaagcaagaatgacttacagtttgggacggagggaatacttttgttcctttatttatttaagaaatggtatcactcacctactccttttacaggtccagaaaattactaataatattcagtttatcttggaaacagtcatgctatctaacattgtggaagtgcagggagacaagctacggaggcgtggagcatgggagaattggttgcttccaaaactgaactattctgctgggagttcttctggttcgatgacccctgtgacatctaacattgatgctcttgcatctcagtttcgttctgttggacttgagggggcaacgtaccatccaagcatgcctgggatgtctggtgaagctctcctgacaagatcagcaacttcagttagtctaggttaccatgcatcaaccttcggtgggctacagagcaatgggagtgaacctctctttgggccgaagtctgcaagaaatctactcaggagcgataccttttgaggctatatattcaagagaagttaagtacaatggcaggccgagttttcacagtaacggcatgcacaccttatctcaggtgagatgtaaaaacagctgttaaataaaaccaaaaaaggcaaaagcataatacaaaaaaaaagcatacacaaagacaaaaaaatacaaaatgcaaaaacaaaaataaaaagagcataggcagcttttgtgctagtactcctgtcctttgtgttatgtggtatattacctagtaggtttgttttctaatgctaggagtttgatggctcttctgtgtgaaccgagttatttaagtgttatggatggtaccattgggaaactgttgagtggacgacgttatataaaagtacatgaaaacattgttaattatgctgctctctgctgatttgtgccgcatttctt

SEQ ID NO: 29630 - DNA, 696 bp, Zea Mays
cccagatttacacaaataatcgaccttcctggaaacgaacgagaaccttgacgatgctgggaacgaactcatcctgtcggacgaagatgtcgtgcgcttccagatcggggaggtgtttgctcacatgccgagggacgacgtcgagactaggctggagcagatgaaagaggatgcggctaagaagctggagaggctagaggaggagaaggaatccgtcctcgcccagatggccgagctgaagaagatactgtacgggaagttcaaggacgccatcaacctggaggaagattaagagtagtactggagttgtgacgacgtggccctctctttctagttcaggtcctgtttttgttcccctgctccccccacagaagcgcttggcccgctcgtgtaatggaagcttgagtctctcagtctttcagaagctcttttcaccaagaacccagaatagttttcattctgcgggtttatacggattgaagctaatggcgctgggcccatgaatcctttttcagtttgattgtacttggtgtatgtgggtacatcgcttgccctatttcctagtacttactagcaagcctgtgactgtgagtaccggaaaacagtggagataacgggcatgtaggtcttgttttctgcctaatatgttgggaatcatttgcagcctttcaccagcttcggtgatatttggagaag

SEQ ID NO: 29631 - DNA, 1897 bp, Zea Mays
atcattgctttggagcctaagcaagtgaaagttaatccggtgatcacgccaccgtctttcccagtatcaaaaggtgtcagaagtaaaggttccagtcaccgggacaccaagagttccgggtggtatcaacatcaggatgatgacaacttcaatttctataagccgcaagcacagaagaaggattttgctgacaatatgtcaccgtcttctaccgccagttatggtagaacagacagtgagcatgggtcaaacaggagcgttcagttaaaatcagtgcctgccagcaggtctagattttcaaatgacccaaaggatatattatgtcaaggagatacaggcggtcaagtggaagcttcaggacagtgtacagtcagtccacaaggtccaattttagtggacaaacaaatggatccgttctccagtcaatggaaagagaaagactatagtggtggaaaccaaatcataagaaaagaatgtgacataaataccaaatcagattatgaagccaacgctagaggtgaaagtctcggtaggaaatgcatacagaagagtaaagaaggtcgtaagggtgggtttgaagatgaattcagtaatggaagaacacatggacaaaaaggtagacacggtaacactgacagtcctgaagatggaatcgttggaaacaaatacaaacataaggccgatgatgttgttataagcagccttgaagataaagatatgagcattaagtatgaacataatggtagctttagatttgaggaacttagtaagagagatgaaaaatgcaacaaaaaggatgacaacaatattcttgaacttgagagcatagctaggggatgtgaacaggacagaatcaaagatgactgcggaaaactgctgcactcagatagtagaaatggcaacacggtggccaagaattattcatcagttaatgaacacacaaattcaagttctcttgtttcctctgtggccgaggtagatgatatacagtcttcagttggcaagaatggggattcatccttttttactggtttcctcaagaaaggtttaaaggacctttctttattcaaccagtctgtagacagtgctaaggtttatatcaacggtcatccaatctctgaacgagctctccggaaatcagagaagaaagttggtcctgttggccctggttcatattggtacgactaccgtgctggattttggggtgtcttcggacaagagtgtagaggcatcataccaccattcataaaagaattcaactatccaatgcccaagaactgcgctggtggtagcactggggttttcgtaaatgggagagagctccaccagaaagattttgatttgcttgtagggagagggctccctcgaatacctggaaagtcatattctgttgagatatcaggaagcgtgatcgacgatacgactggcacgaagctacgtggtcttggaaagcttgcacccacaatcgagaaaatgaaacgtggctttggcatgcacgtccccgaagagacaaagtttgttgatctgttaggattggtgacagcggtagaaaggctttcacgtcttgaagctcgacagcgatgcagcctccggacattgagagaagaaatggagagatgtcataactcatacgcattcgcatcatcctacttggaattaaatgtcgtgtttccatggtgacagctccggccggcggcatacagttcctgtctccctctcgtttgtaaaattcgccacaccgtaggtgctaggtagcattcggagcatgtatccgtttcgggtttgtgatacagtggcgcaactcttcggctatataaatgtacctagtactttgtaacatgttgtccagtatgcaacgacgcatcagatttgtatacctctcgaattcgagccagag

SEQ ID NO: 29632 - DNA, 158 bp, Zea Mays
gcgcgctccagctagctgcatccggcttcgaactctggtggtggatgggacgagacacgcagacaagacgacgacgacgacgacacgggatggagacggtggagtactacgtactctgtctgcacccttgtctcttgtccctgcactgcactgcatgc

SEQ ID NO: 29633 - DNA, 2414 bp, Zea Mays
ttcatcgattcggcgagttcaaccgtgtcctccgcgctccgtgcctgccagcctgccactgctcggttctagaatccactccctgacctgtgcggcgctccgtgcctggctgccagcctgccactgctcggttctagaatccactccctgacctgtgcggcgttcccgtgcccggccggagtatcgatcgcatggcctgcgccggcgccgcgcagaaggtctcagcggtgctctaccactacccgtgcccggacggcgcgttcgcagcgctcgccgctcacctctatttttccggcgccgcccacccggtccgattcttccccaataccgtctacgaccccatcagatgttcaattctctaattccaaaggtgcggtgatctaagttaatggtgctgtgttaaacatacgaacatcggacagtaagtacctgatgaaagtgtgagcctcaagtgattgtaggcattataaagttctgcttcgactcttctagttgtattttattgtgggaaggattcaatctgtactaggtttagcataatcagagctagaatggactacctctgttggatttcattaaatcataaaacacacggcacctttttttatacttttgtgggattttcatcttagtgacacaaactctgtgcaattatgctgatgcttttgttctggtatattccttctgctatgatatttttttgtctgttttgtaggagtgattcacttccactggaagaaataaaagatgtttaccttcttgactttgtgggacctcctggttttgttgaagatatagcccctaaagtcgaaagaataacaatcctggaccatcataagaccgcttttgaaagtttgtgtgtgaatgccacacttgggcaaaatgtgaccaaggtgatagacatgcagcgtagtggtgcgacaattgcatttgacttctttagaaacaagctcttaacagaagttagcacctcacggggtaatgaaagtggtaaagatgtagccaaggtcaaatatgtacctgacaacaaggctgaaacagtacacaagctttttaagtttattgaagacggggacttatggagatggaaaattccaaatagcaaggccttcagcagtggacttaaagatttggacattgaattcaatgtcaatgcaaataataaattgtttgatcagttgttggagttggatcctgagcatgtcatttcccatggacaagcgacattattagagaagcaaagattaatagatgattgtttggagaaatcctatgaaatttccctgggatgtggccagtttgggagttgtctggctgttgatgctgatgctatttcaaatttgagaagcgaacttggaaatcaactagctagcaagagccgtgattttaatctaaggggtattggggctgttgtatacaaagttcctgagttgaataatgaccagatactgaaagtaagtctaagaagtttagaacaagaagacacaacctgtatctctcaggaatatggtggtgggggacatcggaatgcaagctcgtttattttgagtgtgactgagtttgacaggtggaaagtcggatcttctcgaccaaaagttttgaagacatgaactgtcgtgtggatgaggtttcgcgtgcttggccaacgtcagtaacaaaacggcagcaggtgggcatctttgaagcaagtattggttgatgagctatgaattcttagggaagacggcccgaatgaacttcaagaaacgctccgagtagaactgggggtccacaaccgagatcgagtccgagtcatattgcatggaattcacgatcgattttctttgtcatattgtactattgcaatatgtcaatgatgcccaggtagaggaccaggaacggacccagccaaaagtttgagtgggggcttaaatagaagcataattattaatggacctttacagctacagtgaataatacaaacttcgcaagaaccagaaaattaagtgaggcccgtgcttcccactcagcctaacgtgggtccgcccatgtagaggacaacatcgcacacctcacggaggagaaggccaatgcagctgatgaggagttgaaaaccttgatgatatgctagttgtgatgcttctccaaccagtgagatagtagctgatgatatgctagttgaacagctttaaccagtgatgcacaattttactttatgcggggggaagggtgactcggaacgacatgttttacatagtagagatggagtgttcttatcacttggggccttggggtgagacagaaaaagaacaatggaacgctggctggttgtggagcagaaaatcttttattcttggtcttttttttcaaacttaaatagatgcaaatgtgtagatgagggcatgttcgtttccctctaataaattttagcatct

SEQ ID NO: 29634 - DNA, 2594 bp, Zea Mays
ccggagcagcggcacacacagcgcgactgcagcaaagcagccttcgcttcgctttcctcgcagcgtgaccgactgaccgcgaagccgccgtgaaccctcctcatccccgtcccccctgctccggcttcgccgggctcctctctcccacttgcgccaacattcaagccccgaccccaattcacatccgaggcgctcgcccctttccatctccatcgcccacgcccacgcccgcgcgtctcgtgtccacgcctcgccgcgacttctcccccctaaaccccgcgagaggccgaggtacatgagagagtgatcggcctcgccttcgcgcccacgctcgcgccgagagtgtgatgggcaacacgtgcggcgtcacgcttagatccaagtacttcgccagcttccgcggcagcgcgtcgcagcgccgtgacgcgccggggtactcacctgtcgccacctccgcggccgccgatgaaccctcgccgcatgggaacgggaagcgagccacgcgtccgtcccaggctgcagcggcggcggacgggtcagccccgccccccgccccaggcatgcggcgcggggtgccggcccccgcggagctcacggccaacgtgctgggccacccgaccccgagcctccgcgaccactacgcgctcggccgcaagctggggcaggggcagttcggcaccacctacctctgcacggacctcgccacgggcgtggactacgcctgcaagagtatagccaagcggaagctcatcaccaaggaggatgtcgaggacgtgcgccgcgagatccagattatgcaccacctggctggccaccggaacgtcgtcgccatcaagggcgcgtacgaggaccagctgtacgtccacatcgttatggagttctgcgcgggcggggagctcttcgaccgtatcatacagcgggggcattacagcgagcgcaaggccgcggagctcacgcgcattatcgttggggtcgtcgaggcttgccactcgctcggggtaatgcacagggatctcaagccagagaacttcctgctctcgaacaaggatgacgatatgtcgctcaaggccatcgacttcggcctctccgtgttcttcaagcctggtcaaatttttaccgatgttgtgggaagcccttactatgtagctccagaagtgctgcgcaaacgatatggaccagaagctgatgtgtggacagctggagttattctttacatacttctatgtggtgtaccgccattttgggcagagacacagcaaggaattttcgatgctgttctgaaaggtgtaattgattttgatttggatccctggcctgtgatctctgagagtgcgaaggatcttataaggagaatgctgaatcctatcccatcagagcgcctaacagcacatgaagttctatgtcatccatggatttgtgaccatggagttgctcctgatcgtcctcttgatccagctgtcctgtcacgcatcaagcagttctcagcgatgaacaagttaaagaagatggctttgcaggtaattgctgagagcctttcggaggaggagattgcagggctgaaggaaatgttcatggcaatggatacagataatagcggtgcaattacatatgatgaactgaaggaaggattgagaaagtatggctccacattaaaggatactgaaattcgtgatctcatggaggcggcggatatagacaacagtgggaccattgattatatagaattcattgctgctacattgcacctcaataaactggaacgtgaggaacatctagttgcagcattttcgtattttgacaaagatggcagtggttacattactgtggatgagcttcaacaagcgtgcaaagagcataacatgccagctgcttttcttgatgatgtgattaaagaagctgaccaggataatgatgggcgcattgattacggggaatttgttgccatgatgacaaagggcaatatgggagttgggaggagaacgatgagaaacagcttgaacataagcatgagggatacgcctgctggtgccctctgaagtctgagcatccaagaaatttgttgcagtatgagagaacgcctggaattccgggtagggtaactcaactcctgctctttcctcgatgagaagtgtgaattgttatgcgttagttggattgcaaatgttcgtagacgtcgggcgtgtttgattttcttgtgcccttgcctcacctaacctagctgggcaagggtaccctcgccagccgaggcaagctgaagcggctcacctgatacctggccaagcatggaaaaatctttacggcacgggaaacgaggcagatggtaaagaatccaatccaaacacaaacaggctggattttgtccagacaggcgaggcaagcgcttggcgtcttggcgaggaaaccaaacgttcctgttgccctcactaattgcaagttttcatatgcagctgggccatcacgccaaaaaaaaaaacttctctacgtgtaaacgtgtatattcgacatcctgatataaataggaatttcaagctggctcaagcatatgtcatacttaatcatttgctttcgctcattcattgtttggtgcaatgcgt

SEQ ID NO: 29635 - DNA, 2047 bp, Zea Mays
aagcttggattcgttttcgttcatgcatttgacaagagaaacctgtggcacaagatgcctgttctgatcggtttactgtacctgaacacccgtcggaccctcctcgaaaaatacaacctgctagctgttgggagttctcatggtgctctgattgaccccaaggatcagttcatgtaccgcaccggagatggcaagtacaatgaccccgataatgctgaggctggtagccaatacacattttttgggagaaacatgaagccggttgatcaagagtatgagttgatgagcccagatccatttgttgtggcgacaaagctgttagccaggagagaatacaaggacacaggaaaacagttcaatatactagcagctgcatggatacagttcatggttcatgactggatggatcatatggaggataccaaacagattgaaatcacagctccaaacgaagtggccaataagtgcccactcaaatcattcaagttctatgccacaaaagaactgcctacgaattctgatggaacaataaagactggttactacaatgtccgcacagcttggtgggacgggagtgcaatatatggtaataatgataaaaaggcagaaaagctcaggacttatgttgatggaaaactagtgatcggagatgacggtcttcttttgcatgaggagaatggtgtggcattattgggcgatgtccgcaacagttgggttggggtttcgatcttacaagctctttttgttaaggaacacaatgcagtgtgtgatgcaataaaggaagaacatcccaacctatcagacgaagaattatatcgatatgctagattggtcacttctgctgtcattgcaaaggttcacactattgattggactgtggagcttctcaagactaagaccatgagagctggaatgcgcgcaaattggaggaccggcattaggtgggcttgtgggattgaagaagccgatcaaccatggcgtaccttattctttgactgaagagtttactagtgtttacagaatgcactccctattaccaagcactcttaagctcagggatccgaccggccaacccgatgcaaataattccccaccgtacttgaaagacgtcgatattggagagttggttggtctcaagggggaaggacaactatcgaaaataggctttgaaatggaaatattatcaatgggatatcaagcttgtggtgcacttgaactatggaactacccaagtttcttcagggacctcataccacaaaatttggatggtaccaatcgatctgacaggatcgaccttgctgccctagaagtatacagagatagggagagaagtgtaccgaggtacaatgagttcaggagaagactatttctgattccaataaaatgctgggaggatctgacaagtgacaaggacgcaattgaagccataagagcaatatatggagacgatgtagagaaattggatcttcttgttggtcttatggcagagaaaaaaatcaaggggtttgccataagcgaaacagcattcaacattttcattttaatggcatcgaggagactggaagcagatcgattttttacaagcaatttcaatgagaaaacatacacaaagaaggggatgcaatgggtcaaaacaactgaaggcctacgggatgtgatcaaccggcactaccctgaaatcagtgccaagtggatgaagtcctctagtgctttctctgtgtgggatgcagactactagtgcaaaaataaagcccccctgccatattttcaatttgtcaagttttatgaagtattatttgtttacagaatgatggtgtttgttcagtgcaaataaatatacttaatataaatatgtcattgtaatatatgtaataggattcattgttgaatgacacaagttgtatgcttatttttttacaatttattgtacattattatttgttcattgtaattaaatatggctgggaaaataagtaggaggagaccatatgacatctaccttcaatcttctccgagattacatctttcttttggttttggtcaacaa

SEQ ID NO: 29636 - DNA, 2708 bp, Zea Mays
tatatttcggacaagacaacgccgttgacttcttcacaccaatcgtccaaatcacccctggatcgccggtgatggagatcctgagtccgtcgccgccacccagccactgcccactcctacgctgcggcggtcactgggagcagcaccacggcgagacgtgggtccacgtggctgtcgggaggtcgccggagaagacgctttcgctgctacgatgggccctgcgccgcttcggttgcagccggatcgtcctgctccacgtccaccacccgtcgccgctcatcccaaccctctgaaagatccccgcggtccaagccacagaggaggtggtgctctcccatcgcaagtccgagaaggaggagatgaacaagatcctcctcacctacctcgccttctgccacagagccaaggtccaggccaggcttcttgtcacggagaacggccaaatccacgacggcatcctcagtctggtcgaccatcacaggatcaccaagctcgtaatgggttctacacccgataattgcttcaagttaaaatatggcaaagaatctttaatggccagcagtgctcctgcgttttgtcaaatctggttcgtgtggagaggaaggcacatctggaccagagaagcgagtgcagccaccgacaatgctaccccagttcagtaccaatatgatgtgatgactacaaaaagaattaggttcagttcatatactgacaacactggagccatacttgatgaaggatatcctgcgcatgaggcattaacaacagttgatctaaatcaagattggcaagatgatacagaaccagaactcaactcaacattttggtctcgttcttcaatacatgctgatacattacagttagatcctaagtatttcaggaggtattggctaatgtcaaacaactaatgatggaagctgacagatcaaggaaagaagcgttttctgagttgatgaagcgtaaagaaacggagtcaaaagctgcgagtgcttttgccaagacaaaagattctgattctgccaaaaaacatgaaatagaaatgagggaggaacttgaagttgtattggtagacacaagaaagcagcatgaagaccttataaagaataaagagagagcagtatcagtactggactcttctacgaggagatcagctattctagatgcccatgctgaaaaaataaagcttcagatagatgagttctcggcagagcttgaagtgatccaatcttccatagaaactcttcgccagaagaaactaaaaatgcaaaggctagaaagcaaacatattgacctggataaggggtgcacatacagccatgccacactgtcaaattgcgcctcaaatgcttttggagatgatttatacggcttcagagaatttacagtgttggatatgcaatctgctacgtgtaaattctcagagagcttcaggatgtggtcgcaaggtcgtgggtgtgtttacaaaggagaaattatgaacagaactgtgatgatctataagctgcactgccatagcattgagagcgtgaggcagttccagcaagaggtttatatcctcagcaatgtgaggcaccctcatctagtgacactggttggggcgtgcccggaagcgctgtgcctcgtttatgaatacctgccaaacgggagccttcacgaccgcctcttcagcagacgcagcagccgtcacttgccgtggagaattcgtgcacgcatcgtcgccgagatctcagacgcgctgctgttcttgcattcctgtaagcctcagacgatcgtacacggcaacttgaaactcgagaacatccttctagataccgaatgccattgcaagatagccgatttcggtatctctcggctattcacaggcgacgtgaaggattacccgtcggggggttctgagcctccggaagggtcttttccctacgcagatccggagtacatgagaagcaaagtgttgacacccaagtctgacgtatactgcttcggaaccgtgatactccagctactgaccggaagacaggagcctgcacggcggcttgctggtgaagtaaggtgtgccatggcttgtggcaagctatcgtcaattctcgaccctgctgctgggcattggcctatggaggtggccggaaggctagcggaactgggcctgaggtgcagtgaggacagaagccgggatcgcccagacctgactgctgagaccgtacgagagctggaacagctacacttgacgagggaggaggaacaagcaccctcctctttcctgtgcccgattatgcaggagataatgcatgatcctcaggtgtgcgctgctgatggggtgacctacgaagggcgggcgatccgtgagcggatggagttggagactgggcaggggacagcgcctctgaacaacctgaaactggagcatctcagtctcacacctaaccacgcccttcggttcgctatccaggattggcttcgtcgctctcgccgatgaaactttttgcctggcgtttcttttgggttttcgacctgtacagatttcacgtgtaaaggggtatagcatatctgcatatgaataatttgaatagctgttctaaggttttgtctgtacttcatgaaatgtatcaggatgcatgtacgcggcaatgcagcttcaggatcgatcgcataaatcttaaaataatactgtctatgccatgtccaaccatctctctaatctcatcttttat

SEQ ID NO: 29637 - DNA, 310 bp, Zea Mays
agaacaagggagtaaaacaagtaggcacacacccaactgaccagtcttctaatggtacttgttttttttcagagacaacatctcagcacaagctgtgtattgtgatgtaatgttctggaaccgcagacatttttctgtgaagaatactgtttgtgatgcactttgacttacggctggtttgtaaaacccatccatggtttggcaagcacaatatttgattatttttttacctccatgttcagatgtcgagacctaataaagctccatttagtggagtgactgaggatttgaaaggaagagcaggttgcta

SEQ ID NO: 29638 - DNA, 2543 bp, Zea Mays
gcctcctactttatggtacttggttgttattgatgacatatgggatatatcaacatggaagctgattagatgtgctttggtggaaagtaaccctggaagtagaataatcataactactcgcatttgtgaagttgccaaaaaggttggtggtgtttacaacaagaaaccactctctcttgatgactccaagacattattctatactagagtatttgctggtgaaagcatgagtcttgataacatatctggtgaagtgtgcaacaaaatcctaagaaaatgtggtggtgtgccattgtccatcattacgatagctagtctgcttgttggtaaacagagggaggactggtctaaggtgtatgattatattggttttgggcatgaagataacgaggttattgggaacatgagaaagatattagctttcagctattacaatctacctccttatctaaagacatgcttattgcacctaagcatatttccagaagatcacaagattgagaaaaattcattgatatggaggtggatagctgaaggttttgttattggcagagaagaactagggttatttgaggttggagagagctatttcaatgagctcataaatagaagcatgatccggtggatagagctctctagtagaagcaagattcgagatggttgtggtattcatgatatggtgcttgatcttatccgcactttgtcaggtgaagtaaacttggtcacggtatcagatgtggagcagcagtgtaccacatcatcatcatattcaccagtcagaagcattagcgctcgaagattagccttccacaaaaaaagaagcattgaacacaaccctggcacagaaataggacaggtgagatcattcaatgctttcaactgctctggtagtaggatgccccgacttttaagcttcagggtcttacgtgtactagctctggagaactgtaatttctcagcaggaaactgttgccttggaaatattggcaaattgcatcagctgaggtacctagggctagtggagacatccattcgtgacgacttgctgcctggagaaacaggacgcctcaagtttctgcagacactagatgtaagacgaagtggcataaaaatattgccagcgtctgttggtgagctaaggaaactgatgtgcctgcgtgctaccgagggcacaaggatgatggccgagattgggaagctggcgtcactggaagagcttgaggtacactctgtggacaagtcgccaaacttcgccacggggctggggcagctaaccaaggtgagggtgcttgagatccatttcgacgaaatggacgagagcacagagaaggctctcatggagtccctgcgcaacctgcggaaaatccagagtctgcagatatggtccaagaaggagaggacaattgaccttggcggcttgttggaagactggacgccaaccccttcaaatctccgtcaactgatgctgcgtggcatccatttgcccaggcgtccgtcatggattgatccctcatgtgtcccgctcctctcgtacttgtcgctcacggtccaggccgtgcaagtgcaggatctagaaatcctcgggaggctgccgttgctcagctacctctacatctggagtgagggcatcaactgcttatcctatactgctaccagcagagacgagtttcagaatctgagatatctggacacaaacctggagatcatgtgtggacagcagggagcactgcctatggttgagaagttgacatgccgtgccagcatggggaagtatgttgccttcgccaggagcagcatgcctttcgacgatggcagcgtggtgaatcctgctgctgttgctgaggcagaattgccagtaattctacctttggacattggctggcccgtgaacatgccttgcctccggggcatcacctatttgctggactaccaggactgcagtgccaaggagtgggctcatgtggagacattgctcatgcacgtgagaaaaatccaccccaactgtccacccttccgaatcaaaaagaactgcagagacaaggagattactatgatcgacgcaatcatctaccttgaagatgtcaaggatgtgttcaaggacaacccctccaaatactcggagtttcttgatctcttgcaagattataggagagacagtcgggatgacggcgatggatctgatcatgttacccgcacaaatggcgaagaagaggacgatactcatgaagcgtaatatgcaatccctgtcaccagtggatgatctttgcttcagttaattcatcatccaaagaaaaagagaggaaaggctgatataagaacaaaaacattttcccctctttgttccgaccgctgtgttccatcatggaagtcttcctctagaaaaaaagacctatattttttaaagaacacctagtgcccggcaagaaaatacctaaataaaatttgtcggtatttagtatttatatatacttctttggtatttagtatttatatatacttctttggtatttagtatttatatatacttatttgtttctttgtcg

SEQ ID NO: 29639 - DNA, 1508 bp, Zea Mays
gccggatcatggcacagcttttttgaccttgtctgtggcccccctcaacctctgcatcgacggcctcgagagaagagtcgccggctcgccgccctgctccggcaccagcaaaaccgccaggtgatccccgacaaccagctagagcagctagccgctgcagcagaagggaccttcttatcgccgtgaaaaaaatggaaacaaaattctcggagctcctggattctgcagagaggactattggccttcacttttcctatgatatcaacctaacactttctgcacagaggctacatgatctcggcgatgaatatagagctcttcctctttggagacaggcagaaccaagatttctatggaatggctacttgttagaacctctaattgagaacaagctgaaccagtacttattgccagtaattcaaggcagttttcaaaatatccaagcagaagttggatcagagatggtaaatgtgaccctgattgcacgtaggtgcacacgaaggataggtactcgaatgtggagacgaggagctgatgcagagggttatgctgcaaacttcgttgaatcggagcagataatgcagtcaaaagggtttacagcatcctatgtacaagtccgaggttctatgccattcttgtgggagcagattgttgatttgacatacaaacctagttttgacattgttagacaagaggaagcgcctcgtgtacttgagaggcacttccatgatttgcaaaagaaatatggagctgtcttagccgttgatcttgtcaatacaggtggcggtgagggccgcctccgtgaaagatatgcaaaatctattgaacctattcttagtgaagatctaagatatgtgcacttcgacttccaccgaatttgtggccatattcactttgagcgtctgtctcagctgtatgatcagatcaaggactaccttcagaaacataagtacttccttataaatgataaaggagagaaaattgaggagcagactggcactacaagaacaaattgtatagattgtttggatcgcaccaatgtaactcagagcatgattggtcgaaaaattctggaaagccaacttcaacgtataggagttcttggtgctggtgatacaataagcaaacatccaacctttgatacaaactacaaaattttgtgggccaatcatggagatgcaataagcattcagtactctggaactcctgctctgaagggagattttgttcggtatgggaagcgaactactcaaggaattctgaatgatttgaggaatgcacttggtagatactacctgaataacttcgttgatgggactaagcaggatgccatggatcttcttcaaggacattacatgacatctgttagtagagatatggcagtgccaagcaaagcaggacttctgcagagttatgcgtccttccgccttgcttttgcattggttatgggagctctaatgttcatgttgatgtcactgagacagggtaagaattctgaatatttctga

SEQ ID NO: 29640 - DNA, 891 bp, Zea Mays
aaaaaataagcggtcgtcaggcgccgggcgagggaagcagggaaacaaggagcgagcgagcctgcgccgctaagacgggcgccgaccggcgagcgatgcagtccccttcaccttttcttcattcttccgcatcgtaagaggattaggaatttaggatcggggccgacagagcccgacgaccagcatggaccactcgcccgatgatctgtcgttgatggcgctcggcgaggacggggatcacggcgccgccctgcccctcattgcggactaggcaaagcatgacgacgatggcatcatccgaaaatgagcatgttgatggcgtcagcgcacatggtcacggaggtgaaggcgaccacgtcagccatggcagatgaggagcatccggagagaagagaggaggcctcagaaatgatcaagttgtacaggaactaggggaaggcattatgctttgaagtgtcccaacatacccttgggagggaactggccgagattataactatgaacagcggatgctctgtgattcgatagctcacgattattctagaggacaccaaatgaactgaagataaaaatcacgtagagcagtggtgggtggcaggaagcaaccatgggttggtcaacgaacggaagcgggaagacataaagcagcacgacgacggtgagaaaggaagagcaagaacgtcgtcgccaacagtgcaatatggcgcaatcccctataattaccgttgcgtctccgcgactagaccatgtctcgcggtcagagggcgtacctcaacgaagctgcgagtgggcgccatggtgacgacgctggacaggtggtcctagagggtggcaacgtgtatgtcctcgtctcgcgaccttcgcatagttgcaaaccttccaaatgttgcc

SEQ ID NO: 29641 - DNA, 2341 bp, Zea Mays
cgcgccccacccggagacctgcacctgcacctgcctgcctccgtctcctcctccttcagttgttgccaccgcccttccctcccttcctctccgcgtcgctcgccgtcccatctttggcctggacacctggcctgcccccccttcgcggacgcgccgggtcgccggccgaatccgccctcccgccgctgccaacgtcgatctgcgcccgcccgcccgcccgccaagtgagattcaaaggtaggacgacgggggggtcgagttcttgtcggtttcattcctggccgccgacttcacatgtcaacaaccccaaggagcagaagccagggtagtaggaccactaggccgtggatcttgtcagggatggactttgctggttccagacggaagcctaatctcacggggaagattgccgtggctgctgccctcacggtcatgtgcataatcgtgttgaaacagtcccctagtttcagcggtaccagcgtggtacgtgcttgaatctctccacaacaactacccatgtcactgccgcttgctgttgagttggcacgacctgtcattattccttcttccagacgacttaagtactctgcttagtttccatggaacatcaacgcgacgctttaatgtttgctgttgtgacttactgctatgtttatgctgttgtgccaggttcatttctgatacatttacgctattatgccagggttattttactgatacatatatgcatcgttcgttcttgatagtcacaaactcacaattccggcacggttgtacagttccagcaatttcctggaagctgttcaaatcatttgcctgcagttctttattactagtttctttaattcttttcggctggaggcatttgttgaagcactcacatttcctgcagttctctcgccatgaaactggggtgacccatgtgttagtaacagggggtgctgggtatattggctcacatgctactcttcgtctccttagtgacaagtaccgagttaccattgtggataacctatccagagggaacattggagctgttagagttcttcaacggttatttccagaacccggaaggcttcaatttatttatgctgatttaggcgatgccaaagctgtgaacaaaatattttcggagaacgcatttgatgctgttatgcactttgctgctgttgcttatgttggtgagagcacaatggagccactcaggtactaccacaacataacgtcaaacacattgacagttcttgaggcaatggcagcacataatgtaaatactctgatttactcgagtacgtgtgcaacctatggtgaacctgatacaatgccgattgtagaaacaactcctcagaatcctatcaatccatatggtaaggcaaagaagatggcggaggacatcatcttagattttacaaaatcaaagaagcaatcaaatatggctgtcatgatcttaagatacttcaacgtgattggatcagacccagagggacggctaggagaagctccaaggccagagctacgcgagcatggacggatatccggtgcttgctttgatgcagctttgggaatcattccagggctaaaggttcgtggaaccgattactccactgcagatggaacttgcgttagagactacatcgatgtcacagatcttgtagatgctcacgtaaaagctcttggtaaagctcagccaggcaaagttggaatctacaatgtcggaacaggccaaggtagatcagtgactgagtttgtagaagcttgcaagaaggcaacaggagcttctatcaaggtcgaatatcttgcacgtagacccggagattatgccgaggtatacagcgatccgtcgaaaatccacatggaactcaactggacagcccagtacactgatcttggccaaagcctcgcccaggcgtggaaatggcagaaagcgcacccgaacggatatggaccagcctgattcagagttcaaagattgagagagactcgtcacgcagatccaaagggtccatgtgcagtcatgtagccttcagacagttggttcttcatcaccatagaaagatagcaaagagcaacagaagagtcctgattcttttattgcagcgctcgaagaaggaaaaaatatcacagagaaccccctacctgctccttgattagtttcaaatatatatatataggtcctcgttgacattttaatataatttgatgtgtgctgaggcgctatataataacacaaacgaaattttgttgtagacagggtagatcgatctcgtgtatcaacttttgtggtggtagaatgaaaggatataaataagttgatgtaagtttttgtttccaaacttgtttg

SEQ ID NO: 29642 - DNA, 3152 bp, Zea Mays
gatagagtccgggcaggcagccatctccgtcttctccgcgctctccatcctcggcgggcgggtgggaggggcgagtcgacgaccagcacgcgcgcgcgtccagcgcaaccgcgtcacggaaccctagcgtcgcctcgttcgctgcccaactctcctccagactccagtgcacagattatcagaatgcctcgaggacaaggctcttctgtgtcaacccgtgagaatcccaaagttgatcgggcaactgattcaaatgatgacagccgcaagaataggaggggtgcttatttgctactgggattgctgatagtgttccttcatggatcatggtctgtttatcagatccagtttggaagccttcctttgccccttgatgctgagcaggctggaaagaggggtttctcggaagcttcggcgctgaagcatgtaaagtatttgacaggcttgggtcctcacccagtcggttcagatcccctcgatcatgctattcagtatgtatatgcagtagcagaaaaaataaagaagacagctcattgggaggttgatgttcaattggagttgtttcacacagatataggcgcaaatcgtctatctggtggtcttttcaagggaaagactctcttgtattcagacttaaagcatgtgctattgagagttactcccaaatatttaccagaagctgaggaaaacttgattctggtttcttctcatattgacactgtttcgacaacggaaggagctggagattgcagttcatgtgtgggagtcatgttagagcttgcacggggagtggcccagtgggcacatgggtttaagagtggtatcttgtttttatttaatactggagaagaagagggtcttgatggcgcccatagttttataactcagcaccactggagaaattcagtaatatttgcggttgatctggaagctatgggtatcagtgggaaatccacactcttccagggtactgaccattgggcattggaaagctttgcagctgtagccaaatacccatctgctcagatagcttcacaggatgtttttagttctggcgcaataaaatctgctactgattttcaaatatatgaggaagttggccgtcttcctggacttgattttgcatataccgatacaacatctgtgtatcatacgaagaatgacaagatggcgcttctgaaaccagggtctcttcagcatattggagataacatgcttgctttcctactccattctgcagcatctccaaaatttttgaaagatgcacaacaaaggaagcaaggaaagacagagcaggatagagctgtttacttcgatatcctgggaaagtacatggtggtctatccgctgcgacttgctaccatgtttcacaactcaatcatattgcagtcacttctaatatggggaacatcattgcttatgggtggacaccctgcactggtgtcctttgcaatatcatgtttgagcatcattctaatgtggatattttctatctgcttaccagttgtggtagcatttgctctgccctatatgtgtccgtttcctattccatatgttgcaaatccatggttaactattggcttatttggttcacctgcactgcttggagcatttattggtcagcatattggatttattctcctgaagaggcatcttcgacgcgtgcattccaaagcaaaaacaggcataactcctagcatgatagaaaatgttactgacctggaagctgagaggtggatttttaaatctggttttgtccagtggttaatagctctgatactaggaacatatttcaaggttggatcatcgtatatagcactcatctggcttgtttctcctgcttttgcatatggttttttggaagctactctctcccctgttcggctacctaaacagcttaaggttgtcacgttggttgtgggtttggttgcaccagttgtgtcttctgctggtttggctgttcgtatggcggatgtaattgttggaagtatagtacgtattgacaggaatcctggcggactaccagactggcttggaaatgtaatagtttcggttgccattgctgttgtcgtttgttccacgtttgtgtatctgctttcatacattcatatctcaggtgataaaagaattctgggtttgctattatccttatcctttggtctttcaattgctttggcatcaagtggcattgtgccagcatttacggaggatgtcgctcgatctgtaaacgttgtacatgtcgtcgataccacaggagtacatggcgggcatatagaaccagtatcctatatctctttgttttccaatacacctggaaagctgacgaatgaattagtggaccttggaggcgaagaattttcttgcggaaggaacatgactactgacttggtaacatttacagtgaagtatggctgttggagttacaaagagagcagtaccggatggagcaggtctgaggttcctgtgctccttgtagaaagtgattcggttataggtggtgctcgacagacagtagtatcagtggataccaagtcatcgacgcgttggacgcttggaatcaacaaagatggaatcgatgacttcacagttcaagtggattcggagaagatagtcctacctggtgataagagcgagatagatgggtggcatacaatccagtttgcagggggcaagaactcgccgacgaagttccagctgacgctatactggtcgtctagcaaaccatctgagagagaagctaaacaagcagcggacgctcctttgctggtgaaactaagaacagatgtgaatagagtcacaccgcaggtggcaagggtggtggagaagctgccacggtggtgcacgcccttcggcaagtccacctctccgtacacgctagctttcttgacggccctccgtgtcgatatttagtcagtcagcagcatttgtttcccatacataggcgtccagtccagcacctttcgttttgaactgtattttagtttgatagtagcaagttataggcccatagaattgtacacaaaagctgccaagggcggtctggtgtaaacgtgctttgcacttgctctaatttgtcctgtatcaaagtttcagattagtttgtggtatttgtgtgtaccattcctgcccccatccttcaagctacgttttct

SEQ ID NO: 29643 - DNA, 3465 bp, Zea Mays
aacaatctcgctctcgctcccgctccggtccttccctttcctggacgattccattccattccgttccgtgggtaatggatgacaagtgggcccgttattgacatatggcattggcaggcctttgtttctcagtcctataaggccgagaacaggcagagcaccgggatctagggtttcgcacccaacacccggagtgagcggcggcgagggatcggatcgtcggcggcgatggaggacgaggtgcagagggcagcggtgagcagttggaacgagcttgactatgaggcggaagcgcgtttggtggcggaggcgagggcgtcgtgggataggaaggcaaggggggaggaggaggatgaagaagaacatgatcctgagatgaccttggactactacgcctaccaggctaaaaagtttcgcaacacctggaacatcctctatttcggccacttcggtcgcttcgaggacaccacaaggatccctcctatgcgctttacagagaagccgcctgactccccggcgtacccgcgcactacactgcaggtcttttcgatcaaagttgcagggatagaggggggtttacagtggccactccatgtgtttgggaaggttgccctacgcgacgcagttgatcacaatcgcaatatggtcttcgatcgcactagagacaactgccaaatccttacaaaagagcctttactaaggcgctgaagtttcagaaatatgcgctccaccgggtagctagaagcaactggagcattccaattttgtgagacagcatccatgaaaccaggaagtttgggccagaaactttcgaaatggaaacgtcgtttgccctgagtgacaatattcagacccaggaccagagggcaatgatcagatactccagaagctgcactctggaggagagaatcaggaaaaatatcatcccagtcagcacagcaaaaggctctatcaagccgcacaagggtgggggacgacctctcatttgaccaggtaaatttgcgaccgtgcaaatgaagttccttgacattgctatcatccagaaacctctgaaatcttcccatcaatactctattcagattggcattatttttgtctgcagcttggtagatcatgttgaagtcgcctgccagcaaccaagggccaacacagagagctctgacctctcttagctcctgcaagaattgtagcttcagatcatcctcttgggggccatagacaccagtgaaccaccaattcctaccctcttgctcacaaactggacagaaaccgaaaatctgtccacacgggaagagattgcatgacagcaggcccctttccaagcaatgaacacgccacctcgagtaccatcagcggggagagccacgaacttgtcaaaagcagacccaagagcagagaggaggagctgtgacgacacgcttgcaatcttggtttcttgaagacacacgatgtcagcgctggaggaaaggacagtgttgcgtacagagtttcgcctggccgtcagattgaggccccccgggtgttccagactaggatggatgacagattcatgaggaacacgaggcacgaccaaaaggacaaaggttcctcagaaaccgatcagcagctccctctccaggacgtcctcatcatgatctgtctgccaaccgaaaatagcagcaagagcagcaagctccacatcagacagaggcgtctcgaataattactatatacaatgtcgtgcaacaaaacgttcacccgtaacgccacgtcgccttcttaatatcagccatctgatatgcatcacacggttgttcctactcttccgcttatctctgctaggctgccctcgctccttttggaagcggcttcgtcgctttttcaccgacgacgccatcctttttcgccgccggcaacatctgtgagactgtgaccgcgtaaggttcctgcttcacttcgcgtcgcttgcgatttctctctcttcttctactttccagcctctctggcgatgcaccacagaggacacagcacgcatgcgacgagctccaagcagcttgcattatttggagctttgtctgcaagacgggagccttcggctgccttactcctcttcttcgccctgggcccgagctaggccggcgtggctgcaccgctccgtcctcgacaagcccgcgtcaccgagtgcctcgtcggagacagcactggcactgtcctcgtcgccgcccgcacgatcaggaatgttgcttgcggctcgctttgctctcctctctcgtcccggcgtggtcgcacccgcgcagcgcctccaatggcgacgacgacgaagacagcaagtctcagcatggggcgagtctgagtgcataggctacgccctagcaaagtcactgctaaggccgaacattgtacaccatggtggttatctctctccaattccatctactcaagaatgtctcactcatggatgatgcacaccacgtgctcgatgatttggctctataacaatttttggtgctagcctcagattatttctgtttgagagttatgtaaggtactactaactctgcattttttagttatggtttcgaaacatgtattttcaaaccatgactaatcaagtatattctccaccattaattcctctaggcatgacctggaaaactgcttagctgatgctgtaacattttgatgtctctgttctctgctttctggaggtgccatcccctctctttggggaggcttctggttaaacttgcttcagtcacgatgttactgtgctggataaagaagatgccaaagctgaactttgaggttgctaaaccatgcacccagaatcggagttttgtagttgaagctccatgtgagttgagatacttgcaactatacacaatagaatgttcttcgaacctcaagctgcagctcttgctccaactattacttgcctactttgtttttcctatcagtaatgcttgctgactcattgaaacaaaccagtctttcctttgtttggttttacattttgagagcttttcttaaaaacaaccggaggctggattggttatgtgcaaaactattatagaggccggaataaaatttctattttctaagaaaatagaaataaaccaaatacgagtccgagtccgactatgtgcaatgtacaagaatatcttaaaataagggagatactatcctacaggtgtttggttttcattttttcatgtttattatctatatgatcatgactcatatggctcaggtcatgttatctattgtagcgtcttcttgtctccctcgacattgcccgtctgcttccttgcgccttgcttgtgctgtgggctcccttgtctcgcctcttttccagccgtggccaattgtgtccattgctgggtttgccaccaccttcccgtgtcaaggcaaacccctccatttcgagcacgttccaaacccaaacttcacattgccttcttttgagagctacgtaaggacccgggg

SEQ ID NO: 29644 - DNA, 250 bp, Zea Mays
gttgttgcaggtaatacatttgtgctgttgttgatggtgctaagtgctagtgggctcggccttcttataggttaaagtagctcttctatacttcttattgaggattgtcattgagctagcatatatttcaaaatcataaataatttataacatttcaaagtatatttctttgaatcacttttgtaatcactccgataaatatattgtaaatttgttgtaacttgtaactttttgtaataaagaaattctg

SEQ ID NO: 29645 - DNA, 2629 bp, Zea Mays
ggcgccagcagcggcggtgctcgaccttcaggcatcagagctgcgggacatcacacgcaccgctacgatctcctcctgcgagcgagatctcaccaccgcagcggcgccgcggccatggcgggaaggtatcaccaggatcagggcggggacgggggcgcgtccatggaggtagtcagcacgccgaaccaggagctggcccttaccaactgcgcatacgtctctcccgctgacctccgccgcttccccaacgggctcgccctcgtcgctgacgcctgggtcttcaccctacgtgaccacaatgctgttgcaagtggacgcattgccttgaatgctattcagcgtcggcaggcaaaggtttcagctggggattctgttactgttagcagttttgtcccccctgatgatttcaagttggctttgctcactttagatctagattatgccaaggcaagagccaaccgaaatgacgagctggatgctgttgtgcttgcccaacaactccgtaagaggtttctgaatcaggtcatgacctcagggcaaagggtgccatttgaattttatggaacaaactatgtattcaccgtcaatcaagctttgctagagggtcaagagagttctacaccattggatagaggattcttgtccagtgatacatacatcatatttgaggctgctcctaattcaggaattaaggtgatcaaccaaaaggaagctgctagcagcaagcttttcaaacataaagagtttaacctggaaaaattgggtataggtggattaagcgctgaattcactgacatatttcgtagggcattcgcttcaagagtctttccgcctcatgttgtcagtaagttgggcatcaaacatgttaagggtatattgctatatggacctcctggtactggcaagactctaatggccagacaaattggaaagttactgaatggaaaagatcccaagattgtgaatggacctgaagttctgagcaagtttgttggagaaactgagaagaatgtgagagatttgtttgctgatgctgaaaatgagcagagaacacgaggtgatcagagtgacctccatgttatcatattcgatgaaattgatgccatctgcaagtctagaggatctacccgtgatggtacaggtgtacatgatagcattgtaaaccagctgcttacaaagatggtgttgaggcgttgaataatgtattgcttattggaatgacgaatcgtaaagatttgcttgatgaagctttattgagacctggacgattggaagtacacattgagataaacctgcctgatgaaaatggtcgtttgcaaatccttcaaattcatacaaataagatgaaggagaattctttcctgtctccagatattaatcttcaggagctagctgcgcggacaaagaactacagtggagcagagttggaaggtgttgtcaaaagtgctgtctcatttgctttgaaccggcagataaccatggatgacctcactaaacctttggatgaggaaagcatcaaggttaccatggatgattttgtgaatgcacttcatgaaattacccctgcatttggtgcttccaccgatgatctcgaaagatgcagattgcgtggtattgttgattgtggcaaggcacataagcacatttatcaaagagctatgctcctcgtagagcaagttaaagttagcaaaggtagcccactcgtgacttgcctattggaaggtcctgctggaagtgggaaaacggctatggcagcaagtgttggcattgacagtgattttgcatatgtgaaaattatatcagcagaaacaatgattggtttcagtgaaagcagcaaatgcgcacagatttgcaaggtttttgaggacgcatacaagtctcagttcagcatgataattcttgatgatatcgaaaggttactggagtatgtagccatcggaccacgtttttcaaacttgatctcacaaactcttctggtcctcctcaagagagttcctcctaagggaaaaaacttgcttgtcgttggaacaacaagcgaggttggcttcctagaatctgttggaatgtgtgacgtgttctctgtgacctaccatgttcccaaactgaaaaaggaggatgccaaaaaggtattgcatcatcttgatgtgttcgatgacggagatcttgacgcagcagcagaagcactggacgatatgccaatcaagaagttgtacacacttgttgagatggctgctcaggggccaaccggaggaagtgctgaagcgatttatgccggagagaagatagatatcaaccatttctttagcatcttgagtgatattatccgttactaagcccgcatggagccgaaatgaaccctataagtatccagtaggagtttgtttgcacccgtgcttcatcaaccatttctgtagattggtttgatctttgatgtgttgtttttgtttgatgcacctactagagctgttggattagatcagaggcgaattacacgatatatcatttttgtattgtatgacgatgtttatacagttcttaatgggatccagctttacacctcagaacaccgataattttcacattcctattagacccgcttgttttgttgaaattgaattctattttaata

SEQ ID NO: 29646 - DNA, 1080 bp, Zea Mays
cgggtagccaaaaaccgcgcgccgtttgggcaaggcccaacccagccagccagagaggcgccccgttggaatcctgattgggagcgctgggacggaaccgaacgcgttgccattagctgtcgctgggacggaaccggaacgtttcgctagccctcgttcccgttcggccttgacaaccccaccccaccccacccccaagttcccaacgcagaggatcgaaccgaatcctccgcaactcgccgccgccgggaccgaccgacccggtcctatcgatcgaggatgtcgtacgcctacctcttcaagtacatcatcatcggcgacacaggcgtggggaagtcgtgcctgctgctgcagttcacggacaagcgcttccagcccgtgcacgacctcaccatcggcgtcgaattcggcgcccgcatgatcaccattgaaaataagcccatcaagctccagatttgggacacggctggccaagaatcattcagatctattactagatcatactacagaggtgctgctggtgcccttttggtttatgatattactaggagggagaccttcaatcatctcgcaagttggttagaagatgcaaggcagcatgcaaatgctaacatgactgtgatgctgattggaaacaagtgtgatctttctcatagacgtgctgtcagctatgaggaaggtgaacagtttgccaaggagcatggtctggtctttatggaggcatctgctaaaactgcacaaaacgttgaggaggcattcattaagaccgctggtacaatatacaagaaaatccaagatggcatatttgatgtatcaaatgagtccaacgggatcaaagttggctacgctgttcccaactcatctggaggtggtgctggctcgtcctctcaggctggtggctgctgcagttgagtggtggcagcaagtcatacaaatgcacaagatgatgggaggagacaacagatcagttctggtcagaaaatggtaaaatcgatgaaagttttctttagcaactgatggtgtcaaaagattatctggcatgtctttttcaaatgaatgttagcttatatccagtagcaa

SEQ ID NO: 29647 - DNA, 3953 bp, Zea Mays
gttggattaagatgctgccctgcgaactccgaagaggagctgctgcatgaggtggtttcaggtaaaaggagatggtgacttgcgatgtctggagctggaattttgaggagattgttgttggtggaaggaacaaataccttatcaatggccatcttgcacaaccttcccgggtgcagacccttttccactcagtgcagcttaatgtaaacaatcctcattttctaattatgcaagggcgcataacaaaagtgctgaacatgaagcctccagaaattttgtcaatgttagaagaggcagcaggtacaagaatgtacgaaatgaagaaagaatctgctcttaagacacttgaaaagaagcagaataaagttgatgagattaataaactccttgatgttgaaatcctccctgcactagagaaacttagaaaagagcggtgtcaatacatgaaatgggccaatggcaatgctgaactggataggctcaaaagattttgtattgcctatgactttgttcaggctgagagagtgcgagatggcgcactgaatgatgtcaaacaaattaaaacaaagattgttgagctggatgaaactacagaaaacataaaagcagctatacaagaaatggacaataacatttctaccttggctgctgaaaaagaagctaaagtaggtggtgaaatgaaggttctgtcagacaaagtggataaactatcacatgtacttatcaaggaaacttctgtgatgaataatcaagaggaaaccctgaagtctgaggaaaagggtgctgagaagattctcacaaacattgaggacataaaaaggtctatactcgagagagatgctgctgtaaaaaatgtagagaatgaggcttctgacatgaaaagaagagcagaggatctcacaaaggagttggacgagaaggagaaagaataccagggtgtgctagcaggaaaaagcagtgcaaatgagaagaaatgccttgaagatcaactgagagatgcaaaagctgcagttggagatgcagaatctggactaaagcagctagctacaaaaataaagcattctgaaaaggagttgaaggagaagaaaactctattagtatccaagcgtgatgaggctattgctgctgagaatgagctgaaaacaaggacaaaagacttagaaggtatcaaggcatccatgggatctattaattatgacgagggtcagatggaagctttgcaaaaggaccgttctgcagagttagaaattattcaaaaattaaaggatcgtgttcgtaacctttctggtgagcttgctaatgttcacttcagttatcgagaccctgaaagaaattttgacagatcaaaagtcaaaggggttgttgcacgtcttattaggattaaggacagctcaacagcaacagcactggaggttgctgcaggtgggaggttattcaatgtggttgttgacactgaagaaactggaaagcaacttttaaaaaatggggatctacgaagtagagtaaccatcatacctttgaacaaaatccaaacttacatgatacctgacagagttcagcagacagctcgtagactggttggtcctgacaatgtaacattagctctagaattggttggatatggtgaggaagtaaagaatgccgtggcttttgtctttggctcaacatttgtgtgtcgtaatatggatgcggcaaaagaggttgcgtttaataggcaaattagcagtactagtgtgactcttgagggtgacacttatcagccaagtggtcttttgactggaggtagtaaagggggtagagggaacttgctaaggaaactcgacgaactagctaaagctgaggctgatctatctgatcatgagaaaaagctctttgtcattgaacagcagattggagcccttttaccattgcagaaaaggcacactgagttgaaatctcagtttgaactgaagtcatatgatctctcgctgtttcagaacagagttgagcaaaatgaacatcacaagttaggtgagctcgtaaagaaaattgaacaagagcttcaagaatctaaacaagagttgacagaaaagcaagtgcagcatgaaaaatgtgtgtccacagtttctgagttagagaaaactatcaaaacttatggcacggaacgagagggcaaactcaaagcgctggaaaaaagaatcaaatcaattaaatcagagatgcagtcgatgtcgaagcaactaaaggcttatgaaagtgacagggagaggctgatcatggagaaagatgcggttgttggtgagcttgctacactggaagagcagctaacgacttcaaaagctcagattacttctctgtctgaaaccttggaaaaacagaaggacaaggttacatccataaagcaagattatgatcaagctgaaagtgagctcaacgttgggcgttctaaactgaaggaatgtgactcacagataaaccgtatggccaaggaacagcagaaacttcaacagaagttaagtgattcaaatgttgagaggaagaaaatggaaaatgaggttaagaggatggagatagagcagaaggattgctcttcaatagttgataagctagtcgagaaatataattggattgcaactgagaaacaattgtttgggaaaagtggtacagattatgattttgaatcttgtgaaccacataaagcccgagaggaacttgaaaatcttcaagctcaacaatccagtcttgagaagagggtcaataagaaagtaatggcaatgtttgagaaggcggaggatgagtacaatgatttgatgtcaaagaaaaacatcatcgagaatgacaaggcaaaaatcaagaaagtgatagaggagttggatgagaagaagaaggaaacattgaaggtcacttggctcaaagtaaacaaggatttcgggtctatattcagtactcttttacctggtacaatggcaaaacttgatcctccagaaggtggtacttttttggatggtcttgaagttcgtgtggcatttgggacagtttggaagcagtctctgtctgaacttagtggaggacaacgatcccttcttgctcttagtcttatcctggctctgcttctttttaaacctgcaccactttacatattggacgaggttgatgctgctcttgatctgagccacactcaaaacattggtagaatgatcaaggctcattttccgcactctcagttcatagttgtctctttaaaagagggtatgttcaacaacgccaatgtgatatttcgaacaaaatttgttgatggtgtgtccaccgtgacacgaacagtgccttcgaaacagagatgaccagtttacacatcatgcatcttctgaaccaaaactaggcatacaattccaaaactgtcattttaaggagctgctataatcaaacattttcgctgtttattcagccatgtttattcagccaggaaaattattccatgaaagctgaaccccacaattacttgacgctgatgcctcaagcccctcgcttgtcaggcaatgacatcaaaataggtgctgtaactgtaatctcatggcgtgacgttcatgatgacctcgactggcttctacattatgcgctttcttctgacctgatgtgtaattagcggttgaactattttgtgttgaaggtcgaccgtgtagcatgtatgtaacagccatttataaccaaggtcatgtataattctgacttgcaaatttaccctatgttgatttaccttttattacttagaacaaaaatctcatcatagttttagaaagtcaatgctctaaacacttcataatattattgactatcgtgtgcattgccgagaatgatttggtcattgttagtttctacgtcactgctcatggattttgtggcgttttttttttctgaaagcattgaagataagtttaagggtggatttgttctacatatctatcgattgaagtaaa

SEQ ID NO: 29648 - DNA, 2562 bp, Zea Mays
gccgattgcttccccgaatctcttcccccaatccggcgcccggcagaatgcgaggccgccacctcctaaaacccatgcccgtcctcctcaacactaccccttcccggctccccgccgcccacttccgcgtccgtgacgcagcccgcccgcccgcgccgctggcagagcccgacgtcggcatctctcgcttcgcctcctccatcccgggcttccgcggcgcgctgaagcagcgctactccgacttcatcgtccacgaggtcgcctgcgacggcgccctcgtccgcctcacttccttcgatctccccgacatcgaggagagtggagataatgcggaggacggtgattccgacgccaccgcggatccatcgcgggcgctcgagtcgttccggctgctctgcggcgaagcggattaccacgccttgaggggattcctggagagggtttcggagggaggtgatggttatttgtcgccaatcattctgtcagctgatgcagataaggcacatcgatccgaggtgcacgagttcatcaagaggaatttcaagttcctgaacacggatacagttgagcacaatgatggtattcagaaatgcattagggtgcgcttgggttcagggccacgctgtggtaggggaaggaacaggagaggcatggacacttcaggctggagagatgacaagccgtttgacagtagaggctctacattctggccttatcacctggggaagttcctgaggtttcacctttataaggagaacaaggacacgcatgaggcactaggggttataggaaaattggcaggggttcagccaagatcgtttggatttgcagggacaaaggataaacgtgctgttacaacccaacaggtgacagtttttaaagtgcatgctagcaggctggctgctcttaatagcaaactcacaggtatcagagttggagactttagttacgtgaaggagggccttgctcttggtcgactcagagggaaccactttgcaattactttgaggaatgttattgcagaatcggccgatgatataaatgctgcagttaatggtctaagtaaaaatggatttatcaattactatggcttacagcgctttggcagcggttctgtacctacccactttgttggtgctgctttgctcagaggagaatggagacatgctgttagcttgattcttggtacaagggtacattataaatggcatgttgatgttgatgcagcacttaggggcatgccccgacatctcacagtggagagagctattcttcagagattgaagaactaccctggcaactatctacaagcactaatggctatacctaaagcactgaggctgatgtatgtacatagctaccagagttacttatggaatcatgctgcaagtatgagagtggaaaagtatggtatttcacaagttgtagaaggtgacttagtttacaaaactgggtcctcccttggagaagcaattaccacagatacatttgatgacgatgatagccacgttaattcacctgaaatggaaatgtcttgtgaaacacttactgaagaaatgatccaatctgtgaaggtagttgattctgaagatttattgaaggcagtctattcgtttgaggatgttgttctccctttgcctgggtcagaaacattgtttcctgggaatgaagttactatgatttatcatgaaatagccaagaaggatggcattagcctgatagagagcgcccatggtatcaaggacttctcgattacaagcatgaaaggaggttaccgccgcgtactccaacgccctattgattttgaatgggacctgatgacttacacagatgacaatacacctttagtaccaactgatttagatgttctatcagaaacccagttatcagaaacaaatgagccattatctgatgggacttgcagttgtccatcaagtgattccaggttgcaagttttattggacacctctggaccaaccattgaagctagctcagtagaaaccaaatcaattggcatctcagatctgtcaccagagaaactggctgtgaaattagaatttactctaccagcatcatcttatgctacaatggccataagggagttgacgaaaacttcaacttcggtgacttcctgttcaattcttttttttggttttgtaaatacttaaattatctttgctactcttttttttcatcttttggtcattgaaccgaaccatttgagctccaccacgatcacataattttctttagggcatctcactcaatggtttctctttgacagactattatcgtacaaaacaatgtattcagtttgcactccaatgcttgaactcatccaccaacatcctctcttatagccataatgttatgttttcctttggtaatgtacaggttgcttgccagaaaacattaaacggctgaccaagccttgcagtgtaaaatgctttcttcgcaagctggtatccattgtgacaaaacacaccatgtgggtttaactgatattttcttttctgaatcatacaacttggaggatttctctacttatggagcttctaaaac

SEQ ID NO: 29649 - DNA, 3091 bp, Zea Mays
caaaaggcagaggcaggcttgcccgggtggcggtggcggctgaaagcctgcaaccaaacaggccccctcgattagcgaaaaaaagcccagcgaaaactaaaaccctcgcatctttcctttcctccccaactgcggccgcctccacccgctccaccgccgatggccgagcctgagcctctgccgcaggtgtcgtctgaacctaccactccgccgcaggaaggcagcggaaggactaagacaaagaacaagaagaatcgttccaagaagcaaccgaagcgagccggcgctgacaccgacgggttatcctcaggcgccagcaccatggttgaggaccctttcttcgtcctcgccggcggaaaggaaggagggtttctggatttggaggagatcgatgaggcagacttcggcatcttcggaggcgtcttggatgacgtaggacagagcgtcgaggaagctgggaaggatcatgggaagaagaagaagaaaacaaagaagcggaagcgtgggggtgatggcgagggcttcagtggcgacgctgcgttggtagttgagaatgaccaggtggatgtcgagaaagtggagaaaaaggtcgaggatggggagaaaggggataagaaggggaagagaaagatgaacatgaagaagaggaaggtgaaggataatgagatgaacagggagagtgatgaggatgttgctagtgacaaagcagaagacatgcaagatgacactgagaatatggaacaaaatgaggacgatgagctgattttgggcgaagatgatgtctctgcatggagggagcttaggctgcaccctctgcttctcaaggcgatgcgcagacttggattcaaagagccaacacctatacaaaagtcttgctttcctgctgcagctcatcgaggcaaggatgttatcggtgctgcagagacaggttccggaaagacacttgcttttggcctcccagttttgcaacgtctccttgaagagcgagaaaaggccacaagattgcagcaggaagatgaaaaaatggaggaacgttcttgtggaagccctcttcgtgctcttattctgacacccactagggagctcgccaaacaggtatgcgatcatctaaaagatgtggccaagttcttaggaatccatgttgttccaattgttggtggtctatcaatggaaaaacaagagagacttttgaaaaaaaagcctgaaattgttgttggaactcctggaagattgtgggaacacatgtcgatgaacaatcaacacctagttgagctgcactcattgtcattcttcatcttggatgaggctgatagaatgatcgaacgaggccatttccgtgaattacaatctatcattgagatgcttccactgaccaatggttctgatgaacaagctgcaagaacaatgccaaactgtgagactgtaccaattttgcaaataaagaagcggcaaacctttgtgttctcagccacacttgcactctcatctaattttcggaagaagttgaagcgtggcctatctacttcgaaggcatcgacgcctgatgatgtcagctctattgaagcattgtcaaaacaagctggaatgaaatctaatgctgaaatagttgatttgacaaaggcttcaatcttgcctgagaagcttgaagaatcttttattgagtgcagtgaagaggataaggatgcctatctgtattatatattgagtgttcatggtcaaggtcgcacaataatattttgtacatcaatcgccgcattacgtcacatttcttccatactgcgcattcttggaattaatgtattgacaaaccatgctcaaatgcaacaaagagctcgcatgaaggctgtggatcgcttccgtgaaagtgaaaattccattttggtcgcaactgatggttttgcaaggggtatggattttgatgatgtgcgaacagttatccattatcagttgccacattcaactgatgtctatatccacagaagtggaaggacagcacgcaagtcattggctggctgcagcattgcgttaatctctcctactgacaagtccagactctcacttgctcggcagattgacaagattgcccgtaaaacttcacaggaaaatgctaacaaatcctggcttcaaaggaatgctgaatctatgggattgattttggatactagtgacagtgaagaagaccatgtgcagggacacaagaaacgaaaggctacttctgcacatctccaaaagcttcaacaggagttgagtgatctcttgcaatgcccattgcagcctaagactttctctcgccgctatttggctggggctggtgtctcacccttacttcagaagcaactagaagagttggccaagagaaatgcaagcaacaatagcagcaagagtaagaataaaggatctgggtttgttgttattggtcaggatcgtgtcgagcccttgcaagcacttcaaaattctgggcaagaggtctgtgtgaacatagacaaagaaagggaaaagcgaagagtcgctgagaactggaggcggaagaagcatgaagaaaagaaacgtacacaagagcagaagcgaaaggataagagaaaagctaaagagatggcttgatgacacatgagatagctaggggccttcaaggggtttacggaagctctttaagctcgcgtcaatcctttcagaaaggaaaggaatgcattcatcaatgttttgctgtaatacaatgcgtgcgctaagttagcgcttgcctttaacagattggaggtggtagtttgattttgttttgcggctgaagaaaataaacttagaatgcacgagcactggctctggatgagaaaagaaattaagcagatagctcacgtataacctcattggatctgtaatatgtacgcctatcagatttaaggtacaaattaattttattagggatgggaatcgactgacctggcctatctttggacttggacctggcccattgccttaaggccaattttaggagtgatggagattatgatcttgctggctatcatgggtttggcctagatatttttctgctataatgcatggacatgaatcctatcaatatttctataaagtattg

SEQ ID NO: 29650 - DNA, 621 bp, Zea Mays
aatggaggggccacatggaaagaaagctcccggaggaagaattaagggcgaacctattctattctatatccccttcaagtttcaagctaggggccggggctttttaaggcaacggtggagagcgtcagtggcagcagctcgtggtccgtccggggtttgctgctccgttttcttcagagcagcgtccatccatggagaggacgaagaaaccatgccttggtgtcgtcgctctgcttctcttcctgctcctggcgtcggccgcccatggagctcagcctgcagatgccaaggacatagcaggtgacggcgacggcgagagggccacggtgaggacagggcacgggcacggctacagcagcagccacagcggcgggcacccgagcggcggcacgcccgagcagggcggcgcaggggtcgtcgatccccgtaacctcaacgccagaagccaccaccgccgtggcgcggcgaccagggcaaatgtatactcttcttggctcgtctgcacgcttgtcgcaggaggtgttatgctgctgctttgaggtactagctgggagatgacgtgtgatgcatgtacaaatttagggggtgtttggttgctcctgctaaagtttagctcgggtc

SEQ ID NO: 29651 - DNA, 1343 bp, Zea Mays
ctcgcgttccctaaaatttgttgaaaaacttaagtttcctcaaatataaaagttgttaataactaatagaggcataacatattaaaagatgtcattcatccgattctgtttgacatgttttggcactcagtttttataagtttccactgatttccaactctctaacactagtaaattggggcgtcattatctcctgttacaacactctaatggttgagagcccttaatacgaatcaaagaccaacatgccagcttcaaccttgctatagacgcctaggaccgaatctgcttggaatatgcctaaatgtcgacataatgtcgacacctttggcgtctgccacatgcttgtcagtatgcttcacaggaaaacacctggacgccatgcatagagcttgctagctccattgccgccacttgtccatgctctgctgctcctccttgcctataaacagacgcccttggcctcatcctctctctctccccccacaatgtcgtcgcccctcccctgcctctccctcctccgcgcccggcaccgccatgaccaagcagcagctaggtctgcgtgcgtgtgcaaatggagagaagggatgcgttggagaagaagatggaaagagcatggtcgtgccgcccagtgcttgccggggcgcgctagcgacttgtgcccatggcctggccggcggccggtgtcctctgttgccaagcgttctctgttgccggagaagaaatgtgcgtgcgttctgaaggaagaagaagacccctttgggtctatgacgtgtgggcccaaggcagggaccgagagatgatgatcgagccagtgatgtggtgccaaccacaagatgcagttggtggacgacctgaagactgatggacttacccagttgatgctcgccaagcgagtacccccccagcaaacactacctaagtgttaaattaaaggcaagccccggttttatgcataaccgttattgtatgttattttactacacttaatgtttgtaggcttgtactgtgcacttaagtgtaggagttgactgaaaccctagttgcatgaactcaggttcccttttgagatggatactagtatgctaggtcgagtagctgctttactaattagggatcttggtagaagtcgagtgatttttctagcactcgcgcgaggtcatgaattggttgtatccactttgataacagaatggtgatggtctgtggacacgagtccatggggacgcgtggtctacgagatgaaaattggaataaggattaacgtgcggatacctgtgtcaagcgtttgaacgtactaaacacataccgagaaatatggtaaatcggtaagcctagtacct

SEQ ID NO: 29652 - DNA, 1868 bp, Zea Mays
acagaagagagtgagcacacggcgcgacgaacgacatagcattcatgctggctgggactgctaccgatgctgctgctggtcatgagaagctagctattggccttgtagtaccggagtaaatgattggcgctactagttttttcccctatccccaaatttttcatcttgcagtggtacccttcgccttgggagctgaaagcatggggagatgctgccggccggccggccagtacactgcaacactgagaggtcatggacgaggacgactcatggtggtgggtggggtcgatcaagttcttgttgttgggtcgaaaatggagcacggagacgagccatatttagcaaggaaggtttaagtccatacccaagattgggcaaggtggcctatcatgaaaatgatgatgatggccgcaaaggtcaataagtactatgaaaggagaaaagcataatacgaaggcacgatgcaaaggctagtacagacaagcaagatgtgtagaataagccgcagctgaccagcgcatgcagtcaagaggtgggcgggcatgcttccatcatcgctgaaatcaccctgcagacttcgcattttgctatgtaaagaacagactacccagacaaggatgtgtatagttgtagtgcaaaagcaacaggatgcaccatagacagagacaagacatttttgctattttgagcacgtgtgcagatccacctcaaagtttcgaaacgatttcgggtggtggctgtgatgtcgtttgaggcaggcagctgcgtcgttcaggcacctggaacaacaaaaaaaggcaacatgttattaccttggcgccagatgtcttcgggaggaaccccttgtcttgaagggacttcactgcttcgtacaggtacccatgcactggcgtgaacttgacgccaaggtccttcagaggttggttcgtaaacttgtagcccttcttcagtgggttcacctgatccttgcacctgcaaaaacaaaacaaaaaaatagcatgctatcagtgtagtgctgcaacagcaaagagcaaatgcatttgtctcgaagcagtttgggactccagacaggcagacaccatgtatatatgttgttgttgctatatcttcaaaacaaggtgatgttttttttttcttttttgccttgaggtacccctagggtcgtccatccatgtgctgccttcaaaggaaagaataggcattgctttgcttttaaggaatcgtccaaggcaccggtcagtcggtcacacctacctcttcagtttatcagcataacatttgcaattgcaagccaagcgcagttactaaattaaaattcattcggttttttctgaccggctcgtcctattcattttttttggaaaaattgaaaaattcaatgccacatttaaagtaaaacaatatcaccgcgaaaaataacaataattataaattttttaaataagataagtcagtcaaacttagagtaaaaaatcaagcgaattataaattagaacggagagagtaagaaaagactgggccgcatgatcattcacatgactaaaatgcactccgggtttcagttttctattacgtggagtatcttggcttatctaagcatggatacccatcatctgactcgtagctaacaaagtactgtgcagcatcatcagatggacttttctatccatggagagctattcttgaccttgtccaaaggacattaactagtcgttactgagcagaccaactaggctactcgtcataaaccctcctggccatggatttcttcaaatatcatcgtgcacaagttgaatttttggagcagtccaccactatttcctttgatagcacattgttcgaaacgacgaaaccattattaaaatgcc

SEQ ID NO: 29653 - DNA, 1730 bp, Zea Mays
aaaagccttgatgtgtccgtctccgtcatgaagacaaacattcaccgagccgaccgttgccttccccccaactcccagccccagcgtcaactgactacactcgctgactcgctcccccggttccccttctctgctcgccatcttttgctctccgcttggctcgtcaatcacctcctacgctccacacgccgccggcgactacaactgcttctgccgtggttacagagaagaagggtttggggagaagacaacctaaatcaattggatctgggagtatcagatctaaaaaggttttcatcaaggtagaaaaagaaacttttctgtccggtcatggctttcccaactgcagcagctgttttgcttaatgagaacatgcagattcataaaggaaacagggttgatgcaccaagtgccaaaccactgaaatcatcagccaaacctgagagaaaggctcttcaggatgtgtctaacattcctaaaggcactgctttaaagaacagatccacagtcaaagaggggtccgccttgaaagaaaggcctgcactccacaatgtgtctaacaacctcaaagagaggtccatcctgaaagagaggcctcctcttcaggatgtgtctaacacccgcaatgagaggtccatcctgaaagagaaatctgccctgtgtagccatgaagctattaagaacccagtgaatatttttgctgatgacgaagagaccaaagggtgccatgaatgggctaaggatgggatggagggcactcacttcactggaaatgattctcagaagttggataaagatgtgcaacacaaacgtatcaagaagaaagtggcaaaagttacgtcagcattgtatggctggtcacatgaggtatatggtcatgtgatgtttatggctatggttcccaagttttctgaagaatcgaaagagctggagctggaaccagagattcttccagacatcactaggtgtatgtctacctcaggcaagagggatgatgcaccaagcgccaaacggctgaagcctaagcttcaagaaccgaaggctcttcaggttcaggatttgtctaacactgtcaaagggagcccttctctgtgcagccatgaagctgtgaagaacccagtgaaaatattcactgttgaagagaccaaaaagtgtcatgaatcggctaatgatgtgtcggagggcactcacttcacaggaaatgatcgtcagaagctggataaggatgtgcaaggtgacaaaacacagctggttgaagattctcctactgatgatgagcttgacgactacccatttttggacaacagtcctgttaagtttgagctgaaagatgagtcagtgattccagatattggagcaatctgaagtgatagtgtttgtgcgattgttctgtagcaatctatgtagtacgatgtttagtacatgttgtttgttctgtagcaaactatgtagtttgagctgaaagatgagtcagtgcctcatcgggtacttttgagtaccgtagcggttgtcaagtttcatgctctcctgaaacatccttcgcaactcgcaagtgaaactctggtttatgccctgaatcagctgctgaataagctaatgattgcatgagtatccgttgatgcatagtagtgaaaggaatggctaagagggagtgaattagtttttttttaattttgctcaaatctatgttttcagttttcagctaatgattgcatgagtatccgttgtac

SEQ ID NO: 29654 - DNA, 2957 bp, Zea Mays
acagaaaaactacacagagtgaaatttcggaagcacgcagacccggtcggatccaccggcccgcggaacggatcgaggccaccggcatcctccgcttgcgtcgcattgcggcgccgagctcgaaacccctggatcggttgcagctttcccactgcccccgcccgataacgcggcggtagggtggtggcctgtcgatctcgcggcgggagccggctaactacctgccgttttgtggatttgtgtgcgtgcttgattttggtgcgtgtggtggcgtggagtcgccggcgggggggggggggagctagggttttggtttgggctttcgggatgacgcgccgggtgcggcggcggacgtgcagggaacgggagggtagggtggtgcggggcgcgtggtgtgttgtttcggcgaggccggaaggcgaggacgatgcggcagcggtggaggtggactggagggcgctgccggacgacacggtgctgcagcttttcgcgcggctgaactaccgcgaccgcgccagcatggcctcagcgtgccgggcttggcgagcgctgggctcgtcatcctgcctgtggagcacgctcgacctccgtgcacaccgctacgaccgggaggtggcgtcatcgcttgcctcgcggtgcgggagccttcgtcggttacgcctgcgcggccacgaggcagcagaggccgtcccggccctctgcgcgcatggtctccgcgaggtggtggccgatggctgccgcggcctcacggatgccacgctcgctgtcctcgccgcgcggcatgaggacctccagagcctccagatcgggcccgatcctctcgagcgcatatccagtgacgccctccgccacgtcgctctttgttgctcccaactccgccgcctgcgcctctcgggtctccgtgaagctgacgcggatgccgtcggagcgctcgcccgctgctgccccctcctcgaggacgtggctttcctcgattgcggcaccgtggatgagaccgctcttgctggtatccactctctccgcttcctctctgtagcaggatgccggaacctgaaatgggctactgcatccacctcctggactcagctttcctcccttattgcccttgacgtctcccgcacggatgtttcaccaagtgctgtttcacggctcatttcccatgccaaaaccctcaagcttatatgcacgctgaactgtatttctgttgaggaggaacagcttcataatcctgctgtttttagtaactctaagggcaaggtcgtgctaacgattaacagtgacatctttagatcttttgagaccatgtttccaattgtggatgctaaagagcacggggttttccatcagtgtaactggagtcacaaagacaagatagctggtgatataacaacatggctcgagtggatcctgtcacagtcacttctccgaattgcagagtccaacccacaaggcatggatggtttttggctgcagaagggcaccacactgctgcttagactattgaagagtttgcaggaggatgtgcaggagcgggcagccactgcacttgctacgtttgtagttatggatgacgagactgcaaatgtggatcctgcaaggtcggaggcggtgatgcagaatgggggcatccgaatgttgctggaccttgcaaggtgctcaagggagagcgcacagtctgaagcagcaaaagctattgccaacttgtcagtgaataccaaggttgccaaggcagttgcagatgaaggcggcattacaatactcactgatttagccaagtcgatgaataggcttgttgctgaagaggctgctggtggcctttggaatctctctgtaggcgaggaccacaaggcgtctattgcagtatctggtggtatcaaggccctggtagatctaatatttcgttggcctgctggaaccgatggagttcttgaacgtgctgctggtgcgcttgcaaacctggctgccgacgacaagtgtagcttggaagttgcaaaggctggtggtgtccatgctttggttacacttgctcgatcatgtaaacttgatggcgccctagaacaggctgcaagaggtctagctaacttagctgcacatggggacaacaatgacaacaatgctgctgtaggtcaggaagctggggctctggaggcactagtgcaactaacaggttctcaaaacgagggtgtaagacaagaagctgctggtgctttgtggaacctgtcatttgatgacagaaaccgtgaagccattgctgcagtgggtggcgttgaagctttggttgccctagtgcaacaatgtttgaatgcttcagaaggccttcaggagagagctgctggtgcattatggggattatctgtttcagaagctaatagcattgcaattgggcagggtggtggggttgcacctttgctcacattggcacgctcagaggttgaagatgttcatgagacagctgcaggggcactatggaatcttgctttttattctggtaatgctctccgcatagtcgaagaaggtggggtgcctgttcttgtaaaaatttgctcatcatcagggtccaagatggcacgcttcatgtctgcactagcactagcatatatgtttgatggaagaatggatgaagttgctttggttggagcatcctcagctagcagttccaagagtgttaatattgaaggagctagaagaatagcatttaagcatatagagacctttgtgctcactttctcagatccacaaatgttctctacggctgctgcctcctcagccccggcagcgctgtctcatgttgctgaagcagtgtttatacaggaagctggacacctgagatgcagtcgctctgagattggtagatttgttgtcatgcttcggaatccttcaccaattcttcgtgcttgtgctgcctttgcccttcttcaggctatggggctgacaagaaggaaatccctctagtcccg

SEQ ID NO: 29655 - DNA, 131 bp, Zea Mays
gttacatccctggtcgcactctggttttcctctctttgcctcgatgtccaagtgcctcgcctctcctgttcctgtcctatccttcgtcgcctcggcacgctcgcatcccttgggcccgtttcaccttcgcg

SEQ ID NO: 29656 - DNA, 1888 bp, Zea Mays
gggatcgtcccctccgccgttgcggcgagcaggcagcgagcgccgcagcccgcagcccgcagccaaacgccgccaggccggggaaggggaacggtggaagagaagtggagcaccagcgaaccgcatatgctcggggttcttcgtcgcgcagccctcgccgcagcgtcatcgccggcggcggacctccgacagtttcagtgtgcttaccatagaagcagtgagagattatcacctatccgagaccaagaagtttcatatggtcttaattgggctattgctggaaaaggtgtcattgtgaaagataaggtcctccataacttggaaacatctgagcttcagaaaggtggcgctacttaccctgactttttgtctggtataccacttcatgttagaggagatgttattggtggtgtccctggtgtttctaaagctcaatttgcaaagcttctaaaactgtcctggtgcaacaatgagagctgtctcactgagtcatcaggtcacgggttcgaagtagtctctccgtatttgcgggggaaggcttgcttcggtttatccctatcctagacgtcacatatgggagcctccaacagtggatctacctttttttatctccctgtttgttgacagactacttgcttgcataggtgacgttccatctttcatccatctcgtgtctatatgttcaagatggcgccattggttcctcagcagaatgtgatgcaaaggttcgggtcattagtgataatccctctgctgttatgttactgtcgaatgtcctttggaaaataccagatcgtgcgatttcccatgacacatcccctttgactatatatgctaccagttcaataagtaacaacgttaagactgttcttggttctggaacacaatatgctaatggatttgctgtggcggatattgaacgatcatctctaatcctatgcggtaaagcatttgctgattcagctatcgtgaaagatgcacttactgctatgacagccccaatattgtctgcaagaggaggcctccctgttccaggatggattctgaactttggtggttctactgtattattgtttgccccagtggaaatcatgatgtcctgcgtagaaatccacaatgctctattgtccattgactgtggtgcagtcatatcttccaaggggtctactgtgcttttcccaacaaaggcaagcagggagcagaaactgcttaccaaaccaactgcagtaattatcgtatcatctgatagctctggcgccataccatctgtatgtaagctctctcctggccaggctgcctaccatttcttggctggatatcacgatggaaaatttgtcccagcatacaacagagccccctctcctgctgacccacttgcacttgcaagttctttattctcacatttgaaagaagatgatacaccatcgtatctgatcaacgctaagcactctggaaagtacattgacggcaatgggtttatgaaattattaaagctggcactatctcacgatcttcctgacatcaaaactgaaggctctagagttggggaactcaaggggaagtacaggagctttctatccagcaagtttggccaatgtttacccgaggaattctctttttaggagatacaccctgaggttgcaatgaacatgtatatttactggcataggtttacattttggtttgaaaaggtgtcagtattcccattctgtctcagtttcaatgtaatactctattaccttacattgcatctttccgcctcctggtgtttggatatactgacgtaacgacaatgtagctagtacctacatgcatgaattgtcttgtgcactccgcttcagtcaaattttgttaagcagcagaaaattggaaactctcagtatacatg

SEQ ID NO: 29657 - DNA, 1468 bp, Zea Mays
agacctcgacctcccctcccacatgctcttcagtctttgggacttcacagggcacggcaccaagagaggggagaatctttcgccctgaaaaagagcaaagtttcagcccccccccccccccccccccggttccttcccccaacgaaccagcagagatatatcgcagggaacaaaacacaaggaggccaccagccgtagccgacacatggacacgcagcagagcgtcgtcgccgccgcgatccagtccagaggcatggtggccgccgccgcaaaccaccccgtgagtgtcgtcgcggcgggagacgttggcagctcgccccgcgccacgtgcggcggcttcgtcgccctcgacgtcggcgcgctgtcgtctctggccggcgacgccggcccaccgggcacgcccaccgcgccgccgcggacacccaaggtgatgcggtcgctgtcgaggaagggcgacaggaagccggccgaccccgacgccaacgccaacgccaacggcaccgccggtggcggcggtagcgagcggcccgcagcttgttccgtgcacgtggcggccggcgaactcggggacgcgccccggcagcgcgcggctggtcgtccacacgccgctggccggcacgcccggaagcaagtcccggcggttcggcaggcggcggcgccgtggctcgatccccggagggtggtcctcctcttccccacgctgtccagcgtgggaacgctgatcctcctctacttcacgctatccatgagcagggcggacaccagtagtggcggcgccagcgacgctcggtgagacgccggcggtcgaaagcgaagggggcatttttgcctcgtctgagaattttcaaacttgcaaagattgacaagaatcaatacaagtagggccaggcatatcgacggtgaagagatcgagccggctggggattttgtggacaagtttgtgatggtagacatacttgtttcttcttgtattatctctctctctctctccttttttttcggattctctcaaaaagggatacatgtcgctttacagcgtaacagataatactgaaatttttactcccctctgatgctaaaaacacaaccaaaccattttcgccacatgtcttaacagggatggccaattgtctttgagctcggatgccgttcattcaacagtggtgtgtgtgtatttgttccctgaacctaacctcaacgaacaaacaaaccatgttgcaaatcacaaggggtgatccaagataatttgggaccctctatgcacactggcattaagaacaagttcaataataaagtcaagcgcttcactattgagtcaaattatagaatagtagtctcctaattgtgcataagaatttttttattgttaatttacccatgttccactttctctttctcctcacatcgttgtgttgttgagtggtggcccaccactatatagactctcgtgtccaacttagggtttgtt

SEQ ID NO: 29658 - DNA, 2258 bp, Zea Mays
tattctactcttctgctctgtcagcagaccacgagacgcgcgcgcgaaactcttctctctcctttgcgcacctctttcgtcgtcgtcgtcgtcgatcttcctccggttctttgcttgtgggatgagtggaaggaaggccggtcctcgctgcagaaagagggagaagacttcatctgcacgtgctgctgatgtgcattagaggatccgtgctgataatatacagctgacacccacaagatcgactggataagttcgagcctgacggcatcatgggttccggcgatttgagctcggagatggagaggacggttcttggcctgacgctgtgggtctggattgccatcggcgtggtcgcgcttctcgtggcaatcctgctgatgatctgcatttgggtggcgtcccgcctgaggaccaagagaaccatggacagcctgaggcagacgcagatccccatctactccaaggagatccccatcgaccgggtcggcgggcgcagcctggcacagacaatgcatgagcgcgagcagccgagcttgccgccgccggacaagtacgcgaaccgggagccggccggggcggctgtggggcacctggcactcagcaagtcctcggatcatgacaacatgagccaggggagctcggtttgcaatgctgaccgtgctggcactggcagcatgcactccggtgaggatgggagctcaggacctcggaggaaacccaactctcctgcggcgttcgtgtcagcttcgcccttggttggccttccggagttctcgcatcttggttggggtcactggtttactcagcgtgaccttgaacttgctaccaaccgcttctctaaggagaatgtgctcggggagggtggttatggagttgtgtaccgtggacgtctggtgaatggaactgaagtcgcaataaaaaagatctttaacaacatggggcaggcagaaaaagaattcagagtggaagttgaggctattggccatgtccgacataagaatttggttcggctgttgggatattgtgttgagggcgtaaacaggatgctagtatatgagttcgtgaacaatggtaatttagagcagtggcttcatggagctatgcatcagcgtggtgtttttagctgggaaaatcgcatgaaggttgtaacaggcactgcaaaagcgcttgcttaccttcatgaagctattgagccaaaagttgtacatcgagatataaaatcaagcaacatattgattgatgatgaatttaatggcaaagtatctgactttggattggctaaacttttgggatcagacaaaagccacattactactagagtgatgggaacatttggatatgttgcacctgaatatgctaatactggaatgttaaatgaaaagagtgacgtttacagttttggcgttctcttgttagaaactgtgacaggaaggaatcctgttgactacagccgatcttccaatgaggtcaatcttgttgaatggcttaaaacaatggtggccaatcggagggcagaggaagtggctgatccaagcttagaggctagacccagtatccgggctctcaagcgggctcttttggtggcactgaggtgtgttgatcctgactctgaaaagagacctaagatgggccaggttgttaggatgcttgagtcagaagaagtaccataccgggaggatcggagaaatcgtagaagtcgcactggaagcatggatattgagtccattgcagagggttccaactctgcggagtttggaaagaaggtagaaaggactggaagctctatatctgacagatctcaaccatgaggcctggaaatctaagctatatcaggaactgtctcagaaacgatgttaatcaccaaggtgattgctgtcctgataggggatgctggtaggtgacagaggcaaggcaggcccaggtattactgcctaagtattaggctttagttttcaggtgcagtagaagcattcttggatgaggaacctcctggtctcctcttatttgtataggtatatgttggtgcctgaggaattcctcttggtttgggtgtttaacatttgttcggttcttttatttcttgcattgttgccttcttaaatcagtttcacttctccctgatgaaatgctgaacatgaggttgtggacttgtggtcttagcgatactgcttgtcattgtttttcatatgtttacctgcggcctgctctaccttatcccatgagttcgttggcgaaaggtttggcaacatacgctgatt

SEQ ID NO: 29659 - DNA, 2291 bp, Zea Mays
tgaccccctttcttccgctggtaacctgaccccacaggtcattctcaaaggtcaaagccagcaggcacccagcccccgcccccgccaccgccattatcagcagcttcgacttctccggccgctccgtccttttggcatttcctcccgtcttctctcgctgcttttcattacctcctcccgcgccgcccgtagtaccgattcgcactcggatggcgtcggcggcgttcaagtccaccacgcgccgcgccctccacgccaccaccacctcccgctccgacccgcccccgtgcccgcgccgcacccgctcgcgctccgtcagcgcggcgccccgcgccgcccacgaggactacgccaacacgcgcaccaacccgctcttcgactccgcggcctccccgtccgcctcgccatctccgccccccggggcggctgctgctactggtgctacctccggccgtggggatgcggcgggccgggagagggggcgtgagccgcggctcaagagcggggggcgcggcggcggtggagggagggcgcggtcggcctccgtcgcgccgccgcagcggcgccacaccgcctcggtggcggactctgctgccgatgtcggcgggaggaaggcttcgcgggcgcggtcggtggccgacgtcgcacgcacctaccggggctccgagaccgatgcagaagccaggggtgtggcaaggaaactgcagtcatggaggagccagcattcagttccagaggggaagcgtaagggaactgatgcaagttgttcatcccaggggtcaacaaccggagcggggtgccggcaaatggatgaaactacacagtcagaatctagcactgttgtttcttcacctggccatctcgagcatcaggaccactcaactgtcccagtggatccagttctggaaattcctcctgaattcgatccagattctgctgagtttatctctgacattagtgattatgtaacagaatatggaaagaaaaatgttgtggaaatttctcttgagtccaggaacagtgcagcaaaacagcactgggagcaaatggaaatttctcttgagtttgatacagatgcttctgagctggtttcagacacatggcaccatggagcaaaccagcaacggggggaattggaagcttctcttgagtttgatcctgacacctctgagctcgctcctgacataacagaatatacattaaaactaaaacagtcacatgaacgtgctcgaaagcttagggcagatttggcagttgaagagcagcgggaacaagaactgagcagaatgctgaagggcatagtaacagatccaaactttactgagacacataaaaaacggccaagaagaaagagtagcatagaaagactgaaagtgtcaaggcgtttagctgaagaggcaatgaactattttgaggaatgcgtttcaatttcaacaatggatagcactgatttctcatcacctgaggatcctcaaccaaattcagttgtgaatgtcccaccaaagagcaatagtagatttttccacaaagggagatcaatctttcaagaaccccacactctggctgatcaacatggatatcatgtggaatctgacaagcaaactcagtgctcaattagcgcaactggatccgatgtgtctgacagtgttatctttagtcacacaaatggtgctggtttgaaaatcaggagcgtctccagcgatgatcctgatggctttgacactccgcggagcagaagttcttgtttctctttcacccacgagccagtaaaaaagctcgaaaactgcgatgttcggcaataccttgggaatttcggaagggggaacaatacagagctaaaggagacgaggtcaagttattttgccgatgactatgcctcacagaaagttgatccggacttactgaaggatatggtgacctttcagaatcggatagagtatggagggctcgttatatgtaacatcagaacattctgacagtgaacagagccactgtccgaagaagctaagtatagcattgtgcaattatccttttggcgaatgtggttttttggtgactgctataatcttttgtcatgtttctctactaattatcaatgctatgctataatctgtgtggctgtgtgcgtcgtatcttgtatgcgatccacccggattcataatccgtatttctaacgagacagaacaactcctatccagtggtatatattagttagattccttaggccgtgcttagcagatcgtgcaaaactctttttttttactatagactgtattgtttgtatgttggag

SEQ ID NO: 29660 - DNA, 1872 bp, Zea Mays
gtttacaccgagggttctctctttgtctgttcactgttctactgggacgaccccaaatccccaaatcgaaaggggccgtccggctcagggtttctcgacggctccttgccctctccgccatggacgcacagcgagccctccttgacgagctcatgggcacagctcgcaacctaacggaggaggagaagaaggggcacaaagagctgaagtgggacgatccggacgtgtgcggcccttacatggttcggttctgtcctcacgaccttttcgtcaacaccaagagcaatatcgggccgtgctcgaggatccacgatccgaagctcaaggaaagctttgagaagtctcctaggcacgatacttatatgcaaaggtttgaggcagagcttgcacaacaatgtaatggacttagatagaaagataaggcgtggtcgagaaaggctggctcacgattctgctgtgccaatgccaatccctggaaaattagctgagctgctttcagtgcgaaaagaacaggtgaagaagctgctggagcaaattgaggagcttggtgaggctggtaaagtggatgaagctgaggcacttatgagaagggttgacattttaaacgctgagaagacagctttagctaacgaagcagacaacaaagtagctatgcttgagaagaagatggaactttgtgaaacatgtggatcattcttagttgctgatgatgctcttgagagaacgcagtcccatgtgactgggaaacaacacattggttatggcatggttagggatttcctggcagaatacaaggcagcaaaagagaagacaaaagaggaagagcggcttgcaagggagcagaaagcagaggagcatcggaaacagaggggaaaagagtatgatagtgggggcagggatagagataccagaagggagaggtctggggagcgtgactttgaccgtgatcgtcagtatgagcgaagcagaggaagagatagggtttatgattacagggacagaggatcagaacaccgaagcaatcgctacagaaatgggagggattctgaaagaggtggacacagatacaggagtggtggtatgacaaatgaccgagggagaatgaggagcagatcacgttctccaaccaggcatggctatggaagatctagaagtccagatcattagctgcctagctggacatttagatagttttattcacagttgggactcatgagctctgttggaaccctacagtctccctattttgcatggggaaaaattcccaggtcggtatcgattgccatccccacattttttgtgtttctggcattctatatgcgctaaagctttgtttcaatatttggaatcggaagttaaatttagtaaggccggtactggatttcatatatggatgatgatgtttacagcttatagcaggtaaaccttgaacatcgatgtttcatgttacacactttttatctcccttaataactctgctagaaaccttagttctgctgtttggcttagatttttacactactcaggccaggtatctttttctaccaaaacttatgtgcataattatgattaatgtggctttagtagttgatccatgaaaattgtcaatcatcaaccatttcttttcctggaaccgttgtagtgtacaagagatcaagctttggtttgtagacaatggtgccctggctagaaccgcgaggattgggcctatttcctgactgtctagttattgtctcagaagtctggtttagataaggttctgtttccgcggcaaactattagatacctttgcagttgcggagttctgtaattgatgtattatttatgcagatagtgtagtctaactatgcaaactaatatatgatctgtttc

SEQ ID NO: 29661 - DNA, 4582 bp, Zea Mays
cttcgcggtcatgaagacttggtcactgccctatacgtagaactccagtaaagatgaaaggtttgttaagaaattggctagtgcaggtcaagtgattgaactagggtagaaagaactctagttgcaggtaattttacttaacttgacaaataaaactggatttttaaggatccacttttagtaagcatttctgcaaaacagagtctttgattattgagaagccttacctttactcccttaagccagcatacccttgagagtcttttctttagtcgggtaagtcttgctgagtgattccatactcagggttttattccctattgtttttcaggttctaactttgtgctgttgttgatggtgttaagtgccgatgggctcgaccttcttataagtctaagtaacctgttggggacttgctctcaaatgctatgaattaagaacaaggcaacataaaatgttaaatatcaaagcccttcgtccttcgaagcattatttccttttggatataatggatttcggacgaaggttatgaaggtcacaccttcataatcataataaagataagagaaatttatacacaaaacacggagaataacatgattactttgaatattatcattattttattctcatttattttacttatataaacaacaacaaattacaaatgtaccttcggcttgaaggaaagtaaggataccagcgtgatgctgatgccaagtcagcgtgaacagtacgggagaactgctcatctatttataggcacgggacgcagcccgtgtaaaattacattaatgccctttacatttatcaataactttatcgtaattctccgaggtctaatttggcttttcatctttaagtcggttcccctttccagctgccatgccgaagctttcctgcacatagcttcgtgattgttttaaccttcgtcatgaccgccttcgcatctcactcaagcttcgtcttgaccatgctcttgtatactcgtaacctgattccgaagatgcctgctcgtatacttggaaaatattgtcaaatcatgtttttgaggaccttcggaagccgaaggcccccaacagtagcccctcgcaatattaatttgctggaatgataaattcatattgcgacatggacgaaggccttaagccgaaggtccgaaaaaacaccttctctttgctagaatagcaatagtctttgacaagcgggaccctccagttttcaacgcactaggtgtataaataagagctcatcacgagtttatttggcacgctctcttgccaactgcttttactcacccaacttttagcctgcgcgcaacaacactttcttggctttttagattttttaagcttcggtttcgagaggactttctcagcgtttgcaaggatgtctgaagataaaagagctgttggtgattcgaagctaagtctttctgaggagatgcatctgggctttcttcaatcaatgtcgaagactaatacagagaagattactaaagaaattttggagggtttatctgaagatactggtgacagtgacagttatgatgtggatagtggtggtgaagactccgaagatcgaccttggcgaccaagccatgcggtttttggtaaatcaagtattaaagaaaatcatcttgtcaatatgaggggcagatatttccgggacttgtccattgtgagggctgatgaaggagagaagacttgtccgactcctgaggagaatgaagtcgtggtattccgaagcttcttgaaagctggactacgtattcccttaagcagttttgttgtagaaatactgaagatatttgaaatctaccttcaccaacttgcccccgaagcaatcataaggatgaatatctttgtgtgggccgtgagaagccaggtttggaacctaatgcgaaaagtttctgcaacatacatgaattgttgtacgagacaaaacactagggtaaagaacagtatcacaacaattttggttgctacagcttcggctcccggtctgggtcaagctgccccgtgcctacctttcgaaagaggtggcccgacgactggatgacggaatggttctacgtgaagaatgacttgaaatcacgagaagatataaaaaggatcattatgcgtcccatctggcaacgcttcggcctgcgaaggccgaaggtggaaatgaatgaagcagccgaaaaatgccagagagccttcggtgttgtttgcttctttattgggacaagggatttggtccaagaacacattgccttcagagtatggccacttgtggaaaaatgggaaatgccgaaggaaaccattaaagaaactgacgaaggtggactagtcaggctgaaatacacatttaaatatggagataaattcgttgagccggatgatgactggttaaaaattattgaggccatcagtgatgaattgcttggtgtatactcaaaggccgaagatactgcattatcagcggccttcggaggccgaaagaggaagaggctcaatcgagtatttgatgcaattgggtttgtctaccccgactaccgctatccagcgcggggtgaaaaaagaaagaatacatcttcggcgaaagaaactgctccagccgctcctagcgagccgacgccgaagagaagggtaaaagttctcacacaccggccacgttatattgaaccggccacagtgcctgcatttgtcggtgggactccttcggccactgaagctaaggagatagctcccctgccaaatattgaagtgctgaccgaagtgccagtgactgaaaaaatagaagaaacaagggctgaagaagtaaaaacatcagaagtcttgagtccttcggcaaaaactgaggcaacaaaaagccataagggtccagcagtgacccctaaaagaaaaaaggatggttaatgtgctagatgttttagagacaatcaaatcttcaagcacaactccaaagaatattgctaaaacttccgaagcgcacactgaaacctttgacgccgaagcttcaaagccacagtctgaaactgaagccgggccttcagagcccgccaaggtgaaatccttagaagccgaaaaaacaaaaatagcagaacaaattttggctgaagaaactagcgctgctgcccccgaagcatcttccaaagtacttgattatattgtatgacatgcttcggggaagaaattatctgaagaagaaaattttgaagctaatcactatgcccgagaactgaagtatccgaagggggccttagtgttcaatggcacagacgaagattacttcttatactgtctcccagacaacaaagaattatctgtctaccgggagatgtctagaagtatggggttcccgaagcttgaagctgggctctgcgctatgacgaaggacgatcttgcggatagccttgcatataatagcctgaaggtatgagaattgtatatttggaaatttgtaatttttgaatcattcttttattcttatactaattcttttttcatatagggtttaatactgagcaacgctttgagagcacaaaagaacgccgaagacgagagctacaatattgctttcaacaacctacgaacagaggttattaagctgaggaacgaagctttgtaaaaagataaaattctgcttacattggtagataagataaaggaagacgaagctacctctaaggctcaagctgaagcccaaaaacgcgaaattcaggatcttcggaaacagctggctagagctaaagaagaacgtatacttgaagaaatagaacgagaacttagtgatcaatgggcaaatcatttggaaataaatgttgaagagcttcgtgcatccaagaaaaggtgctatgacaaatccatagaatgtgttaagaagataaaatccagcttcgccagcgttggcggattctctagcgaataaaatttcacaagggggaatccagaaggcccgattgaatggatcagtcacgaagccgaggccttcgaggaaatcttgaatagccgtggagacatatgtgctttttcaggcgccagggggattgttactattttggaaagaaaaggctgtgatcatgttaaatccttagcgcaattcgaaactgtcttgacttccgaagatataaaagacccctcggccgaagcaagcctggttggtgggaaatttttcaccgacatctgggacaatggcggccgagaaatggcccaagaaatcattcaaaaaagcgaaaaaggcatccatgacgctagaaaggtagccgaggctgctgagaaaagcgcagagcccgaaggacaaatagaacctgctgaggcatctccgggcccccacccgaagggggacgacgaaattagaaaaatggccgaagccatcatggacaaagttgtcgatcagctactgaacgaagctgcagaaatagttcttagggaagattaaatgctattgtaaaaacatttggagtgtaacatgtgtaatactttgtaactttgaatgtaatatataatctatttatggttcaattctttacgatgcatgaaattttgcatacataccgttttttgagcctccggcgaaaaaacaccttcccttcttt

SEQ ID NO: 29662 - DNA, 3449 bp, Zea Mays
atacgagccccgcagcccccgtccccgtccccgtcctcctcctcttcttcccccttcctagcggcacggcaccaggcccgccctggtggcatctccgtaatttcgcgcctcttcgccgccaaggggtggggccgtgggggtggcaagaggaagaggtatgggcaacgccagcggccgcgaggaggacgctgcagctgttgacggcgacggcgccgacgtggaggacggcggaggggactcgtcggtccgctcgtcggagcgcgcctttccgccgtacggcagcgtaggagccaaccacgtgcggcgcgcgtgctcggtgggtgtcgtaggtggcggtggaggcgccggatcgccacccgggagtcctggccactcgctctcgccgcggatgttcgtgccccagaacgatgaggcaccttgaggaggatgacgagatagatgacgaactggatcagatcatggctcttatgatgggtcaatacaagaagaggaaaaatggccagcgtaaaaagcgtcgaggttcagtttttggacataaagttcatgaccggagtagacaagaacatgatagaaaattatttcaagattactttgctgaaaatccaacatatcccgagaagttttttcggcgtcgttttcggatgagttcctctcttttcaagcggatagctaaagccgtagagaagcatgatgaatactttgttcaagatagaaatgcagctggtgttctcggtttttcatgtctacagaaggtgacagcagcttttagacagctagcttatggtgttccagcagattatgttgatgagtacttgaggattggtgaaagcactgctattgagagcttacggaaatttgtcaaggctgtctgtgaggtttttggcccacaatacttgagagctccaaatgaagatgacacagctaggttacttagtattgccgaacaacgtggatttcctggaatgcttggtagtattgattgtatgcattggaagtggaagaattgtccaacagcttaccaaggcacatattgtggtcatgtgaaagaaccaactattatactagaggcagttgcgtctcatgatttatggatatggcatgcattctttggtctaccagggtcactcaatgatattaatgttttgcacagatctcatctttttgatagacttgttgaaggcaaagctccagcagtgaactacacaattaatgggcacaagtatgatatgggctactatctagcagatgggatctatccaaattggtcagcctttgtgaaatcaatcaaggctcctgcaaatgagaaggaccaaaattttactgctgcacaagagtcgctgaggaaagatgttgaacgtgcatttggtgtactgcaggctcgatttgccattgttcgaggtccagcaaggttttgggatgtagctacacttcggaacattatgaaagcatgcataataatgcataatatgataatagaagatgaaagagacgcaggtcgtcttgagccgccctatgagaagagcgacgctgagacaaatggttgggtttcacatgttggaacatcaaacttatcagcattcatcgacaagcacaaagatatagcccattctttctttctatggcttcatgcctaggaaggaggaagcagccatctatggtgcgagggagttgcaacccaaactgtctcagcaaaagataccagaattctcttgcaaagacacaagtcaggtggtccatagtttcagcctcttggtcacacagaagacatttctccgggtgatccaaacctcgttttgcaagcctattcgctgtccagcatcttttctgagtaactagccaaatgaaaaaccggcatttgggcggggcccatgatttccacaccatcttataatatgcaaaggaacttgagccaaggaaaaggcctttgtaagaagatttagccgaatatttgccatttgaggctaagctgaaaaggtgtttatcatctatgtcaagctgcagttcaaaatctgaaagcaaatcccagaggtgctggctaaagtttagctggggtggatccaaacagagcctaagtgtatggtatgagcattgtcagtatatattgattaggcctgttactcctcctgtattgcagacccctgtacctccactgcaaagggctgctgatgtaactccagtgttcaaccagatattgatgaatgatcaagaagaagaatatgatggcccccctcaaaaggaaattccttctttaattgtctggacccttggaggaaagaatgtatatgttgaaggatcatgggataactggaaatcaagaaaagccatgcaaaaatctgggaaagatcactctcttttgctggtactcccgtcaggagtttaccgatacagatttgttgtagatggagaaaggagatgccttcctgaccttccctgtgaaactgatgcaatgggcaatgcggttaaccttcttgatgttaatgattttgtcccagaaagtgttgagagcgtggtagaatttgagccaccgctttctccagactctagctacagtttccaggcacctgaggacaaggacttcgccaaggagccacctgctcttccagctcaactccatctcggcgtccttaactcacagaactcggaagaaagctgcgcgcggccgcagcacatagtcctcaatcacctcttcatagagaagggctggggcgcccaccccctggtggctctcggcctaacccacaggttcgagtccaaatatgtaaccctcgtcctgtacaaacccatcgaacgatagcaatagcccgcgcatgaagagcggaagttcaatgcttgacaactcactgcgggagcagcgatgaacagcgccgaggttgtacatgcttgtgaaagtggttgaggttcaggagtattttttttccgtgccctgcttgcagaacctctggtagtctggttgttagctgtacatgctgcgctatcatgatgttggccttctggtttgtttacagagagacaaggcgtccttacaatttttacatgtccgcttgtcgtcgtcgttcctctcccatcccatggcagattggcaggaatgaaatgtgttgaaatccacatgaatgttaggtgccggagatagatcaagggattcctagatttttatttgttttttgactggtcaagaagatgttgttgttatgtactaaactcaagaaatttttacaaatgagatactagtgttctcaggcccggagccatttttttttacaatgcccttatgcaacgcattcatggagtgagatttgccaaattctgcagaactctgcactattttttcttgaaagcgtctagacatttaggtagtagagtttctgtgattaatgacatcataaaattattatgattattgtgttttacaaaaaaaaaatataaactagatcatggcaatagaaaataaa

SEQ ID NO: 29663 - DNA, 5236 bp, Zea Mays
accacagcctccgctcaacggcaggagaatcacggcgagcgcgtgctcgtgggcacccctctccatcaactggggtgcgcgatcgatcgatcaaaaccccaatccagccttctatttccgatcgagacgcaaacgaagcaggtagaaggccaaggccagcgcagacacggatggcgatgggagcgacggttcgcgcagcggctgcagatgccatggtgacgttcttgtgggtgttgtgcgcctccgcgctcgatgtctccatagcagccgtcacgtcgtaccaggggttgcaggagggcaccggccactatgcgctcctcgtcaccacgtccctcctctcggtgctcctcttcaccttcgacctcctctacggtgtgctcggtggtgccagcttcaacttcactgactttgccacctcctattccgccggactcgatagcccctccctcttctctgttgcgctccacttcctggcacggactgtcgtggtggtgaagaggaccactttgcgcgtggctcggaaggatgcctatatggcagagttagatttgtttgctaaaggattgcatgaaaggctggttcctttcctgggtcactgtcttgataaagaagaagaaaaggttcatgtgtataggtttgtccaaaatggtgacttgtcaagtgcactacacaaaaagtcaagggaggaagatgaaggcttgcaatctttggactggataaagaggttgaagattgcaacgggggtagctgaggctctttgctatctgcatcatgaatgttctccaccgatggttcatagggatgtgcaagccagcagcatccttcttgatgataaatttgatgtacgccttggtagcttgagcgagcttcctgcaattgaatcagtcttgaatgctatgaagagcaatacaaatcagcgagtatctccaatatttgctcttgtcctatgccctacaagagagcttgctattcagcttacagctgaagcaaatgtcttgttaaagtaccatgaaggaattggtgttcaatctcttattggtggcactagattcaagcttgatcagagacgattagaatctgatccatgccagccagatcatctattagatgaaaccaaccgtgctggaagcaagattagggtggaaagggctgagcgaagctcctacacgtttcaatcacagttagatggcggtgcacagttctgtgtatcacaagaggcatctaggttgacctcgctcttcttagtgttcatgcccactgcgcaagacaacaccacaacgccgatggagttggaagatttcatcaggctcgactcgatctggatgagatggactctgctcgctgaggaccgaacaccgaagccaggcagccagccgaggaagccaggcgacaggcgacgccaagtcgagaacaccctaggtggtcgctcgcaggctgcgagtgagagccgtggcggagtcgccgtccttgcccacggaggaggacacagccgccggcgcagtgggatggcgacgccgacgcccatgcccggaagcgaggggacgctcgtggcggtgatgccgcggtccccgtccccgacgccggcggaggcggggacctcggcgaccgagacgcccgtgctaatattcctttacttccacaaggcgatccgcgcggagctcgaggcgctgcacggcgccgccgtgctcctggccaccgagcgcaccggcgatgtcgcggcgctcgccgagcgctgccgctttttcttcagcatctacaaacaccactgcgatgccgaggacgcggtcatctttccagcacttgacatccgagtaaagaatgttgcagggacctattccttagagcataaaggagaaagcgatctttttagccagttatttgatctcctggaattggacatacagaatgatgatgctcttcgtagggagcttgcgtcatgtacaggcgcgatacaaacgtgtctcagccaacatatgtccaaggaggaagaacaggtctttccattgctgacaaagaaattttcatgtgaagaacaagctgatttagtgtggcaattcctctgcaacattcctgtcaatatggtagcagagttccttccatggctttcaacttctgtcacatctgatgagcaccaagacatccgtgactgcttatgtaaagtagttcctgatgagaaacttctccaacaggttgtattcacatggatggaggggaaagcagcaagagaagtggcagagagctttgccactggtaatttagtaagaaatcatagtgctgaggatgtctcagaccatggggagatttatgtttgttcacagcaagaatctaaacttgggagtaaaaactgtgcagaatctaatggttctcaagccgacaggcatcctatagatgatattttatactggcacaacgctatccgcatggagttacatgatataaaaaaagaaacaagaagggtgcaacagtctgggaatttttctgatatatcagccttcaatgagaggcttcagttcattgcagatgtatgcatctaccacagtatcgctgaggatcaggttgtttttcctgcagtcgatagtgagctgtcctttgtgcaggagcatgctgaagaagaacacaggtttaacaatttcaggtgtttaattcagcaattccaaatagcaggagccaaatcaactgcactggacttctactcaaaactgtgttcacatgctgataaaatattggagacaatcgaaaaacacttcagcaatgaagaaaccaaggtgcttcctcaagctaggatgtttttctctcctgaaaagcaaagggaactttcgtacaaaagtctgtgtgttatgccattgaaattattggaacgtgttttaccatggttggtgtcaaagctgagtgatgagcaggcaacttcatttcttcagaatatacgattggcagcatcaccatctgaaactgcactggtcactcttatctctggttgggcatgcaaaggccgggacaaatccaaatctggagaatatttatgcttaacatcaggtacagcaagatgcctgtcagatgatgtagatgatcagggaaaatgccgatcattctgcccatgtgcttcacacaacagctcagatctttctctgcagctacaaactgaaaatggttctaggccaggcaagcgaggaaaagatgcagtatcttttcctggtactaatggaagctactgctctcaaactgctgacattgatgcaagtccatgtagcaaaaagccttgttgtattcctgggttgagagtaaagagtagcaaccttggtattggttccctggcttctgtgaagtcctttcgctctttaccatacaattctactgctccttcaatatattcgagcctcttctcatgggagacagatgcatcattgtcttgttcggatggcatttcaaggccaattgatacaatattcaaatttcataaggcaattcgcaaggatttagagtacttagatgttgaatctggaaggctcattgatggtgatgagtcttgccttcgccaattcattggaaggttccgtttgttatggggtctttacagggctcacagcaatgctgaggatgaaattgtgttcccagcattggaatccagagaaacattgcacaatgtgagccattcatatactcttgaccacaagcaggaagaacaattattcgaagatatctctgatgttctctttcagctttcacaactacatgatagccagggccatgcccagactaaagttaatgaagtaaagcaaagctgtttccattcatctaatgacgttgattttactaggaagtataatgagcttgccacaaaacttcaggccatgtgcaagtctatccgggtcgccttgactaatcatgtccatagagaagaacttgaattgtggccgttgtttgacaaacatttttctgtggaggagcaagataaacttgtaggtcgtataattggttcaacaggtgctgaggttctccaatctatggtaccctgggttacatcagctctcactcaagaggagcagaacaaaatgcttgatacctggaagcaagcaacaaaaaatacaatgtttggggaatggctaaacgagtggtggaagggagctggaacatctgattcttcagcagaggcaccctctgctccagaagatagtcatttacaagataagcttgaacaaaatgaccagatgtttaagcctggctggaaggacatatttcgaatgaaccagagtgaacttgaggctgaggtgcgaaaggtttcacgagatcctacacttgacccaaggcggaaggcctatctaattcaaaatctcatgacaagccgctggatagctgctcagcaaaagttaccggaaccaaattctgaagaatgtagtgatgatgctagtatacctggatgtgcgccttcatatcgagaccaggagaaagaaatttatggttgtgaacattacaaacggaactgcaaacttgttgctgcatgctgcaacaagctgttcacatgcagattttgccatgataaagttagtgaccatacaatggaaaggaaagcaacacaggaaatgatgtgcatggtgtgcctaaagattcaacccgttggtccgttctgccaaaccccatcttgtaacagactatcgatggcaaagtactactgcaacatctgcaaatttttcgatgacgaaaggcatacacttgtagccactacacttgtcctatctgctgcaaatctctgggagatatggcggtgtattttggcatgcttgatgccttgttggctgctgaagagcttccggaggaataccgtgataggtgtcaggatatactgtgcaatgactgtgagaggaaaggcagatgtcgatttcactggctataccacaaatgcggctcctgtgggtcgtacaatacccgagttatcaagactgacactgcagattgctccacaccaaattagctggagggaacatttgtgcttatttgtagcctttttttttctcttatgtaaatatcttctagcgggaaggaaaaaagagatgtcctgtaggatagttaacataatttcattcgtagcgatatcagttttgtaagtgtagcagtttacaatttactaggtctagtgcgttgtactgccaaaatggacggttctgctggacaaaggacataatccgagaaaataggctagttagaacaattgctcgcgtgcatgttctacatatttcgcggt

SEQ ID NO: 29664 - DNA, 2327 bp, Zea Mays
atttacgattgcatctctaatcctccccaaccctcttccggttcttctcatcccaactgaccgactaccatggccggcggcggcggcggctctctgtctagcccctccgcctccttcctttccagtcccaccccaacaccgccccctcgtctcctccgcaggtgtagcacgaagtctgcctcacgagatagccccatcctcagaccaaaaaagccgcctccactcttctgcgcggcggcagccactcccacccccgctcccgcggccgcgtccaagtcggctgggtcatggagggacctgtgcagtctcaacgcctgggtggtgcgagactaccgccgccttgtcgactccgtcggcgcgctcgagccggcgcttcggaggctctctgaggaacagttgaaggcgaagacggccgagttccgcagccgcctaacgcgcggggagacgctcgccgacgtccaggccgatgcgtttgctgtggtacgtgaggcggctaggaggacgcttgggatgcggcatttcgacgtccagataattggcggtgctgtgctccatgacggctgcattgcagagatgaagacaggcgaggggaagacgcttgtttccacacttgcggcttatctaaatgcccttacagggaaaggggttcatgtggtgactgtaaatgattatttggcacagcgtgatgctgaatggatgggtcgtgttcatcgctttctcggtcttactgttggtctgattcaggcgggtatgaagtcagatgagagaagagctagctacagatgtgacattacatacactaacaactcggaacttggatttgactatcttcgtgacaacctatctcgaaacaaagaacaactagttatgagatggccaaggccattccattttgctattgtggacgaagtggactcagtacttatagatgagggaaggaatccattattaataagtggagaggataatagagatgcagttcggtatccaattgctgctaaagtcgcagaacttcttatggagggtgttcattacaccgttgaactaaagggcaataatatagatctgacagaggacggtgtagcacatgctgagattattcttgggacagatgatctatgggatgagaatgatccatgggcaaggtttgtgatgaatgctttgaaggcaaaagtgttctaccgaagggatgtccagtatattgtcagggatgggaaagctattataattaatgagttaaccggccgagttgaacccaagagaagatggtctgatggtatccaccaagcagtagaagcaaaagaaggcctaaaaatccaggcagactcggtaattgtggctcaaatcacatatcagtcattgtttaagctttatcctaaactttctgggatgacaggaactgctaagacagaggaaaaggagttttcaaagatgttcaagatgcctgttattgaagtacctacgaatctgccaaatatacgggtggacttgcctatccaagcttttgcgtgtcgagagttctgaatacttgtcagagctacttaaagttcacaagattccacacaatgtccttaatgcaaggccaaagtatgctgcaagagaagccgaaataattgcccaagctggaagaaaacatgctattacaatatctactaatatggctggcagaggaactgacattattttaggtggtaatccaaaaatgcttgcaaaagaaatagtagaagataacatacttccatttttgacccatgaacctcctaatattgacatggaaggggaatccacatcccacaagggtctctcaaatgtagaacttagtccatcatcagtaggtctgcttgccaaagctgcaatcatgtcaaaatatattcacaaaagcgagagaaatgaatggtctttgagtaaggcaaaatccactattgctgaatctatagaaatgggtcaaatgattgggatggagaaactgcaagagcgcatgactgaagagtctgagatgtaccctctttgtgatgcaataggacttgcttatctcagtgtcttaagggattgcgaagttcattgttcttttgaaggtgctgcagtgaagagattaggtgggcttcatgtagtaggaacctctttgcatgagtcacgccgaattgataaccaactgcgcggcagagcaggcagacagggtgatcctgggtcgacacggtttatggtgagcttacaagatgaaatattccagaaatttaatctggacactgaatgggccgtgaggctaatatcaaggataacgaatgatgaagacatagctatcgagagcaatgttgttgtgaaacagg

SEQ ID NO: 29665 - DNA, 1683 bp, Zea Mays
cacaggcccacgcatcgaaccccgtgagtgttcgccgacgtggcccggcgtcagcgtcgcgtcgatctctctgccgaggacctcgctctccaccaagaggcggtcagcgctgcccgacggcaccgtcgcctctagggcatcgaacaccgtcgagtagtagcccatcgccgcggtcacccgctatggcaggtcatcggagcagtcgtcgctgccggtgctgttggcttccttctcaacgatggtcaccacggcggggttcatggatttaacccacttcaggaatgtaccttgacttcgtccgggagaagcagaaactggtctcgtgaatccttctaagctcctgaccagcattgacgaacagatagcggaaagccagggaggagccgtccaggagagaaatcatggagaagataaacaagtggctgctggcttgcgaggaagagaaatggctggatgagtacaatatggtaggtccaaaatgtgggtttggatacatcgaacactgatttcaaatgtggaagacagataaagaccaggcaaactatattgaatgggagaggataaagccaatcaacatatgagaggtcgccgtcgcaggctgcgcagcaggtgtcgccccagcagcaatataggcggtggtggctgtgcgggcccaggcactggcccaggtgacgcgggcaagccaaagaggtcgggctgcaggctgtagctgccgccgagctgctcctggcgcttctggttccagtcgccaactcatcagatgtactatatagatatagaccgtgaactttgtattgatgattttctttgtggtgatgattacaaaataaatatttctgaactaatgaagatcagttcaataacctgcatgggattagccaattggaacatcaaaagtctgatgccctcgccttgtaccgtcttgagtacaagtcctctagctccaaaagaagcgtcaggtcaaaactgtccagtagtccactgaatgaaatccagcagcaaatgggcaggctgactgcagacagtcctgtggagaacaaacggactgctaggagcaagccaaaggctaaccagaaggataccaatgcaaatattcatccccatgttaacgcccccaatcaagttaatgctccaaatgcttatcaagcaacaccgcaggtgaaccaaatgacacttatgaatgggaacgttgtttatggacctcatctcccacattctgaagacgtcatctatggacctcatcttccacatggatactcagctgaaggaagcagcttcttttggaacacaagtgactatcaatatacataaaagttgctaacaaaaactatcacatttttctcaaagatcagttcaaattaaagtgctcttattctgtgtttaagcgacttatttctgtatattgcggaatgtctgaagcttatgttcactgtttgatctgctgctgctgaataatgttgccagcctagggttcatgtcacttttcatctgcatttttactacaagcatcctagaaatgagatggagtggtgttggaattgatgacacatgtgtgcgatttgaaaaacacctgttttgtgttgtgcttccttgcattctctacaacaatgtaatagattactatgccttttctgtaatactttttatctgaatttttttataatatttatatcttacaacaaa

SEQ ID NO: 29666 - DNA, 2954 bp, Zea Mays
cgcgccgctcctgctactcccactctccccagcccccactgcctgtgcctctgtctgcaacagcaacccacatccacctcctcctcctctggtcctctcccctcccgcgctcccgcactcctctgtgctgttctgtgaccacccgggcattaactgcccgcattggtggtttcctggggcggggtggttggattaggtcgctttgctgctgcccgcccgaaagcagggttgcaaagcccacctccgccctttcgggcagaaagagccagagagagagagagagaggtcggggccggggagcacacacccatcacccatggcctgactgacctccggactctccctgcttccgtccacgccgcgggccgcccagctgactgctcctgccctccgccatggcgtccgtcaagctcggctccaagcctgacgccttcaagcggcaaggccaggcatggttctgcacaacaggacttcctagcgatgtcaccgttgaggttggggatatgtctttccaccttcacaagttccctttactttcaaaaagcgcctttcttgaacggtcaattgaagaaaactctgaccaagaagaatgcatcatcaaactaaatgacattcctgggggtgccaagtcatttgagctagttgcaaggttctgctatggtgtgaaaatagagctttcacctgcaaatgttgtctacctacggtgtgcctcagagcatctagaaatgactgaagaagtagctgaggaaaacctgattgcacagtcagaaatgttcctcaaccaagtggttctccgtaactggaaagattccttggcagcattggaaacatgtgatgacctactcccccatgctgaagacctccagattgtgaacagatgcatcgagtcattggcatcaaaagctactagtaatccaaacctcttcggatggccgataagggaacatggcatgatgcaaagtcctggtggcagtgtactatggaatgggatcagcacgggtgcaaggcccagaaatttcaattcagactggtggtatggtgatgcttcatcattgagttttcccatgtataagaggttaatctccaccatggagtctcgaggcatccggcctgaaataattgctggttccttaacctactatgccaagaagtatcttccaggacttaggcgtcatagtcatagcatgggcacaatgcctcttactgctactctatctgaggttgaacaaaaaaaattacttgaggagatcgacaggcttttgcctcttcacaggggtatagcatcgacaaaagttctgcttgggctccttcgcactgccatgattctgaaagccagccccacgtgcatttctaacttggagaaacgaattggcatgcaactagaccaggccactttggaggatctgctgctgccaaatttctcctacacaatggaaacactgtacaatgtggagtgtgtgcacaggattcttgatcatttcttggcaatggaccaagcaaatggtggcgagtccccatgcttggatgatgtcatggcatccccatccttgacaccgatcacaagtgttgccaagctaattgacggctatcttgcagaaattgcaccagatatcaatttgaagcctccaaagttccaagctctggcctctgctattcctgaatatgcccggccactggatgatggcctttatcgtgccattgatatatacttgaaggctcattcctggctgtcagaagctgaaagggagcagttctgccggctgttggactgccagaagctctccctggaagcatgcacccacgccgcccagaacgagaggctgccgttgcgcgtggtggtgcaagtcctcttcttcgagcaactccagctaagaacctcgatcgcagggtgcctgctggtctcggacaacctcgaaggctccaggcctctgcggagcggcattgccacatccggcgaggctggaggctgggccacggctgtccgagagaaccaggtcctgaaggtcggcatggacaacatgcggacgcggctggccgagctggagaaggagtgctcgagcatgcggcaggagatcgagaagctgggcgggcgcgctggtaagggcggcggtggcgggtgggcctcccgcgtcgtgccccggcgactgggcctgaaggtgaggtcgcagatgtgcagcgcccaggagggctccgtcagtgagcagcacaggagcatgagcgccaagctcgacaagctgcaggctaaggtgtcgaagcagaagaagcagctggccgcggatgcctgaagttgaggtttcgagactccggcttcatggcctgaccttgtaattttagcccggtatcaattgtttttgcctctcttttgttgcctgtgtagctgttaggcgaaacgaccgagtgcagtgtgtcggttcgttcttgaaccgtggatggtaccaagaagaatgggagtgtcctagctaagaacacgaacctgatgtgatcagttaatagtttgttaccggactaaactaggagtgctgcttgactgctagtggtggaagacggcggcacaccgctatcacttggagtgagggttttgctcctactgtcgtcttgcttggttataacttataaatataaacgtcggttcagattcgagtcgggtaaaagtcgggttcttgttcgtttggcatgacccatatccgactcgtatcggatcagatttattcgtgtttttttgtcggatttttttaggttagatcgtttttttctttgcgttgggttttaggttaaaagttataatccgtacgtccccctatattgttgtgggtcggaccacccatgctcatgtttacttggtttggttatatggtcttatttgtttcggacctggggtaggcattcatatcagatgtacgacttcatatgactattttatatgctcagcgtgtcccagacatctgattttaaat

SEQ ID NO: 29667 - DNA, 2030 bp, Zea Mays
gtcaaaccgaagcgtactgggccacgcaaacgcaacgacgctcgcagtcgcagaagaaactgtccagccatcccatccgttccacccaagcacaccaacggtgctgatcccgtcctctctcggcgccgaccagactcgcccgctactcttccgaaaaaaatatcccaaatagttactccactcccctcacccctcccgactcccgtgctctctctctctctctctctcggatccgaattgccagcgcaccagtcgagctcgcgggaactcgccggcaccggcgatggcctccgccctactggccggacagggcggggcgcgccaccacggctggggggagacgcgcgccccactcgcgcccatacctcccaaccctaaccccagccagccccacccgcgcgccgacgggtccaagtccaagccgcgggcggcagcctcctcgccggcggccggatacgtgacgttccgcccggcgtccctgggcccgcgcgaggcccgcgcgctccgggaccgcctcgcgggggagctcacccaggtgcgcgccctcctctcccgcatcgacacctggcagcagcagggcccgccgcccgcggggctccgcggcgaggtgcggaagcggtgcgggcagatcctcaccaggctgcgcaaggacaagcggagcgtgtggttcaacgcgcccgtcgaggtggagcgcctcggcctccacgactaccacgccgtcatcaagcgccccatggacctcggcaccgtcaaggagggcctcgccgccgggaggtacgcctcgcacgacgacttcgcggccgacgtccgcctcaccttcaccaacgcgctgcggtacaacccggtcggccacgaggtccacaccttcgctggcgccctcctcgcctacttcgagaggatgtacaaggaggcgctcgcctgcttcgaggaagactgcaaacgccctgagccgccaaggccagtgccgcctgaattgacacctccacccgcagctgagcctgttgaggccaaggttaagccgagggcagggaatgtgaggatgcggaagcccaaggccagggagcctaacaagagggagatgagcctggaggagaagaacatgctcagggtggggctggagagtttgcccgaagagaagatgcataatgtgctacagattgtgcgcaagaggaacaacaatccggagatgctgggggatgagatcgagcttgatattgatgagatggatgttgagacacagtgggagcttgatcgtttcgtagctaacttcaacaaagcgctcaagaaatctcagcgtgctgtggtgatgaatggtggcgccgctgatgtaaccagtgctgctgtggctgagaatgacactgcacctgtcagcaatgtgcttacgttggttgacaatgatgatgtggagagagagaaacctgtgaggagcgctacaatggctgagcaggtggatgagtatgttgatattggggatgagatgccaacagccacttaccaatccatggaaatcgagaaggacgctgaaggttctgagtcgaggagctcaggggacagtgcctcaggagctggcaatgctcattctttggcttaacactaggatttgaaaatttggatgatctgagttctgttgttgggtgatttacgtagagctagtggtaattgtaagtatgtagctgtttctgagacgtgggtgtgcgtaggcttcgattacacagttagtagtagataacaaactggctttgtgggtgtctgttagcaccatgtgtatgtaagctggtggtggaaggtattggggtgttaaaagtagttgatcgaccttctggtatggagggggccagggctagtgtttgtgttctttgtagtacaattgttctggtgcagacctcttatgtaattaatgatttgtgcatgacattaaagtatggttgtataagtaacaatgcagtatcttttgttcggtgatggtttttgacctttttcggataggcctatgcaagatagttttcaatgaccatgcaaatatgtattca

SEQ ID NO: 29668 - DNA, 2182 bp, Zea Mays
cctcactaggaatgagcaagagaagcagctggagtgcattttagtatctatcctgaaattatcaaaagaatttgtagacattgaggaaaaaatgtcagtggaaagaaatgagaacagatgattgaagcgaggcgttctgagctctaaaaggctgaagccaaggttgtgatattgggcgacaagatcgctgcgcacttaagcctccttcaaaagatatatttggctcttgatgcttactctcctacattgcagcagcatcctggtgggttcgagggttttctcgacctgcgtgagaaggtcttcttcttattaaaatgcccgggggctgtcttacccccacaggtcgagtttcaggccgcagcgcacaggagtcccgatctcgactcccgactcgaactcgacgactcccagtcccagttcctctcgtccgcaaccgcaaaatccaagaccctggccgccggagccgaactggcccgcgcctcgggccctgcccgatttgtgtgctttgcggcctgtgggcatgctagccagccggcggcggcaccggagtccatagcagcaaccacgcggctacgagctacgacgggctggctaaggcgcaggttgagcgctgaaggctacccagctgtggtctcacgcgggtggccggtgagagcagccaagcggcagctactttccgtcgctggctagagtcctactctttgtcaaattctaggtgcgctggacgctggacgaaccctaccacgcgcaccgtcacgttgtggtctgtctctccctctacctccattcccccgcgatctcggtttctgttcaattttcgcgctcccttcccctcgcatatgacactctgtgacattgcagaattgaatcactctctgttgatgggcagcctgagcgctccgccagtgctgtcgccgctcgtttctgggctcatcttttcatctgacagagtcctcaaatctagagggttaactaccagtagcgtgatgaagtcatgtaggctatccgagctcagcaatgctgaggttagcagcctcaaggctcgtcctcgcatcgattcctcgtccatgtccatatttggcacggtgaatccaattgttgagggtgtctgtgtcagaggtgatgcagcagataagcagtaccaggtgaaaaactgcagatggaggccaacttttgccttggagactgatgggccatctaacactgatggccaagactttgatgaggacagtggttttcttggtaggactagactgggaagactcatccaagctgctgcaagggagctacttgacaagctgaactctgcgagaaccaattcgccaacaaagatattccttgtcctccttggtttttacacagccaatgccttggcaacaatactagggcagaccggtgactgggatgttcttgttgctggtgttgtagtggctgccattgagggaattggcatgctcatgtacagaaaaccaattgccaggcctcctggtaggttccaatctttgatttcaatggtgaactactggaaagccggtgtatgcctgggcctttttgtggatgccttcaagctgggtagctgagtttatacaatcatctgctgctatctgcctatggtaattttttgggtatattgggatcacaataacgccatgatatggttccatgatggccattgctcgttgctcgaattctaatagctgcatttggctctaattctgggagcattggctgctgaggtatcagatttcttcaaagttaatgaagatgtttggagcagatattattctgaggtgactattcatttttccataatcgaaggccatgtttgtcaaccattgtttggcccgtaaactgtagatatgctgtagtttttccacctccatgtcatttagccctaatatgcatttatgcgtactgagagaagtaaaaaaaaaaaaagatgtgctgctttaagggcatgtttgggagcaaggggatattgaatagcaatgggattttagccccttcaatccccttgctccttagataggatgtatttcttctacggatatatggtacttgtacgtgcgtgtcagcatgtgatgagttgaatacttctttcatccaggattattctatatcttgcactatatgtcattgttaccaaaaatgttttctctcttcaaccatatgaaaaagaaaa

SEQ ID NO: 29669 - DNA, 2198 bp, Zea Mays
ccacctgtcagtcaacctctagcctgtaacccgttccccaacctctcgcgttcgtgtccatcttcgaattcgagctcctccatcttccttcaccctcctctctctcgctgtttgaggagaactacctgctcctgctccctcttccgctcctccgcgctcccgctcgccatccccaggcttcatttcggacggggatggacgactacgcccgggagatgatggagctgaagacgctcgtcacccgcaccctcgagaagaagggcgttctcgccaagattagggctgagctaagagcaagcgtgtttgaagccattgaagaggaggatcgggtgatggagaatgatgatggcggtaatcctgctttgcttggtagctgtaatgaccgggctaagcaactgcatgcttcaccttcagagtgtaacctgcccaaggacttctggaagaatgaactgaaagacttctctaacaaaagtggagctgaagggagcaggagtgctgaaagtggtccactgcttttagatgttctcgaaggttatctgaaatatgaggtttatctcttgcgtgatcattaacagaagcaaaaatcatccttttgtttctttatgttttccgaaaaagaaaaaagggggaaagctccttgtgtagtgtgcccaattcttttgtccctactctagaaaactgtgtagtcctgtatggatcaaggtaacaaatctctggctataggtaccgctatagtcagttctagctgttttagacactacaccactatttgtacccacattcatcttagcctgttttagccaggtattagccttatgggaactctgcaactagtatggatcctcttatgcattatgttcggtatgcagaaaaggtagtatattgagttggagcaataatccttcatattattggcgtcttgcttaatcgatctgtccaaaaaattggattgtttgccacaactacaatacgcatcaaggtattgccttagaacaaaaagtaggtgttattattctggaagcttagggagataggtttatcaagatcaagcacatcttcacaatttgtaaattttctagaagctgaaatattttgagaatgtagatcaatgattcttggaataaaccagaatggatacaaattgatgtactgttctctgagtttggtcggttgttttacactgcatgcatgagatttatatttacagtgcatcatcattatcattgtactgagatccgcttatatgtgatttttttcaatctcaacttattgatgaaaggcctgtactcaaggtctccttttgatggtatgtggtgcatttatgctgctttcttcctatgacctttagttcactgcacacacaaaacttgattcttttttccagcttgactttcactgtccttgagcaagtaaagttgatttgcctattatacttcattaatttacattttttatattattaacctccaaatacagtcagtatgctctagtttaagttttggttttctacagcatgctgtggtcatttaatcatattgttttggtcagaatttgtctcaagcaaggatgggcggcaggaggatgatgagttcagaatctgatccatcactaaatgctgaacatcggagcatgaggagggcaccatcagcatcagttgggaatctgcctcctatggggagacctatctcttcttcgcagcaggcatcagatcgcagaggggggtcttcagtttccaacacaaggaaagatgagtacaactggagatacgataccaccgatgatatatctgaagaggtgctgcgggcatcgactgccctagaaagtgttcagctagaccgcaaatctcggaatctgccgacatcttggaggcattcaggggatggcgccgagtaacaagaaggctttggagctggttgcttgacttgaccgaccctgtatcatgtaatttgtatgccactcatttgtggtgcttggattgctgctatcttagaaaaagaagtggtaaactggttatgtatggttgtcttgtaacgaacaaaacaaatcaaagagttaggtgccgtttgttttacatatttgtaacgtgatgggtaactgtgatgggtaactgataacgttaaaccatgtttgtttaagtccaaccgtaatcagataccacattaaaaattaatactagtttattcaaacttattatcgct

SEQ ID NO: 29670 - DNA, 5106 bp, Zea Mays
tggctggcttgccgctgctcctctcctctcctctcctcgctagctccccccaagcgagcacgccgcccaccacgatgccagcgcgcacgggagccggctgctccgcctccgcctcctctccgctcccgcaccactagcgcgggagcccgatggcgagcagcagggggaggctgaggctctccccgcgcgcggcggcgccgcagctggacgcgggcaagtacgtgcggtacacggcggagcaggtggatgcgctggagcttgcctacggcgagtgccccaagcccagctcgctgcgccggcagcagctcatccgggactgcgccgtcctcaccaacgtcgagcccaggcagatcaaggtctggttccagaaccgcagatgccgggagaagcagcggagggagtcctctcgtctgcagaccgtcaaccggaagctgggtgccatgaacaagctgttgatggaggagaacgaccggctgcagaagcaggtgtcccgtctcgtcttcgacaacggccttctgtagccaccaccgacacaagctgcgagtctgtggtgacaagtggtcagcacaagcagcagcaaaacccagcagttctgcatcctccacaaagggatgcgaacaacccagcaggtctactcgctattgctgaggagacattggcggagttcatgtccaaggcgaccggaactgctgtcaactgggtgcagatggttgggatgaagcctggtccggattccgttggaatcatcgctgtttcgcacaactgcagcggcgtagcagcacgagcttgcggccttgtgagcctcgagcccacaaaggttgccgagatccttaaggatcgcgcatcgtggtatcgcgattgtcggcgtgttgatatcctccatgttatccctacgggtaacggtggaacgattgagctgatctatatgcagacttatgcactgacaactctggcggaaccgcgcgacttttggacactacgatacactagtggtcttgacgatggcagtcttgtgatctgcgaaaggtcattgacccactccactggaggtccttctggacctaaaactccagattttataagagctgaggtgcttcctagtggttatctgattcgaccttgtgatgggggaggttccatgatttacattgtggatcatgttgatctgaatgcttgtagtgtccctgaggttcttcgaccgctctatgaatctcctaagatactggcacaaaagatgactgctgcggcgttgcgtcacattaggcaaattgcacacgaatcaagtggtgaaacgccctatggtgctgggcgacagccagctgttctcagaactttcagtcaaaggctcagcagaggcttcaatgatgctgtgagtggctttccagacgatggctggtcttctttgttgagcagtgatggtgctgaggatatttcaattacaatcaactcatctccaaacaaacttattgggtctgatgtcagcccttccccattcttttctgccatggggggcggcatcatgtgcgcaaaagcgtcaatgctactgcagaatgtgccacctgctctacttgtgcgatttttgagggagcatcgctctgaatgggctgaccctggtgttgatgcttattccgctgcctctctgagggccaacccatataatgttccgggtttaagggctggtgggtttatgggcaaccaggttatactaccccttgcacgcaccgtggagcatgaagagtgcttggaggttattcgacttcaaggacatggctttagccatgacgaggttcttatgtccccggatatgtttcttctgcagttgtgcagcggcatcgatgaggatgcgccgggtgcttgtgcacagcttgtcttcgctcctatcgatgaatcttttgctgacgatgcaccgttgctaccctctggcttccgtgtgataccgcttgatgctaagacggatgtgccatctgccacacgtacccttgaccttgcttctgcgctcgaggtcggatcaggcggaggtctgtgtgctttaagcgatagcgggtcaggcacgcgcagcacgaggtcggtcctgaccatcgccttccagttctcgttcgagaaccacctccgcgagagcgtggcagcgatggccaggcagtatgtcagggcagtgatggcgatcgtgcagagggtggccatggcgatttctccctctcgccttggcccgcatgtcgaactgaagcatccgccaggctctcccgaggcactcgcactagcttcgtggattggcaggagctacagggcgcacactggaacggagatccgctggtcggacactgaagacgcggcgggctctcccctgacgctgttctggaagcacagcgacgccataatctgctgctctctaaagccggctttcacactcaagttcgccaacagcgccggcttcgacatactggagacgacggtcgcgaacgtccaggacctgcagctggaggcggtccttgatgacgggggacagaaggccctggtcgcacagctccccaagatcatgctgcagggcctggcgtacctccccggcggcgtgtgcaggtcgagcatggggcggcaggcgtcgtacgagcaggcggtggcgtggaaggtggtgggcgacgacggcgcgccgcagtgcctggcgctcatgttcgtcaactggaccttcatctgatgctcctccgctcttgacgttcacagcctcgtgcctcgctcggcagcgctagatcggttgccgcctttatcctatcctatccgactacgtattactagttgctttccgttgcacctgtgtgctacaactgctcgagacaatgcccctgctgtctgtttatggcctaagtctactgtggtggatcgggagttggagaacaatgcccctgctgtctgtttatgtgcctgtcaagtcaacgctggcgagctagtaataattacactgatcaatggcgctggccggcggccagcgccgcagaggaacagcggcaactgcagcgacggatggagatggactactcgggctcaccgcgtactgtgctgtcgtcgtctctccgccgctgctccgtggcgtttaaactccgcccgtgaccgactgaccggtcgatgacgctccattgctgttctgctcgccggggatttccctgatccgtcgggagtcgggacccattcctgcctgcgtcaccacgctcaggctgaaaaaattgctattttgtcactctcaatgtgggctatttgctattatgtcgcctgtgggctgtggggtttgcgcctgcggcctgtcggccgctcccgtcgtgtacgcgacctacctggaccggctcaattgtaacgttaatgggccgaaaagctggcgcttgggcccgactagcccatctccgtccgtccccgtccctcacccgcgactccgcgagccaacccgaccaccacttccgccatggccatgctcgctctctcctcccgccccctctcctcctcctccttcctccgctcgaagccgcgcgcgctccacctccaccgccacctcctccccaaacccctcggctccgcctccccgctcacgccgcctactccccgcgccgaccccgccccggcgccggacgcggaccccaccccgctcttcctccgcccagcgtcccaccgggtcccacgcgccgccctcgccgcgttccgccgccgcgcggccgcgctcgtcccgcccaccgcgccgcacctccaccgccacctccgctggctcctcgccgacgccaccggggacccgtccgccgccaccacctcgtcctccgaaggcccagcgctcctccgcgcgccgctcgaggacctcgaggccctgtggctgcgccacgtccgggagcgcacgccgttccagtacgtggtcgggaacgagcactggcgggacctggtggtcgccgtcagggagggcgtcctcatcccgcgcccggagacggaggccatcatcgacatggtgcgcgccgtggaggacttcgccgacgggtggtgggccgacctcggcaccggcagtggcgccatcgccgtggcgctcgccagggagctcgccgggcaagggagggtgttcgccacggatgtcagcgaggtggccatcgacgttgcgaggctcaacgtccagaggtacggtgtgcaggataaagttgaaataaggcatggctcatggtttgaacctctggaagatttgaaaggaaaacttatgggtgtgattagtaaccctccgtacataccaaccgacgacctacctggtctgcaacctgaggttggttggcatgaaccaaagttggcgcttgacggcggcaaggatggccttgaacatctgctgcatctctgtgaagggttatcctcagttctgaaacctggaggcttctttgtttttgagacaaatggcaacaaacagtccgagctccttgttgatttgataagcacaaagtggagttgttcttttcacaatgtcaaagcagttttagactttgcagacatcaagcgttttgtaacgggatatcgaagatgaacaataaagcacagatgtttgtgtaatcatttggagacatgttttgtttccttcttacttaaggacctcccccaattgaaaaaaacgagatcagtctgggctggcttgggcagaaagcgaacaacacatgcagttgccccctttgcagagctcatcgcttggagttaaagcctgctggtggcaacaatatgtctcagagttaatcataaattcatattcgttaaaaaaatgtatcctctaggcatgcgaggtagtaatatgtttgtttggcagagccaagctgcgcatccaactgctcaagaaagctcgacggcagtagacgagagagagtgctgtggcagttgggctttcaggagactgtagctcgtatgtatctggccactagttttctggccgagttgggtggtgattgtgatttaattaaagtggaagcttttgtgcctgccttccaaaattattccgccgtccacacgccaccttgcgtgtttcattattgatggcgtggtccagttttctgtttttatttctttctgtctttctttcttgcttacttatgctgaagccatctccagagctat

SEQ ID NO: 29671 - DNA, 802 bp, Zea Mays
cgctattgtcgcgggaactgttgccatccctaccctatggttccgatgaagcgccagaaaagagtccacatgaccacatcggtctctccggttctttaattgcgcgccaatctgttttatatatacggagagagcactcctgttttgttgcaaattctattactagctgcaaaagggcgtgtttgagactagcggaccgaccttgaagttgaagttgaaaaggtcggcctgcgcggcgatggatgtcaagtgccggcgtctggaggggaaggtggccatcgtgacggcgtccacgatggggatcggcctcgccatcgccgagcgcctcggtctggagggcgccgccgtcgtcatctcctcccgcaagcagaagaacgtgaacgaggcggtggaggggctcagggccaagggtatcaccgcggttggtgccgtctgccacgtctccgacgcacagcagcgcaagagcctcatcgagacggccgtcaagagctttgggcacatagatattcttgtctccaatgctgccgcaaatccttctgtagatagcatacttgaaatgaaagagtctgttctcgataagctgtgggatattaacgtcaaggcttctatccttcttattcaggatgctgctcctcacctacggaaggggtcatctgtgattattatttcttcaattgctggttacaatccagaacaaggattgacaatgtatggtgtcacaaagactgctctctttggtctcacgaagggatgacacgtggctttatgtcccatttgcctttcaccttggtattgtgaagac

SEQ ID NO: 29672 - DNA, 5770 bp, Zea Mays
ctgcattgctcgcgtgtgttctgtctgtcactctcgcccagtcgccctcctcttgctctccgacgactggtgggccgccgctgccgccgccgccgccgccgccctacgccaggtgctgaggctttcatcggtctcttcgccggtgtctttgccggcgtcgagcacccgccaggctatccatgatttttgcctacaaaaggtgattgaaaaggggggaggatggaaggggagggacaccacggagttgttttggcatgcagcatctgtgggttcctcttcgctgtccttagccctttcagcttttgggttttatgggctgtgaattggaggccatggaggttatacagttggatatatgcaaggaaatggccaacatatgttcaaggacctcaattgagcacactttgcagccttttgactctttgtgcatggcttgttgtcatttcccctatagcagttctgctcgtgtggggaagcgtccttattgctcttatggaaaggaatataattggtttagctgttataatggcgggtgttgctttgctcctgtcattctactctataatgctctggtggagaacacaatggcaaagctcccaggctgttgcttaccttctcctcctggcagtatgcctgctatgtgcctacgatttttgtgctatttatgtgacagctggtgctagtgcttccgagcttaattctccatcagggttcttcttcggggtgtctgtaatatcattggccatcaatatgctttttatatgtaaaatactgtttaatgtaagtggatttgatgttgatgaatatgtgcggaggtcatacaaatttgcctattctgactgtgttgaagtggctcctgtttcatgctctcctgagccaccggatcctagtgaattatacatgacaaaatccagcagggtcaagcatttagggcttctgtacattagctctctgcttgtgcttgttggttattccatcttgtacggtcttacgtcaaaagaagctcgttggttgggtgctttaacttcagttgcagttgttatccttgactggaatctgggcttatgttcatttagatttgagcttcttaaaagtaggatgatagtgttatttgtggctggaacatcaagggctttccttgtatcctttggagtgcattactggtaccttggccattgcatcagctatgcttttgtagcatctgtgcttttatctgctgctgtttcttcctggctttctatttcaaacccctcagttgcaaggatagacgctctaagaagtacggtaataaagctacgagagggatttcgaagaaaaggacaaaatagttcttcaaattcatcagaaggctgtggctctagtgtgaagcgtagtagcggtagtgttgaagctggtcaaaatggtaatgcaatggattctatgtacagaagcaactcacaaagcgatggtgtcaattggagcagtattccttttgatcgatcaaacagttgtcaagaaggccggagctccgacaagaacatagatagtgcacgtgcaagcttagctcatcggagtaattcatgcttatctgccgtccaagactctgaaaccgctgttgtttcagtagataggcatggagatcccattacttcacttgtttgttctagcagtggtttggaaagtcatggctgtgagcctagtggatcagccaccacctcaggtaatcaacagctattggatttgaacctggcagcgatatttcaggacagattaaatgatccaaggatttcatctatgctaaaaaagaatggtggacttggagatgtagaactggctaatcttcttcaggataaaggactagatccaaatttttcgtacatgctgaaagacaaagttatggatccacgtattttagctttgctacagaggagcagcttggatgcagatagagagcatcaagatgacgtagatgtcacagctactgattcagatagattggataccactattgcaaatcagatttctctgtcagaagaactaaggagaagtggtctagaaaaatggttgaacatttcaaggctaatattccatcatttagctggatctccaatacgtgcttttattgttttcacagtaatgtttataatagagactgctactgtggctatctatcggccagagaccatcaaggtgataaatgcaacacatgaacagtttgaatttggtttctcgatactgcttctgtcaccagttgtctgctccattatggcattcatttggtctctgcgtgctgaagaaatgttgatgacatccaagccccagaagtatggtttcattgcatggctactgagcacatgtgttggtttgtttctctctttcttaagcaaatcatctgttatattgggcctgtctctcacggtaccacttatggtggcttgcctctcatttgctgttcccatatggatacgcaatggttacagtttctggattcctggaagggagtttgcaaatcgtgaaaatgttagtcaagctccaggagagaaagagcgggctctctttgttatcaccattgctgttttcactgcatcaattattggccttggtgcaatagtgtcagcaaagcctttagacgctctaggctataaaggatgggatgctgataagaacagctcctattctccctatgcaacatcaatgtatcttggatgggcattgtcttcaacaattgctgtgattaccacagggttgatacctattgttgcttggtttgcaacataccggttttcaccttcatcagctatatgtgttggcctctttgcaactgttcttgtgtctttttgcggtgcatcctactggggagtggtaaattcacgagaggatggtgttcctctaaaggctgatttccttgcagcattacttcccttgctttgcattccagcatttttctcactgttcactgggctttacaaatggaaggatgatgattggaagatttctcgtggtgtttacctttttgttggcatgggaatgttgctgttgtttggtgcagttgcagctgttattgtcacaatcaggccctggactgttggagttgcttgcctcgtagccattctgttccttgtatttgttattggggtcatccactactggacatctaacaacttctatctaacgaggactcagatgttgcttgtttgttccattgcttttctcttagccttggctgccttcctgatgggtttatttcacggaaagccttttgttggagcatctataggttatttctcatttatatttcttctcactggaagggctttgactgtccttctatcaccgccaatcgtagtgtattcgccaagagtattgcctgtatacgtttatgatgctcatgcagactctgctaaaaatgttagctatgcctttcttattctgtatgggattgcattagcaactgaagtttggggtgttattgctagtctaataatgaatccaccatttgttggggctggcgtttctgctactactcttgtaattgctttcagttttgctgtttctcgaccatgcctgactcttaagatgatggaggatgcagttcattttctcagcaaggatacagttgtgcaagcgatgtcacggtctgctaataaaactagaaatgctatatctgggacttactcagcacctcagaggtccgcaagttctgctgctcttttggttggagatcctgctcttacattggacagggctgggaactttgtgcttcctagggctgatgttatgaaactgagagatcgtttgagaaatgaagaaattgctgcaggatctttcttatgtggagtaaaagattgtttactaatttgcccccagtccctgtcaaacatagattatcggaggaatatgtgtgcccatgcacgtattttggctttggaagaagcaattgatacagaatgggtgtatatgtgggacaaatttggtggttatttacttctgttgcttggattgactgccaaagctgaacaaatacaggatgaagttcgtctaagactctttttggatagcataggcctttccgatttgagtgccaaagaaattaagaaatggatgcctgaagatcggaggcaatttgagcttattcaagaaagctacataagggaaaaagaaatggaagaggaggctttgatgcaaagacgagaggaagaagggaagggaagagaaaggaggagggcattgctagagagagaggagcgaaaatggaaggagctcgaaatatcattgctttcttccattccaaatactggaagcagggatgctgcagctatggcagcagctgtcagagctgttggaggtgattctgccctggaagattcttttgcaagagatagggtctcttcaatagccaatcacatacgaaaggcacaattggctcggcgagcagaacagactggtattccaggcactatatgcatactcgatgatgaaccgaggagtactggtcgtcattgtggagaacttgacttgtgcctctgtcaaagtcaaaaggttactttgtctattgctgtcatggttcagcctgtatctggcccagtgtgtctttttggaagtgaattccaaaaggtttgttgggaaatcttagtggcaggatcagaacagggtatggaagctggacaagttggtcttcgattagtaactaagggtgaaaggatgactactgttgctaaagagtggaatattggtgcgtctagtattgcagatggcaggtggcatcttgtcactgtaactttagatgccgacctaggtgaagcaacttctttcattgatggagtttatgatggatatcagaatgggttgccgttgccaacagataacggtatttgggaacctggaactgatatttgggttggtgctaggccacccatggacttagatgcctttggtaggtcagatagcgaaggttctgactcaaagatgcagatcatggatgcttttctatggggaagatgtctcagtgaagatgaggttactgttttacatactgccatgtctcctgctgagtatggattttttgaccttgcacccggcgatgcttggcatggaagttattctgcaagggtggatgactgggaaagcgaagaagcttatgagctttatgatcaaggggatgtcgaatgggatggacagtactcaagtggtaggaaacgtccggtacatgatgctgtagctattgaccttgactcctttgctaggagaccaagaaaaccaaggtttgagacacgtgatgaagtcaaccagcgtatgctttctgttgaaagggctgtcagggatgctcttatcgcgaaaggagagagaaacttcactgatcaagagttccctccagaggatcgttctttatttgtagatccgatgaatccacctctgaaactgcaggtatcacatgcacatctcttgctcttgtgaaaaatattggttaagttcctgacatgttttaatttgtgagtttaggttgtttctgagtggatgaggccttctgacatagcaaaggatatatctatcagttgtcagccttgcttgttttcgggttctgtgaattcctcagatgtgtgtcagggtcggttgggagactgttggttcctaagtgcagtcgcagttttaactgagatgtctcggatatcagaagttataatcactcccgagtacaatgatgaagggatttatacagtcagattctgtattcagccatgctggagtcatcttggatgtgcactgctctatggagatatatactgcatgattg

SEQ ID NO: 29673 - DNA, 1598 bp, Zea Mays
gtcaaagagatagccggaaagcccgcaaaaacccttgtctgccaactgctgtctcgcaagtcgcaacggctgagtgcgcgcccatcagtcccgggttcccgccacacccctcccatccccctctcaatcctgtccccaaatctctctcttctctctagcggcgaggcgaggcggtgaagacgagcgagcggcgaggatgttgtgggtagacaagtaccggccgaaaaccctagacaaggtcaccgtccacgaccaggttgcgcggaacctcagaaagtgtcggagcaggattgcccgcacctgctgttctatgggccgtcggggtccgggaagaaaaccctaatcctcgcgctcatcaagcagatgtttggcgccggcgcggagaaggttaagctggagaataagacatggaaaattgatactggaacaaggacacttgagatagaattggcgatgttgtcaagtgctcaccatgtagagatgaaccccagtgatgctggctttcaggacaggtatgttgtccaggagatcattaaagagatggccaagaacaggccaattgatgccaaaggaaggagagcatttaaagtccttgtgttaaatgaagttgacaagctctcaagagaagcccagcattccctccgtaggactatggagaagtatagctcatcatgcagactgatcctatgctgtaacagctcctcaaaagtgacagaggctgtaagatcccgttgcttaaatgtgcgagtaaacgcacccagtgaagatcagattgtccaagttctagaattcattgggaagaaagaaaacctgattcttccagctggatttgctgctcgtatcgcagcacaatcaaaccgtaatctgagacgtgctatactgttttttgagacttgcaaagttcaacaatacccatttacatcaaatcaagtggcgcctcctcttgattgggagcaatacgtgtctgaaatagccacggatatactgacagaacaaagccctaaaaggctatttgatgtacgccagaaattctatgaattactcgtcaattgtatcccacccgaaagtattttgaagaagttgctagcagagttactgaggaagttagatgctgatctgaaatatgaaatctgtcgctgggccgcacactacgagcacaagatgcgccttggatcaaaggctatttttcatctggaagctttcgtggccaagttcatgagcatttacaaggagttcctggtggctacatttggttgagcaaaacctcgagctacaattagggttgtcacgttctgtcaggggctatcgcattgtatcggtatagttttgtactaatctcgtcagcgactatccttctgtcaacccgggtgacccctctgacttcatcatagcgtctgcttgcacgttgacgttcgtgacgacattatcagacgtcattacgcttggttaacaaacagcctgaaagcgggacaggctcggaagttagaaataacagcctgtgaagacgtagacgttgatgacgacacgataagaaatcatttcgctcggttaaagagaatatccttaatgtgcggcagactcagaattcagaaccaaat

SEQ ID NO: 29674 - DNA, 1945 bp, Zea Mays
cgcgttgcgttaggctagatccgctcccctgcaggccacgccttctcgccgctcgcggaaccaccgccgccacctcaccactccagctccagcccccgcccgccataatcgcgtccccttctcgtccttccagagcttcttaaaccacccggcccgctcccagcgtcccttctccgcccacagccagcggcgaactcgatcgagcaggatggggtttatcggcgcgcacggcgtggagacgctgaagcggtataggtacagtggagaggaccgctcggtggtggccaagtacgtgctgcagcccttctggagccgatgcgtcactctcttcccgctctggatgcctacatggttatgctttccgacatttcagatcacacttacaggattttcgtttctagtactatcagcgctgcttggctatatatgttcgcctcaccttgacactgctccccctaggtgggtccatcttgcccatggattacttctcttcttgtaccagacttttgatgctgttgatggtaaacaagcaaggcgtactagctcatcgagtcctcttggagaactttttgatcatgtttgaagcattggcccttggaagcaccttgatgtgtggaggatggacactttgtttctgggtagttgccgctgtcccgttctatcttgcaacctgggaacacttctttacaaatacgctcattctgcctacaataaatggaccaacggagggcctgatgctgatctatgtatcacatttgtttacattttttactggcgctgaatggtgggcacaggattttcggaaatcactaccctttttcggttggattccacttccatttctttctgaaattgaaattcctttatatgttcttgtgctgattcttatgatcgtatgtgctgttatacctactgttagatccaatgtcagcaatgtccaagaggtagttgaggcacgaaaaggaagcatggcattagcattagccatgatccttccttttattgtactgttagctggagttgctatctggtgctatctttctccttcaagtataatgaggaaccagccacatttgctcgtgattggaactggctttaattttggatatttggtgggaagaatgatacttgctcatttgtgtgatgaacccaaaggtctaaaatctgggatgttcatgtctctggtgtttctttgttttccaattgcaaatgctctcattgcaaagatcaacgatgggagtcctttagttgatgagcttgttctgctgctgctttattgtgcatatacagtgggtctctacctgcacctcgctgtgtcggttgtgcatgaaatcaaggatgcccttggaatctattgcttcaggataactagaaaggaggcttgaactttgtagtgaagatatattattattacttcacaagtgctagcgaggagcaacacagttcgtcaccgtgcacgctgggagtgtgtgtgcccctctgaaatgccacagccatctgtttgttgagcagagggatctagggattgtattgcgcagttatcttggtcatataacaatatagcagtgtgatgtacactgtagtagggtcgttagaagatatactgtgaaaaacttgcttggagaaagtgatcgtagcatgtgattatcttgggatttttggccaagcctgagcctgacggctgaacgcgtcggccggcccctgccttctgatagctcgatagcagtcgacggcctcttctccgtctcgtggggcgtttgcgtcgaggaagaaacaacaatgcagcctttaagccttcaattctcaggcccagtttgctgctttgcatgcttgttcgtctctcaggctcttcacggtcacggcgcagcgacctggcatgttaaaaaaaatgggccgatatatatatcatgtgcaggttttctttaccacaaaacttttgcctagc

SEQ ID NO: 29675 - DNA, 2414 bp, Zea Mays
ttcgaacccacgacttgatgacttagttgaaggaaatggaaagcaagaatagtaagctactccaagcattacgaagtgctggtgctgataaaattattgaagcataccactgggtgcaagctaacaaaaagaatctcaggcaagaagtttacgggcctgttctccttgaggtaaatgttcaggataagcttcatgccacttacttggaagaccatgttccaaactatttatggaagtcattcatcactctggatgcttcggaccgtgactacattgctagagaaatgaagcagtatggcattcctgttctgaactacttagtgcgcgaaggcacaaggagacggccattaaacatcactccagagatggagcaacttgggatctactcccgacttgatcaagtatttcaagcccctgacactgtgaaagatgttttgattagtcaggcgggtttggatgattcgtacataggtacagatgaaactcatcgcagagcagatgaggtgtcaaagctaggcatctatgacttttggactccggataatcattatcgatggtccaaatcaagatatagtggttatatgtcagcatttgtagatgcaatccatccttctcgtctcttcaagagcaatctggatgtaagcggcattgaagatcttcgacttcagaaagaagaccatgtaacaaatattgaaggaatgcgtgaagctataaagacgcttcatagaaaacagagacagttagaagacgaagaggcaaatatacacaggcagaaggaagaaattattaatgcgatgagataccacaagaagacacgagaagagatacaaagacgtgttgatatcaaaaagcgaatactgaaggacatatccagagaagacgatgtagaatccagcacgagaaagcttgttaatcaggttgctaagataaatgatgagaggtttcatgcaatgataaaacttaaggatttgcttactgaagctgttgctctcaaatggagtcacacagaaaagaatatgactttaattgagctcgatacaaagatatgggagatggaaaagggtgtgaaaaaacttgaaaaggatgctaatcaggcggctagaaactacgaagattgtaaaagaatcactcaggagcataggcggaggctgtctattgcaaaacagaatgcagagtcgatagccatgattactaaagaccttgaaaaagagttttgtgcgatgcccactaccttagaagagctcgaaactgcaatacaagatactgaatcagaggcaaattctatgctatttcttaaccaaaatgttttgcaggagtatcaaaaccggcaacatgagatagaatcaatctcaaataaacttaaggatgataagggtgaacatgagatctgctgttctgaaatcgaaacagtaaagggtaaatggcttccgactctgcggattcttgtttcaaaaataaacgacacattcagtcgtaactttcaagaaatggcagtcgctggagaagtttcactggatgagcacggtattgattttgatcactatggtattcttataaaggtgaaatttaggcaaactagtcagctgcaggtgctaagctctcatcaccaatctggaggggagcgatctgtatcgaccatcttgtatcttgtgtcacttcaagatcttaccaactgcccttttcgggttgttgatgagataaatcaaggaatggaccccataaacgagaggaaaatgtttcagcagcttgtcagagctgccagccaaattaacacgccgcagtgcttccttctgacgcccaagctcctacctgatctggagtacagcgatgcctgcagcattctcaacattatgaacggcccatggattgaggagccagcaaaagcttggagctccggtgattgttggaggacagtggtcagcgcagctggacactgagcgccgagtattttgccttggaccgtaggaggcttgtaaagtttagcgtgtagagctggatgcagcttttgggtggttaatttaagtttgtagttgtactacatgtaagtttaggaaagttaaggtagctggtggcattatcaatgtggaaccagatgttgagctgctcaaatcacttggcagcccttttgacacgggagggtaaggtactgtggaatgatccctaccctgtaccggccagtattcctggaagtgaccagtttacttaagtaattgttttgcagcggaaaagcagcaggcatgcaatgtctgtctacttgctgtgacaagtctgactcctttagggctttagtacttttgttaggagtagagatggaaggggattaaattaattggtagtaaaaaatgaataggaacggatttaatctcaatctccttcgattcaatgcaagggtgctgtttggttcaagaaatgta

SEQ ID NO: 29676 - DNA, 2614 bp, Zea Mays
caggacgacggcaaatccgcccacgcaaaatatcagcccaagtgcccatcgcccaagcttcctagctcacccgccgccacccactagccaaattccccatccctctcctgccgccacccatcagccacatctctccctcctactccctctccggcagccatcatcagacaagatccctcccccaccatcgagccatgtcgagtcgagtgcatcttctgcaagcacggccatcttacgaaaccctagctggctcgaaggaccactactgtccggcgccctgaacaacttggcatgatgccgacgaagggtggagcaaacaaatcacaatgacatcgggtagtagatccaccattgcatccctatgaagaggagcgccttagacaatgtatgaggaacaattcgaggttgcaacaacttggaattcctgctttagtcagcatgtgtgggaacataaattccatctctaggaacaaaaagccaaataacagggataatgaagattctgaatctgagtatgatccttcacatgacgattctattgaaggggatttgtttgaccatgatgatcataataagggctcaaaggacactaacagaagaactattcacatggctcctggtggaatcaagcctcgaactaagagagtttatgcagagcaacatactactagaaatacaaggtcaaagaaaagcattgctcagcctgacacaagtctaacacgaagtgacatctatgtgccaccaccctcgctatctcatttgacccaagttggagaagttgctcgtagcattgaaaaccatagaaagactagtgttgaagctaatggccctacccaggttgacaacacccacatggccaatcgagaagatggctttgaccaatttgatgacaacatgaccaaccaaggggaaggcattacccagcctggtggaaaaggtgatggtatatttctatatttaccatattgcatattacatcactagttgcttgctaaacctatcatgtgtcattagtttctactttactggatgttcttttgaccttttcaattagattcatgtgccatgtgtcattagcttgtcaatagtccattggatgatcatctttgatccatgtttgatgcacctcacttattgcaatttctatgtgaatctaaaactaggagtaaatcagcatagagaaaggggacttaatatgggacttggtctccaaaggatgaaccgagctcggcgtggcaaactgccaattgtcattactgaaggaaggataaggcctgtggcaccaattgttgctgcaaagtttgcaactgagtgcaacattgcagttcggaatcatgtgcttgtgcttaagtcatggaaggaatacgagaagcatcctgggctctttaaattgtttacagcaaaacttagtgcaaagtttgatatcaatacagaagatgcgctagttaaaaatgcttgtttccaaatgatgaggaatgcactgcgccaacaacgatataagctgaagaaacaatattttgacccttttccgctacatctagtgaggaaaacatctcctatcaaatcgacaagtgatgaacaatggaatgaccttgtggaacattggaaaggtccaaaaaatatggcgacatgtgaacataacaaaggcaaccgaggcaaagttaagttccatcaaacaactggatctcgtagctatatggttcatgtagaaaatttgggggacaagtacatggatcaagaacctgatgcattggatctgttcaaggagtgccactacagtaagaaaaagcaaggctacacttccactgtacaactggctattactcaaatggaagacaagcgatctacaccaggagaaggtgaacaaccaatgtctacgactcaggttgtagctgatgtgcttgctgagaacacaaagaagaatcggtttcttcaaaatgtgggaatccaaaatgcacgacctagatctagtgtacaaaatattgaagcacaacttgaagtagagaggaaggcaaatgcagagcttcaatcacttgtcagcatccaacgtgagcgcatggatgtattattaaagcaagtgcatgaagcagaactggtaaggattagagagcaagaagagatgaagaagaagcaagatgccatggatgctcaacttgagcttatgctaagtcagattcaaccaagttaaagctaactagtatggggtgttaggctttgttggtacttctcttttgctgatgctattgcattctattgatggataaatacgtttcaatccattttttgtctattgtgctgctagagtagctttagcggcatgtgtggtgtgttggagtggcttacgtgtcagtggttggatacttgctgtaatgacatgctattggatacttgcatgtaatgacatgctggagtgtggtcagtattttttgtgatgagatgctggattaaaatctgagttgtgatgtaatagaattcaacattttgtcattatgttctggattataattaatatatatttaaattattgtgtttgcaaaagctgcgaagctgtccatgggctagaatgttaattgtaatgggctgaaacaaaatgggcaaaaattgcaataaaaag

SEQ ID NO: 29677 - DNA, 1290 bp, Zea Mays
ggttattccatatattgcgagtcatttccgcagggacaagatatggttgcgccgaactaagcctaataaacggaattaccaagtggttattgctgttgatgactctagaagtatgtctgagggcaaatgtggaaaatttgctatcgaggcattagttactgtgtgccgtgctatgtcacagcttgaggttggacaatttgcagttgcaagttttgggaagaaggggaacgttagtgtgctacacgattttgatcagatctttaatagtgaagctggagttaatgtgatctctagcttgtcgtttgagcaagataacaaaattgaggatgaaccggtgtctgatctcttgacacatctgaatgttatgcttgatactgccgttgcacgggcacgcaccccatcagggcaaaatcctctccagcaactgatactgataatatctgatggaaaattccatgaaaaggaaaacttgaggcgccatgttagagacgttctaaatcgaaagaggatggtcgcgtatgtgctcctggatagccccgaggattctattattaatctaaaggaagcatgcttcagagtaggggagaaggtagagctgaaaaaatacatggattcctttccgttcccgtattatgttatgctacagaacattgaagctcttcctcgcacattggccgacctgcttagacagtggtttgagctcatgcagagcgccaacgagtgacccttgggagttgggagtagtgccacgcatttagctgtacagcaaactacattctagcttccatttttgcttgggcctggacagttctgtggtggcaagcttgattgtgcacaaatgccttcacggttcaaatcgctttcctgaaatatgatctctggtcgcaggcttgattgtctaaaagcatcatcacaattcaaattgtttttgggaaatttgaatagaatttccgctttcctgaaatatggtctctgctcgcaggctttattgtgtaaaaacatcatcacaatttaaattgtttctggcaaatttgaatagaatttccgtgctcaagagttatagtttgttttttttttcaatggagaattgttgctcacgtgctacatgcgacctgagtgtgattgatccttcaatcttgccctgctgttcatcttgtgttgtttgtcatgtttggctttgttgatgtacatgtttcttccactgcatgtgctacgcgttgacgatgtacgcaactgtcgctgccaacgcgaccactttatatatgtgacagtgacacatgccaggggcag

SEQ ID NO: 29678 - DNA, 194 bp, Zea Mays
cggagtttcagaaataataatcataaagtttaatgcagcggaaataactaacgaagaaaaccgagtaatcatggcgaagcctggccacgctactcctcctggtcctctcctgtggaagcaataacccactcgaccgtctatcccggtggcagggatgaaggccaagtcacaccagcaaaaaatcatcctaagga

SEQ ID NO: 29679 - DNA, 3256 bp, Zea Mays
ttccccactgttttataggcagctggtgctcctccgaaagcgaagtccagcgccccccgctcccccgttcgcgcaaagacgccaaacccacccaccgaaatctctccccgaacttacccctcgccggcgccggcgatgtgcccgacgaagcccggtcgccctgcccaggcggccgccggctccggcgagaagagctggcgggagcaggccgtggccgccagctcgctgcggccggtcgacctggaccggggcaccaacggctgggcctcgccgccgggggacctcttccacctgcgcgcgcgcggctacttctcctgcggcggcgggaagcgcggcaaggcgccgtccgccgcggagtggctgctccgccccgccggcgtcgactggctccgctctcacgcgcgcctcgaccacgtgctcgcccgccatgacaaccgcgtcgccgccgcattccgccgcgcgcgcctcaggaacgaccccaccgcgcacttcctcctcgccgtcaatctccaggtgccgggccggccggacgcgtacagcgcggtgttctacttcgcggcggaggcacccatcgcgccggactcgctgctcgggcgcttcgtccagggcgacgacgcgtaccgcaacgcgcgcttcaagatcgccaaccgcatcgtcaacggcccctggctcttgcgcgccaccgtcggcaactacgcggcctgcctgctcgggcgcgcgctcacgtgccgctaccacaggggcgtcgactacctggagatcgacgtggacatcggcagctcggcgatcgccagcgccatcctgcacctcgcgctcggcgccgtcacgtcggtcaccatcgacatggggttcctcgtcgagtcccagtccgaggaggagctgcccgagaggctgttcggcgccgtgcgcatcgcgcggatggagatgggcgcggccaggtacgtggagctgcctcctaatgaggccatgcctgagacggtctgcagcggcagggccggggccggtttcagggtaagctccgggaaggtggataagtttctggttgcacagatccatcaaagtgcttgcatgctgcaaatttctttgcaacgagcacacttccaaatgcaaagcatcgtgtgactgttttgctttaacaccctccatgaaaagctgcagtagcagttaggtaactcagatgctacgtcaacatccactgaaaaaaaggtatggtttttacactttcatacattcaaaacaacctaggtctaacttaactaagtaatcaagcttcactaccagtgaaaccccaacaaaatcacactcacttcatgatcacaacaaaattaactaaattagaatgccctaagcatatcattacattatgctaagacatcttaaacagattatttgtaaaaaaaattaagcataatccatattagctttctctgggccattggtaaaactaagtgcaagatgactagcacaagttacaaaaaaaggaaaataagataaaacaaagggaaatagaagatgttggctttgctctttcaatacaatggcacacagttctcctgtgcaatcaataaaaaaaagaaccagcacagggtacaagtacaacgcactctttctttgcacaatgctacagtgtaaaatcaagatgcaaaatagcatgcccgttttcaggaagtcaaccttttccattattacttcattaaaaatgtaggtcattttaattttgtcttaagccaccaagggcacagaaaaacgcatgaattcttgatcgtgcatttatttggtatgtagatgttaatacatttcctatgaacttggtcaaaaataaatgtttgacataggagaaaactaaaacaacctacattttggaacagagggagcattcaacttcaaattcctttgggaaagaacctatctccattgtcataaagtactacaaatccaggaaaccaccattgtttattcaccagggcttaaagactcaccactcatgtactcagtattaggttttgcttcctagtttggttcgaaataatagccatcacccatcaggagtatctagttctacagtcaggagaagttgaaacactgccaactttggattccagtatgcttctaatatatgtatttttaatatataacctttttttatttggttggcatgctctcacatcttaatggtctggcagtaatccttcctatggcttccatgccatacatttcttcttttgcttattttaaggcaccaaatataaaaagctccttaaccagtgatcctaagctacaacaacacacttttaaaagcccactgaaaatctcaacgccatgtcgccatacctgagtatgcagcaaattcaaaatccaaaaggctgcaacaagaaacaccactagaaattcaaaaaacatggatggcagaatgaatgcatgaactttaggatgccacaccaccaaggtgacatttttgtacaaggtactgtatcaaacatggcacagcgcagttgagacactaaaagttggttagcaaaagagggggggtcaacatggcctcacttttgacaaatactatgaacaacagacagaaaagagtgagccaactgcatgatccgtagttccgtacttcaacttagaagtaacccgtaacccaagtctctttgaccacccagacacaccagtcagcccagaaaagtggtcccttttccgctgaactcgttggtgaccatccatccccacctaggggtgacaatgggctctaaattttacactataagatttaagggtaggatcggattaggatcgtgccctatttctattcatttttaactaaaatttatttagggccctaccattttgtgaaaaagcatttggatcgcgatccattaccacccttatccccacctgatgtccctagcaatagtgatcgcttgtcctcaatatccctaactacttattcttcctttagatcatttcattccgccaaaccatcttctaaattgttcctcacctgtttttaggaggataggaattgaattggatagtagcatagccatagcccataggaatgtgtgtcgatgcatcaaaaataatttgacgcattagtcagagtaacaacgaaaaaataattcacacaaagtgatttaatggtggtggaaaacagaacctcttcttgagtaaagaattaaagtaaaattatgcagaagacataaaagctaacacggagagaacaaattaattgctcaaattggttctttgaatcatgaccttg

SEQ ID NO: 29680 - DNA, 4374 bp, Zea Mays
ccggttcggtcgggccctgcctccgtccgatttgataagccgcagagtttcccactgttcgagctccgcccgcccgttctaaaaccctagatctctctcccctcacccccgtccctcgacccgccgccgagtcgccggaggaggcgggggcctcgccgcagaagccatgtacctctacagcctgacgctacagcgcgcgacgggcgcggtgtgcgccgtcatcggcagcttcagcgggcgggactcgaagaagtccgccgcctccgggtccggctccacgcaagagatcgccgtggcccggggcagcacgctcgacctcctccgcccggacccggagacgggccgcctccgcacgctcctctccgtcgacgtcttcggcgccatccgctcgctcgcgcagttccgcctcaccggcgccaacaaggattacctcgtcgtcggctccgactcgggccgcctcgtcatcctcgagtactcccccgaccgcaaccgcctcgacaaggtccaccaggagacctttggcaagtcgggctgccgccgtatcgtccccggccagctcctcgccgtcgacccaaagggccgcgcgctctgcatcgccgcgctcgagaagcagaagctcgtctacgtcctcaatcgcgacgccgccgcgcgcctcaccatctcgtccccgctcgaggcgcacaagtccaacactctcaccttcgccctcgccgcgctcgactgtgggttcgacaaccccgtcttcgccgccatcgagctcgagtacgccgagtctgaccgcgaccccacggggcaggccgccaaccaggcgcagaagctcctcaccttctacgagcttgacctggggctcaaccatgtctcccgcaaggtctctgagccgattgataatggtgccaatcttctcgtgactgtaccgggtggtggtgacggtcccagcggtgttctcgtgtgctgtgataacttcgtgctgtaccggaaccagggccacccagagattcgtgctgttattccacgccgtgctgacctccctgctgagcgtggcgtcctcattgtcgcagccgccacacacaaacaaaagagtatgttcttcttcctgctacagactgagtatggtgacatattcaaggttgacctcgatcataatggggatgctgttagtgagctcaggatcaagtactttgacaccataccagtgacatcggctgtctgtgtgctgcgctccggtttcctctttgctgcttctgagtttggcaaccatgcactttaccagttccgtgatattggtagagaagccgatgttgagtcatcttctgcaacactgatggagacagaggagggattccagccagttttctttcagccaagggcactgaagaacctcatgcgcatagatgagattgagagcctcatgccagtcatggacatgcgtgtcgcgaatttattcgatgaggaaacaccccagttgttcactgcctgtggccgtggtccacgctccacgttgcgcatcctgaggcctggccttgccatcagtgagatggcccgatcaatgctgcctgctgagcctattgctgtgtggactgtcaagaagaacatcaatgacatgtttgatgcttacattgtagtgtcctttactaatgtcacgcttgtgctctctattggtgagactattgaagaagtcagcgacagccagttcctggacacgactcactcccttgcagtcacgctccttggtgaggactctctaatgcaggtccatccaaatggcatcaggcacatcagggaagatggccgtgtcaatgagtggaggacgcctggaaagaaaactattacgaaggttggatcaaaccgtctccaggtggtaattgctcttagtggtggagagctcatctattttgagatggatatgactggtcagctcatggaggtagagaagcaggacatgtctggtgatgttgcgtgcctggccattgcaccggtccctgaggggaggcaaaggtccagatttcttgccgtaggatcctatgataacaccattcgtatcctctcattggatcctgatgattgcctgcagcctctaagcgtccagagtgtatcatcggcaccagagtcactcctattcttggaggtccaggcatcagttggtggtgaggatggtgcagattatccagccaaccttttcctcaatgctggtttgcagaatggtgttcttttccgtaccaacgtcgacatggttacgggtcagctatctgacacacgttctcgattcctaggcctgagacctccaaagctgttcccttgtatagttagccacaggcaagcaatgctctgcctgtccagccgtccttggctgggttacatacatcaaggccattttctcttgacaccactgtcctgtgatacactcgaatctgcagcatcattttcttctgatcagtgttcagaaggtgtagttgctgttgcgggagatgccttacgtattttcaccattgaacgcctgggagagactttcaatgagacggcaatccctctgcggtacaccccaaggaagtttgtgattctaccaaagaaaaaatacattgctgtcattgagagtgacaaaggtgcattcagcgcagaagagcgagaagctgctaagaaagagtgccttgatgcttctggtgcagcggagaatggaaatgcgaataatggcgatcctatggagaatggtgatggtcaagatggtgccgaggagggcaacacatttcctgatgaacaatatggttatccaaaagctgaatctgagaggtgggtttcctgcattaggatcttggatccaaggagtagggacacaacctgtctgctggaattgcaggacaatgaggctgctgtcagtatctgcactgtgaatttccatgataaggagcatggaactctactggctattggcactgccaagggtttgcagttctggccaaggaggacccttgctggtggattcatccacgtatataagtttgtggatgaagggaggtcacttgaacttctacacaagacacaggtggaggaagtacctcttgcattgtgccaattccaggggcgattacttgcaggtgttggttcagtgctcagactatatgatctgggtaaaagaaaattgctcagaaaatgtgaaaacaagctttttccgaggacattagtatctattcatacctaccgtgatagaatctatgttggcgatatgcaagagtgttcccaggtggcttacaacagcacaacacatagattttgacactatggctggagcagataagtttgggaatatatattttgctcgtcttcctcaggatatctcagatgagattgaagaagacccaactggaggcaagattaagtgggagcaagggaagttaaatggtgcccctaacaaagttgaggagattgtgcagtttcatgtgggtgatgttgtaacgtgtttgcagaaggcctctttgattcctggtggaggtgaatgtcttatttatgggactgtgatgggcagtgtgggagcactgcttgcatttacctccagggaagatgttgatttcttctctcacttggagatgcatctgcgtcaggagcatccaccattgtgtggaagagatcacatggcttacagatctgcctattttccagtgaaggatgtgatagatggtgatctctgcgagcagtatccctccctcccagctgatatgcagaggaagattgctgatgagctggacagaactccgggtgaaatcctgaagaagctagaagacatcaggaacaaaatcatctaaaacagcggcttagtgtgaagaaactaggcagggcagtgccggtgctctttgctttaagactgtatccagttcgagctgttgccgcacttcaagatgtgacagcagcgcatccaacaagtttggagcacgctgatctgtacgatctttcctgatgctatctggtccagtcggcgatttattgctgagatagagcatgtacggcaccagaatgagtttttttgtatctcgtagaagtgatttagctgatgtcgttgactgtttacttggcttgatgtaattgagtgaagttattcatgttggattattcgtgtagtacggggttaccttggtaatgtactaccacaagggcttggttgctaggaagggaattggagggttccaattaagccttcaatcctctctaatttcctcccaaacaagccctaacagatttttgaagcgcagatgcgttgctgtcattgccttttcagattgttcagctgatggaatcctcagttgacagctcttcaaagagagggaaagcaacgtaggttcgcaatactggagccgatcatcagctcaactcaaaacaaggtttaca

SEQ ID NO: 29681 - DNA, 1368 bp, Zea Mays
taacactccatatgcttatgaggacatgcaagctcttattagcaagatcacaaagtcgatagtatcaccattgcccacgagatattctggttcctttaggggacttatcaagagcatgctacggaaaagtccagaacaccgaccaagcgctgcagaactgctaaagcatgtgcaccttcagccttatgtgcttcaggtccagttgaagtccagtccctctcgcaacatgtctccaatctatcaagctctgacagacaaagttaagaagatgacatttcctagtgatataactgattccgccagaagagtggcaagaagaaactcgcttggaaatgagaggactgtaacattctgcaaaccctctcctgagcggaactctattagctctacacggagcatcaaagaatatacaactacccagagtgtcaaagagctatctgttgacagcagtcaaattgatgatgaggttacaagtaaagccattagaacaaagacaacaggcattctaaggacgcccaagagtaccccagccaagacattgactactagaaatcggttggatcctccaaaaacttcttacagcagaacaaaccatagtgagttgacctcaagaacacctctgaacaagagtgctgtgacagcaagaagagcatcgctcccgctgccgacatacagagcacccaacagccgtgccgccagcgtccttgaccaactggactccccagacgtgtccgtcaacgcgcctcggatcgacaggatcgcagaattccctctagcttcatccgaggaccccctggcgcccatgaagaagaacctgtcctcggcgcccggccacgacggctcatgctccacgcctcccttcatcaaccggtccatcacgaaggacaagtacacggtgcaggtgctgcacaggggcgacggggacaacgcgagcgactcgtcggggcgcaacgccaccgccgcgtcgagcggggggtccaacgactcgaggcagcagcggttcgacacctcgtcgtaccagcagcgcgccgaggccctggagggcctgctggagttcagcgcgcagctgctgcagcaggagcggtacgaggagctgggcatcctgctgaagccgttcggccccgagaaggcgtcgccgagagagactgccatctggctcaccaagagcttcaaggagacggcgtcatagcggagggagggagggagggagtcatagcggagggagggagggagggagtcatagcggagggagggagacgtagctgccagttttgtaacgtgcaatgtagttcaggtagtttaagctatgttaggaccccccaggtgtaggtgctggaaggaaggcaacaccagctcagtgttgcccta

SEQ ID NO: 29682 - DNA, 1254 bp, Zea Mays
atcatctaaaaaggctaatataataaaaaaaaactgcgcgcactgctgtcaccgcggcggagggaaaaatcgggcgtaccccggtgcccgttcaccgccgttcacgccgcgtgtgcgctctggctctgccgctctctctctctcctgcgcgtggcgcaactgccgtcctataccaggcgcccaggtctagcctcgtcggtgccttcgccaggtctttctcgggcccttcgccaacgacgagcgcccgctagaggtggacttctgaggaagaggctgctcttagagctggagtagccagacatggagttggaaattggcgcatgatattgaatgatccagaacttagctccacattgcgctaccgctcgaatgttgacctaaaggacaaatggcgcaacatgaatgtaattgtcacttcatcgagtactcgtgacagggggagaacttccacgaggagaacccgagctgctcctaagaataatgaccaattgttggcaatgagcacaatcacttctgaggttgatgatgagattgttgatgtaaagcccatagtatcaatgtctgttgaaggatggaatacttcaaattcaaagaaatctcactcaaggctagacaatattataatggaggctataaagaacttgaatgagcctacagggtcccacagaactactattgctaattacatagaggagcaatattggccacctagtgattttgatcacttattgtctgcaaaactgaagtatttagctaccagtgggaaattgttgaaggtgaatcggaagtacaggatagcacctagtttgctggaagacgtgcaaagagaacccttgaaattagggagtgatgctagtagaacccttacaagatcccaagtcgatgctgaattggtccgtatggcaactatgactgttgaggcggcggcggcagctgctgctcatgcagttgcagaggcagaggctatcatggcagaagctgaagcagctgctagggaagcagaagctgcggaagcagaggcccgagctgcacaggcctttgctgaagcagcagttttgacactgaagaacagaaatgctgcgaaattggtatagctcgagtccatgaatcttagatatgccctcttgtccttccacacgtagaatccagttccgtagctctgtatgcaactaattggttactaaaagaacctgaaatcagaagttttcacaaacacaccgacttattcaccgaagattatgatttccaaagtaa

SEQ ID NO: 29683 - DNA, 2391 bp, Zea Mays
ccgcgctcgcgctgttgcttatgcgagcttgccaatccgatggggtatgaagagagcaaaaaacatctcctcagtctcagctaccctgagctgcaatgtttgtgcaaaaggtataaccttcctgctaagaagacccactctcagttagcaagttcgctcgcctcgctgcttgaggcatctccatctcctgctcctcctcctgtccaattagcaaatatgaaagaagcatccacatgcaatcatgctaacaacaaaagaggcccatacaatggcagggatgatggtaaaccacttgtgcatgcgaaacatcaaaaaggagatcagacacctgttgatgaaacatctaaaaaggggattgacactggtacgagtatacctccagtttctatgaaccatggaagaccagaatatcatggccatctatcttctgacctgagaactgctcataatttacagtcccaatgtgacgtgggaattgcaactaatacaacaaatctagaatttgttggcaaacatgattgttcacctgctaacgtaattgatcaaatctgtccccctattattcaaaaatatccttctaatggtaatggtcaggcttccactaagttcggccgtatgaatgataacacagaaaagggttgtcggctgtctgataagatatcagcaaatgctgctgctgttcaattttctgtaatgtcagatgagggcattgatcttcttgttgatctgaactccagttcagcaacatgggccaagaacttcatggcagaaatgcacattacccctccgtctgaacatgggaatttctctagcttcattagcagtttgtcaactaaggatgatcatagcactgcgtcaccatctggaaatatcattgttgacattcagaacaagggagctgagaacattgttccttccactgattcatcacttgcttcagatgttggtgagagctcccgttcagtgctctatccagttgatacgactactgtgaactcagtgtcatccacgtctacagtggctggtaccccagttgaactttctgggtatcaggagggtgctccagtggtgcttcggataacgaggtgcttcctccagaacctgctgatgtctttttgcagtctgaaagaatcactgcaccagctgtatgtggttcagtgcaaccaattggcaataaatgcacaatgagttctggggatgaggttagaagtggctccaatgaagactcctgtccaaaatcttcaggaaaacaaactggagatgaaaccctaatggaaaatgaacctgtgaaggcagtagcagtggaagaaaatataggtcgtgatgacagtttgtccatttcttatcaactagcctgtaagacagtagcagaactgcctgttacagatgcccagtcgcctgctagttcttctggtcattttattgctggaaattttgacaacacacatccaacatcttccgccacttcggacaatgctattaattctctgacttcaaagttcggtgcagagctagcacaaagtcatgattctacggacaaaaagggacagaatgatgctgaggaggttgaggagttagagagtatgacaccagcagcctatagtgaacctcccagaaatatacaacttagcttacgaagtgcttccgctaaggtcaagccttctacactaccaagacgatcagcgaggcttcttcctaagtaaccgccgtaaatgatacagatgagatccagtgtgagaatagcctcactaccggcttagtcagattccatgaggatgaagggatagaaaacagttaacaagcttagattctaattttgtatgttcttgttaattcttttttgttccagcaactgagtagaacttggtttctgaagcttaggctgcgtgactttttatctcctcgtgtccatcaacatctgttacagttacagtcgtactgtcgagctttcatacactattgtacaaacgactcctacttttacagcatctgtttcctctggtctgcgacttgttggatgatgtcttctgtgttttatatcaatgcaatataactattggtgcaggagcaatgatatttccgattccacaagttaaccggaaatcttcatgggtgatagctgtgtcagattctttcgcgcatagtgatagctgtgtcagtttacccccattttcttgggcatcacttgtctcaaatgaagttcattggaggttcgcaatttatgttccgtggcatcacaccggcacctacctatttgctggttatctaattttacatacggaggacctggattgccacctgctaattgctatcgcggccttgaccaaaaaggtaagagcatcccttctcaatcagagccgtggaaccatagccaaatttgccaagtgttaa

SEQ ID NO: 29684 - DNA, 1966 bp, Zea Mays
caaatccagcccctggtgcatcatcggattggcgacgtggtcacttgtcatggggtggagactaaggatccaagccaatatcacggaccacaacatcaagtgtatgaggcagggcaaagaggccaacagggtttgccgtttgcttgacgatcacacgtatcaaaaagggttctcaagtattattggtaaagtatcacaattagatatagcttgaagttgcattttacgcgttgagctatcacattgtagactaacttgtacagttttcttttgcagtccttcttgcttgctttcacatttggggtgttctgctataatttacgttgattatttttcccttgcaatttggcatgcatacaaacatttgctctctatttttctatccaacataattcatgatttaaataaaggaactatttcttaaaagtcttctatttagtttcatcctttggaaaacaactctgctactaatgtgctgccccagaccccagttttacttctatttgacctgccagtgaaagcatttggagattttcttttaatccaccgtgaagcaaattcatggctaaatgctgcaacgtttagtctgtagcagtgtcctacttcttcctacttattaattagttgatggctacttccgtatgagttaacaacttatatgtgagagggcgaacgagacagagttgaaaaccctgcatccatccaatctggacatacataaaagttgtcataaagaaaggcacttgtccaggaaaaatgttttattgactgtcctgctgttcctttccccgctaaataatgtatcaagttaaaacttagctgagataatgtcaacttaagcttttccatgtcggcatatgtgcttcccacaatcttcggatggtcttttttttaaaaaaatctttggcctgcttcatcaagaactagatttgatcatgttcttctctgtgttgatgaattatctacagtttagctataaacacatctgaaatgttagtctattgaaggatacttggatactgaagccatgcatctttaaattgttaacttttctttttgtggtttagtatggatgaataaaaggggaaaaagcaaaagggaacaagcatcctctgatttttattttgatgatgcaatcttagaaaccctacctgaactgaacacctcttttggcattttaaaagtgctgcaaaggaaacaagcatcctcttgcttttgtatctttagtatgttgtcggcatatgtacgctattatgtccttttttggttaaatatctattattcatgggtttgctgttcacatgaatcgcatatagctatcacctttgctgcattcaggttgatgctatgctccaagaattagaaaaggagattgatgatgtggatgcacaaattggaaatcgttggcaactgcttgataaggaccatgatggcaaagtgacccctgaagaggtggcggcggcgacagcttatctcaaggacaccatagggaaagaaggcgtgcaagagctcatcagcaacctttctaaagacacagaaggaaaaaatccttgttgaagatattgtgaagctagcatcccaaatagagaacaatgaagaggaagaggaagcacggtagatgggagagtatatggaaacatcacactcgttcagcagtcaaaactcatgtattgaaaggcaatacatccatttcttgtgtctcttgactgactttgatagtgacttccaattagcaaggtagattttctgtagaaaggctcatgctgacatgcatttagttagccgtcgtgttgtgatttggtaggtaaattgcaaccaaaatttagaccggttgcatggacgtggataatacagatcaattgtatttgttatgctactatgcaatcccgaaatattggatctgtttcaaattctcaagtaatcattgatggatgctatttattgaccataaagcttacgaaatcat

SEQ ID NO: 29685 - DNA, 2046 bp, Zea Mays
gcccggacgaatcgcagtcgttcatctgtctcacgttagtcacgtgctcgctttccttctcccctccgtttcgaaaaccaaatctctctgtctactaggcgggagagtgagacggccatggcggaggcgcaagccctagtaccggcgcaaggtcccgacgaggcgcccctcgatgcgtccgccattcatagccgggtggagcagctctcattgaaaaggctggaggtggagccggaggcggaggtggcggaggatgaggtggcactaggtttggactccacgcacaaggcggctcaggatgcgatggatgagtgggactcggccactgctgcggtttcaattgatgatttggatgcatacctggaacaactgagaaaggatgtagccatggcagagcaggggaatcagaaggtatctggtgagattagtgtcactgcagagacaacattcaatgatatgattcaattggatgttggtattgaaatgctggagtctttgatttcgaatcttggtccaaaggctttgaaccattttgatgaaagttctgttctggggctgtcagactcaactgattcatgcagaaatcgaagcattgctgacaaggactacatatatgagttggaacttgatcaccaaatagaaaaaagtacgatggaacttgaaattttacaacatctacaaagattgtactgttcaatgtccaatgtccttcaaactatatctttgcatggttgatctgttttcaactcaagcaaattaaaggtttgtgtcatcttctactcttcgtcataattgcttactgttattaccattagtcagcaagtgttgtctatttccattaaatcaatgtcttcttttttccggtactgttgtgagcaatcatagcaggtatcctatgttagcagttatgagtttactatgctatggatcgatggatttctttctgacatccctaaacctctatatccagggatgatgaaatgtttcaacttgaatctaagttattgccatttggagcgaagatcttagactttaaagacgactgtctcaggatgttcctcaaggcaccaatattgacctcagattgtgaaatttatggacagaagtttaattgttctattgattcatttatttcagaccatgagctgctgatagaaattgataaaataaatatggaaccaaagaaagtacagatcattcctgatgacatgtctgtagatatactgattgagaggatggagtcctccagagatacagtttgttctccaaccttgatatggctaattcagcaatgccaacaccagtctataatcaatgctttgagacgatcattggtgaatgatgctaatagttcgaggcattgttttgagtacttaaacaaaaaggagatgattgttgctcacttagatcgtggtattgatgtctccatcaagatgtcttcagattggcctctttgttcctatggcctgaagctaatttcgatccgcaatgcaggggatcgtccaacaaatattgcttcaactatactttgtaagaccaaggaactggccaacgaattggagccgcagattcggcaacatcttctaacgcttgtggatgctgttgaagatattatcattcgagagctgcggtctcgttaggaccacgctgtcgacaggaatagctttgggggataatagacagcctctactggctcgtggatcaatgtttcactttcacattttgtacagaagcgactctatcaccgttacgcatctacggctgatttttttagtgtctggcgcgttgccagaaaagagaatcttgttcaactttattaagtttgaaccgtagcaaatttgaccagtcatgcctgattcctatacttgccttcatccttttttggcggcatgtattattacgagaatacactcgtttccattgcaaaaatgtactggggcaatgttaggtcaagatgcacatcatacgtgatccgcatgtcaggctgcagtgcccgtcatctgcaaatgtagtgcgcattgtcatgggataaacgtctggttcttg

SEQ ID NO: 29686 - DNA, 1496 bp, Zea Mays
ttgtgacttgttatgtctgaaatcagaatggaagagatctcccatggaggatgaagaccagtatgagaaggacatgcaaccagatgacactgtggctgatgaagatatgcgatatgaatctgatgagaatcgtgaactgaaaccaaaagagaaaccagtcggtccaccactagacctggtggttccatttaagcaaccaccagctcgacctgacaaaatgaatgtgatcaaggtatcaaatattatggggattgaccctaaaccctttgatccaaaaacatatgtagaagaagatgtttttgttacagatgaatctgggactaagaaaaggatacggctagaggacaacattgtgcggtggagaaccattaggaatgcagatggcactacatcttgtgaaagcaatgcacgctttgtaaaatggaaggatggaagtatgcagcttctgattggcaatgaggttcttgatatatctgtacatgaggcgcatcatgaccaatcccatctgtttttgaggcatgggaagggaattctacaatcacaaggaaggctattgcacaaaatgcaatttatgccatcctccttgttttcgaagtcacatcgcttattaactgccctggttgattctcagaataagaaaactgttaagatgcaaaaatggtttgagactaaggatcctgagaaagcgaaaatggaaaaagaaaggattcagggccaaaatattcgagcccattcaatccttcaacgcaaaagggaaaaagtgaaccgcaagtacacacaacctgctcggccaaggcgacagctttctccaggatttttggaagacgctctagatgaggatgaggagccagactatggttctcggcgaatgccaggtcgtagacgtttcgaggatgaattggaggctgaagcactagctgagaggcgtatcatcaacgcgaagaagtcaaatatgagcagaaatgttccccgcaaaccaccgtaccctcctgctcgtctgccgagacgtcaagctgatgaatactcggagagtgagagggaggagtcagaatatgaaactgacggcgaggatattgaacattcaccgcctcgtggaagggaagatgagctggatgaggaggaagaatacgaggaagaagttgaggaagaagcgcctctctcagatgaagaaatggaggctcccaaaaggaagagagaatcagggggtggtggtgggcacatgcgcgaggagctggcgtccgaggacgacgaatccccaccaaggaagcaaccgactgttcagcatcgtagaaaggctgtcgtgtttgatgacagcgacgaggactagtgtgtgtatgacctgacctttacagtttattttttccatttcttgtcgagaatgatttatctgaaaagaagatgttggtaactgttattttccggcgggccggtttattatgagatggtgaagcaaaaaaaaaatatgttgggcaatatgctatcatgtcaccggggtg

SEQ ID NO: 29687 - DNA, 804 bp, Zea Mays
tttaggtacacccaaggagccaaacataattttcatgatatgtggaggttcgtatgtaagagaaattagctttgcctttcttatctatccgtccgcaagaccgcaacaccaccccattctccagcaacgagacaacaaatctcctcctcttcctctccgtatccgcatcagtccatcaccttcaatggcggcggcggcggctgctgccacctccttcaccaccctcgccgtcgcgcgttcggcggggcagcggtccctccttgcctccaaggccgcaccttcgccgctcctctccctccgtggcgcccgcatcccctcgcaggccgtctccttctccgggggccttgcggcgtcgccctctcacagccgcgcgcgcttcgctacatccgccagcgccgagcccaaggaagcagatcttcagtctaaaatcaccaataaggtgtattttgacataagcattgggaaccctgtggggaagaatgttgggaggattgtcatcggcttgtatggggatgatgttccacaaacagcagagaactttcgtgctctttgcactggagagaaagggtttggatacaagggatccagtttccaccgtgtcatcagcgactttatgatccagggcggagattttgacaagggcaatggtaccggtgggaaaagcatatatggacgcactttcaaagatgagaacttcaaattggttcacactggacctggagtggtcagcatggctaatgctggaccgaacaccaacggcagccagtttttcatttgcactgtcaagcaccaaagctaacccag

SEQ ID NO: 29688 - DNA, 2414 bp, Zea Mays
gttgcagcctattccaccaccgacgctgaaggccatacgcccccaatcgaatcgatcacatctatgccgtcgatcaccagaggtgggcgtggggggctcttctccacgcaccggggcgcgctcttgtggctccgccgttgccaaagcccactcttgtcgacactagccggcggcggaggccggagcgacgcgccacatctgcccgtactcatcgtcggagctggccctgttgggctcgtcctctcattcctcctcaccaaattcgggatcaaatgtgcggtgatagagaagaatgtggagttcactaggcacccacgagcgcacttcatcaacaaccgcacaatggagatcttccgcaagttggatggcttggccagggacattgagaggtcccagccaccagtagatttgtggaggaagttcgtatactgtacttcactctccggttctgtccttggatcggttgatcacatgaaacaggaaggccagttcagttcttatcatgtcgagtgctttatgtcttgcacttcactgtgtatgtcttctgacaagtatttttgacagattttgacaaggtcattagtcctgtatccgttgcacatttctcacagtacaagttagttgatttgctactcaagaagcttgaaggtattggtttccagacatgctttcccagtgagattggtaactcaacacaagatttggtactggaaagcaagatattgatgggacacaagtgcacatcccttgatcagactgatgagggcattctggttggagcatcagttaacaatggagggatgataatagagagaaagctacactgtggtcttcttatagggacagatggcgcaagaagtacagtgcgtgaattggcaggtatatctatggaaggtgaaagggatttgcagaaactggtcagtgtgcattttcttagcagagatctaggcaggtatttgtccagtcagaggccagggatgctgttcttcatttttaatccaggtgcaattggtgtactagttgcacatgacctagagaatggggaatttgtattgcaggttccattttatcctcctcagcagatgtttgaagattttagtgctaaggtatgcgagcaaattattttcaaattagtcggatgggagccagcagatgttcatgttttagacataaaaccatgggcaatgcatgctgaagttgcagagaagtacatctgctgcaataatcgagtaatcctctctggtgatgccgcacaccggtttcctcctgctggtggttttggaatgaacaccggtgtccaggatgtacataatttggcttggaaattgggcttactgctgaatggtgtcgcctcaccatcaatattacaaacttatgagtcagagcgccggcctgttagaatcttctcacacgctttctgttcatccaatcgtggagaatttcaaggcagctatgtctattcctacaacccttggccttgatccaactgttgcaaactcagtgcatcaagttataaatagaagcctcggatcaatcattccaagaaatgtgcagaaggcagttctagaaggattgttttctcttggtagggcacaagtctcagactatatcctgaatgagaaaaatcccattgggtcgttgagactagcaagattgagaagtattctcgatgaaggcaaaagtcttcagctgcagttccctgcagaggatcttggcttccactatgcagaaggtgctctagttgttgaagctagttgtgagaagactcatgaaggagaaaaactacagcattctaagagggcatcaagagagtacatcccatctgctaaggttggttcgcggcttccccacatgctagtaagagaagtgcctgcttcgagtgagggcgcgttctcaacactggacctagtgagtggggataaactcgagtttgttctcatcattgcaccagtgaaagagtcatatgagattgcccgtgccaccctcaagatagcagatgagcttacgctatcagccagagtatgtgtaatgtggccacgaggttcgactgatgctgaagtggaagagagcagatccgagttgacaccctggacaaactacatcgatgtcgaggaagtgcctagggtgtcgggtggttcatggtgggagatgtgtcgtattagtaggaagagtgtccttttggttaggcctgatgagcacatagcatggctaacagaactggacagggtgagggatgctgagtcagaaattaggagggtcttctctcatgttctgtgcctaaatagccaccgggtgtaagaatttataaatttccttccatttaggctttgtttagatactttggtattcactttaatccacatgtatggaagcggattaggttataaattaaattaatttacatcctaatccac

SEQ ID NO: 29689 - DNA, 433 bp, Zea Mays
ctcccaggaagggtgaacaagagttgggtcatctggagagagaatttgacgaatccactgtcggatcgatgcacaatcggttggttcctctcacaatcgacgatcagattctagatgatgtgtcaaatggtactgaattccatgagaattggctaggttcactgtaattttaagttgcagggctgcacaatgaaagatcaggttcagtgtactctgaaagttgcagttctgcacactcaaacacatgttcagtcaaacacaggttcagtctacattgcagaagataagctggagggaagcaatgcagaagataattacctgagttgttgcagtgcggagcgctggcgaagaaaagtaaacaagcgacgcaaaaaatgacatgtggacgcccaactgcgtcgtgcggtggctacgacagatgaaaaataaaaaa

SEQ ID NO: 29690 - DNA, 700 bp, Zea Mays
ctgccacttattgctcatcctacgttccagatgagatccctacgaatcggtatgcaagaattcatcccggtcgtcagtcacaggatcaacggacctactggtgtcttcttcctcacgactcctagacaccgacgtccgcgcgccatgatggcggacctgccctgcactcccgccgtataagctaaaacatcaaaggggtggtaacggcgagaaaataatggaggcataccgtggctcagcccagggacgagcagcgacgcactacggcagtcccactcgatcttcttcgcgcggtgataacgcggtgccctcccaacgctgtaagcacagggaacaccccctgcgtccagcgcgaacttgccgatctccctagcccgatgccgaggtccggtgacgcgcgtcacggacaagctccatcgtcatctctgaccgacagtgaaactctctctctctctctctttctcggttctctctttcctggatgcttagtgggggcgcttggctttgcccgaggtggccgacgggcaccgagtggatggggtggctgcggtgccctccacccccctttatattgctgaagcctcggacttcagccagagggaatcgagtccagagatgcgcgagcaacgcgcgtcatctgttgagaatggccagggggaagacgacgggttctgttgaaggagtccggttaacagggcgg

SEQ ID NO: 29691 - DNA, 1048 bp, Zea Mays
gtaaatcttcatcagataatattgattttgaagttctccgtggactgacaaattcattacttgctgctaagaagccagatgagttgatataattctgttatgccgtcgaaagttgaatgaaaagagtcaaacaggactagcagatttggaggctacaaatgacaatggtcgccaaaagcctcaagatattgacccgatccaagttgacctgcttttagggaaggcttattccgattggggtcatatcagtgatgctatttctgtctacgataagctaataactgatcatcctgaagacttccgtggttatttagcaaagggaatcatattaaaggaaaatggtaaagcaggtgatgcagaaagaatgtttattcaggcaaaattcttcgccccggaggcagcgaaggcactagttgatcgctatgcgcaaagatagtcgataagagattgaatggtgttgttttaaaccaatgagatcattcggattccagaaaaacgatcaacatgtttggaacgtcttgtatgatagcaacattatgggatctgggacattttgaattgtattgttttagaacaggcctgacgcagtatcgaaaaaagccttcccactgagacaagagattctgggttcgacagtctctgaaaaaatgcagggcaagccctgcccttggttattccttctttctgaaaaaaatgcagggtaagccttgcccttggttattccttctctctgaaaaaatgctgggtaagccttgccctgggttattccttgctcagacctcgctcacgcggaagccgccagcagcccttttattgctttagaacagcagaaatgaaacatgtatgctttgcctgggaacaatgctcagttaaacattttgatatacgtgtttagtccattatataaaaaattatttcgatgtgttggaacaaattgtgttgtcacggcacgagcctcagtgttctccatatccataatcacgtgaaatatgatcgtggttgaggtaatatatgtcatcttgccatgaatagttagggtcatatccct

SEQ ID NO: 29692 - DNA, 6095 bp, Zea Mays
atggagaactgcgagcgaacgataaaggggtttttgacattgaaaaatcttgcatctgttttccttcaacaaggttttgagttctacgataatgctcttcactgttacctacaagctgtagagcttgattcaaatgattcagttgtctggaatcatctgggaacactttcttgttcaatgggtttgctgagcgtatcaagatgggcatttgagcaagggcttgtatgcagcccaaacaactggaactgcatggagaaattgttggaggtgcttatatcaattcgtgatgaagtcgcatgcctttctgtagcaaatttaatacttaatagttggccatcacatcatcgtgctttacatgtgaagaagaccattgaatgtgctgaaccggtaccttttgcacctcgtggtattgacatacttgaacccaagcatgcaaaactcatcttttcgaataaaagaaaatccgttgatgatgaaatctgtcaagaaatagggacaaagaagagtaaacacagtgctacattgcaattgaatgaagcaaaatggttggcccttttagatggtatcctaagcttaataagtgcaaacaccgagaaggctggtgaatataattgctcaaatactgttgataggtgttcaatcagtgagggtagtgccaaggggcttgcttataacattatagacgttgtcatatctacagatacattgaaaagtgtggaaactgctggtggaaatggaaatgattctcaccatggtgagattctgccatatgattgcaaagctacagttaaagagaaagatggtaattcagatagggaacatccccatgaaagacggagcacacgccttgagaggctgcgaagtcgcaaatctggaaaagatgaaaatggatctgatggtaaagatatatcccatgctatgacccagtttctagaatcatttattctaaaaggaccaagccctgtagaaaaggcttattgttctggaaatgccgatgcttcaaatcctgatactcataactatacatccaacgaggaggcaaatgatcttaagcaatttctatgcaagatatccaagaattttggccctcatcacattggttatatgttacttgaggagatggctcatctcaaagtgccattccaagattattttgtcaagttaattgaactggacaaacttactagaggctgggctgaagacagatctgcatcgtgcaatttatttctagctgaactgtactatgatcgggctttgtgttctggaagtccaccaacatcttctgagctgtctgattcatcttaccatctttgtaagatcattgaatcagtagctctggaactgccattcaacatatctgttagagaaatacattccaccaacttggatacggaaagtagcaggacaggtgaatcttcaagtgaattaatcgagagaagtcatgaaaatggtcacatcaacatgcttaatgaccaaaagtccaaacatgattcttcttcaaacatgaattgtgcattctggattcgcttcttctggctgagtggttgcctgtccctttcatcagactgcaaagagaaagcttataaggagttcaatattgccctgtcaatactaaaaaatagcaacaaaactaaaagctatggagaggtcattcttctacctcacaccaaacttgtaaaatcacttacaactgacaggattcttcgtgaaatcaacttgatcaggcttgaatctctactttggaataatgatgagaatatcaacaaaataactcatacagagttcatgcagttgctacctccacttttgctttccaccaaagatgcctacgttggaaatgcatatggtccacaaagagaaagcgagaatgttatttcacttgagttgtctgccttggatgtcttaatatctgcatgtgaaaaagcaaaaccaatgaacatccaggtatatcttgactcccatcgaagaaaaattcaagttctaactgtggcagccggcatggttggatctgtcacacccctgaaagcgaaaggttcaagcaatgtggaatttgtggaagcaatgaacaggaaccggctagaaaatgttgtggaagcagtcaaagatgtgtctcgaaatgccagtaaagcaaaagacataatcgatcaatgcgataattccgatgggcaagatggctggagcccactaatgtctatcgttggtgatattcaatcattgctcttgacaatcatgtgtgctgctgtcaagataatactatcgagaaaactctcatgctctggaacctcctatcaggttgaccacttggaatgttcctgtctcatagatgcagccattgcattttgcaagctccagcaccttgatcctacaatatccatcaaaactcaggttgacttaattgttgcagtccatgatttgcttgctgagtatgggctctgttgtgctggaagagatggtgaaggggaggaagggatgttcctaaagttcgcaatcaaacatctcatggctctagatgtgaaactaaaatctcaactcaattcaaatgggatggaagaagatgcagttccaaaagacgtcagagcagaagacagtgtggccgatgaaccatcggttagtgacaataagcagaactccgatgatgaggaagaatcggagttagatgagattcagtcatgtcttgatagtgccttggaccaggcttttttctgcctgtatggtttgaagatcaacccagattcttgcagtgaagatgatctcgctgtacataaaaatacaagccgcggtgattatcaaaccaaagaacagtgtgctgatgtgtttcaatatgtcctgccatatgcaaaagctctatctcaatgaatctagggaagctatcctgaatgtattgttcccaggtgaaagaggctatgaagcattcaaaaaactctccactgccagctctgagccttattcagatgtttatgagaacttatattatttcatagctcaagccgaagatattagtgccaccgacaagcatacaggttttgttttgaaaaaggaaggagaagaattcgttgaacagagtgccaatattttcaagtatgatttgttgtacaatccattgcggtttgaaagctggcagaagctttccaatctttatgatgaggtggaagttgatctgttgctcaatgatggtagtaaacatataagcatcttggattggcgaacaaacacggatttaatcagaagggttgagatgggccgtcgacatagtcgacgctgcctattgatgagttcactactggccaaaactgcccctgagcagagcgaggcacatgaactgttggctcttgtgtactacgatagccttcaaaatgtggtgcctttttatgatcaaagagctactttgccagtgaaggattcatcatgggagacattttgtaaaaattctatgaagcactttgagaaggcttttgaaatcaaggagcagtggcttcatgcgttttaccttgggaaactgtgtgagaaactggggcattctttttctaaggcattatcatactacaacaaagccatgatgctgaatccaactgcagtcgaccctgtttacaggattcatgcatcacgcttgaagttactttacactcaaggcaaacagaatcttgaagctatacaggttgttgctgactacacatataaccagtcaacaaaagaaaatgtcttgagcatgctggggtcaatgactaaggttttgcagtcatcttctgataaaacatctttagacactaaagaggaaaataagttttttgagtccgatatactggataaagtgtggcacatcctttatgatgattgtctgtatgctcttggtacttgtgtggaaggggaactcaagcatttccacaaggcgagatacaagcttgcgcaaggatattatagaagaggtgaagcaggggacctggaacgggctaaggaagagctctcgttctgtttcaaatcttctcggtcttcctttacagtaaacatgtgggagattgatggcactgttagaaaaggaaggaggaaaaatccaaatgtgggtggatccagaaagaatctggaggtcagtttgtcagaaagttcacggaaattcattacgtgcattagaaaatatatgatactctatttaaacctgctggagaagaacacggacctgtggactcttgagaaggcttatacttatctgcgaacagataagagggtacctcccaactacactaactatgcgaggctatactttttctgcacattaaagaattccttttcctttctcttctgtagtttgcattgtgtttaggtgatattgttcctgttggtcttgggaagtatattctagttctaacggcagcaattcataatcctgagattcgtcgagcttctggtgatgcttctgttgagcaattacttgagaaaatgttcactgtattcatggatcatgcgaacatgtgggctgatataagcaatataccagaggtgaacagtccagaattatcagaaagcaatctttacagctatatccaccagtacatccatttgctcgagagtgatgtacgactagatgttctagaaggactaaacgagaagataagaaagcgtttcaagacaccgaagttatcaaatagtaacttcgctaagatatgcaagcatgcttctctggcatggtgccggtgtattctcatcaaactggcctcaatcactccactgcctgaatccgcagatgcaaccaatcagcctgcaccattatccaatgggcttctactctatgttgacttgcaacctgatgagcttcttatctcatcccctgatgggcctgctcaattcaaagggcttgacatgaactggtttgagacacttaacagaattaaaaacatcccggtcaagcaaacatccgaagataacttggagactgctgttacgttaatgaagagcacttataacttttatcgggagagcccttgtggaacatttccttcaggtatcaatctctacacggttacaccatcacaagctcctattgaagggctaccgccaaccgctgctgtagttgagacgctcgacttaagtattccaagaaaactccttctgtgggtatacactctggttcatggtcgttactcaaatatatcctccgttgtaaagtattgcgacgagatgaagttaagaagtaaaagaggaaccccagctgcgtctgcttcgtcacaagttgtgcagccagtgtcgcatagtaccgtttcttcccaagttgtatctaaagaaaagagctcccaagttgaacccgctgaagcagcacaaaatccttctgatctagctgccacttgcgttcctgcataccaagaagttggtggtgctagtgcctcgcaaagtgccattgaggcccagaaagctactgctgcggcatctcagctcactcgcagtggttcatcaagggcaatggaaaatgcacaggacggcggggagaggaagtaacgagatagagttcgattttttttatcctctatgctacatcgtatggatgcatatgatcctgcctgacgattctcaggtctcagctctccgtggctccgtgtgcaaatctctgccacgggcgtgttttaacgcctgattggatggttgcccgctggcgcgcccggccagcctcgtacggccacttcggacgcatctgcatcttcggaggtacccgcagatgtagatgaatggccgtaaaatggtttggtctgcgtctctttacatataaccaaataaaaactcagataaagttaactcatgtggtggtctatgttgagatgatgcgggtaaccaatcgaacggttaacaaattcaggtcgtatgtatatcctggtttacagttagtgtttcctaagtgcatttgtagattatagagctgtcaagattgaacgatacatctgtaaggtgttacaaatgctaaatgctaatcctgattttgtggctgatgctaaaaacctgtggactcttaattaccacagactgaactttccctcattttggcccaacaaatacaatagcagaggaagagtttcagttggatttggtggaacggtaggagcgtaaaatatcac

SEQ ID NO: 29693 - DNA, 1341 bp, Zea Mays
atgacacggggcccacttagttgcttatgtgagcaacccaacgctattattacgccacgataacccaaacaaaccaatcatcctctccgtgtaggccgcgggattccgtgtccctctccaatccggcgtagccatcgtcgccggatacaggatccggtccccgcgatggagccctcaccaacctcctcctcgccggctgtggcgcgccggttgtcgccggaggagaccgcagcagcctcgccggaggccgaggaccgcaaggacgatgttggtgtcgatggagatggcatggcgacgtcgtcggttgcgagtgactccgattacgagacgacgcagatgtgtgaccttcttaaatctaaggttggatcactcgagttccttcaaaagctcaatggtattcagaagtcagtagatcagaattgtgcagttgaacctgatacatcatgggatataataaagtcggatttgtgggaagatggtgactcagatgatggatatgttcttgttaaacaggaagatgtggttgatgggatcacttcctttatggctgcatgcctgttatcacttaaaagaaccaaggacctgcctcctgatcaacttcagaaagcacttaggaagatgttttcagctgaaaagaagaaaagtaaaatcagaaaggcttgggatggaactaaactcatttataatgttacttcatggggcgccactgctgttgggttctacaataatcgagcattgcttacggtcgcaagtacagcatttcggacttcctgccgtgtgatatccaagttcctttgaatattgtgtagggtatgttagaactgcttgcgtctgcttttccgttcttcagctaataaaaaggtagcataaagtcggaatccatttgcttaaatctgtcctgtttgccagcgacatcaagatttcgcagtcgagttcgactgctaattacgtattctcttcattttttttatttgtcgcggtttagttcaaaaatgaacaaatattagcatttagcagcgcctctagtccaaagcagcgttggtattgcacaactgtaaatgttgccttgcattgaacaaacttgcttccgtgccagaattttattttggtcacctgaaattattactttgtactattttccgtatcaaacaaaactaaaatccttgatattgacctgctcgatgtacatatcagctacttgcacatttttttgagggatgcggatctttagattgacaaggatatacggatgtaagatgtgtgatgctttggaggcttgaagcgaacgcaatggtacatgaggagatgcggacaccaccgtattttttttttgcttttgga

SEQ ID NO: 29694 - DNA, 932 bp, Zea Mays
ctgaaattgaaccgctaacctccttgtgcggttgtgctggtcctcgctgaccggtcagtccgccggggaggcgaaagagaaaatgaacaagtcacctgtggcgattcgccgattccaaacggctctcgacttcccgtcaagatgagggcgcgcggcgcgctcgtggcgttaaacgacgggggtagatgctcgggagctgttcgacggaatgcccaaccggcaccaaatactacggcttactaacggaccggcccgcacttcaggctgctagctatcggaggagaagagcaaaatgcaatcgaagaacgaaggagaagatgcggctgttcaggactccaccagaggcaggccacacacaacagaatctgcaaagctaggccccaagactggtcaagattaaatggcaaactgagccatcagcagcaaggcaactagtaggatcggagccgattgctcttatatatggtgctatcagctacgccgaggcaagcgagagcgagtcgatgtcatgtggctgacgcagtatgagccgctcactggacactggtgagtctgacgaggctccaacgttgatagctagcgactgcacgaaggctaaggacaaaacgagatgaagagcagagctgcagaggcgtcgttcagaggttgccatcgccgcttgtgtactgacaagtttggatccccgtagttgcggttgggttgccttgcctgccggcgacatattcctaaatccctaccttctactgtcgtggctgctagtaatacatgctttgcggcattgtttatgtcagttggtgcatttggagtcgcgtttgtgtgtgtcttatacatacgagcatctactttatttgcgataatcttgtattttctgctagtttggataagctttaaaaatataaggtccagtttgtttcgttggaattgaattctat

SEQ ID NO: 29695 - DNA, 2522 bp, Zea Mays
gcctttgatacgctgtgaagagaggaataagcgttgtgttgtttcttctatggggcttatgttgttgcaagataagttgggactcggttatgagaatgagtgttgatctcagagacttatttctttatgaggctttcttgtactataatcctcttcttcttgtggccttgatgatttggttgtggggagtaaatctatgggtttttgcacaatcatctgtgaattatgcaaaagtgtttgatcttccacaaacacatttatctcaccgagagatatggaggtgtgctacttggctgactttaattgtccctactagcatgacagcctacctatatctgtactcacatggagaagtgtctcttgcagcatctcaaccagttctcttgtatgctattcttctgatgatcctcctttctcctttcgatatgttttacttatcatcacgcttttactttctgaggacagtctggcgtataatactgcctttacaagcaattacatttcccgatttctttttggctgatatttttacatccatgtcaaaggtgttctcagatctggagcgctcagtttgtcgtatggtgaatcgccaggttgcaacaatcgcttggtttgaagcagattctatttgtggcagtcattcagtagcgattccgcttgttctcatgttaccctacttgtggcgtttattccaatgtctccggcaatacaaggatacaaaggagaagacatgtctcctcaatgctctcaagtactcgacagcaattcctgtgattttcctttctgctctcaagtaccatgtacatcctgatcaatgggttggcttctaccggcccctctggcttatctctagtgttgtaaattcactgtattccttctactgggatataaagcgagattgggatttgagcatcctaaccaggattttcatgttcaaaaacccaagcatatggacatatcttctttacgggcagaactgggtactctactgggtactgggcagcaatttggtcctgcgatgcacatggacgtacaagctctcggcgcatctccggcacaactacctgacagtgttcaccatagcagctctggagatactgagacggtggcagtgggtgttcttccgggtcgagaacgagtggaacaagatgacagccaaacagaacatggagatgtcatccgacatgccttccgaaggagacaggctactggattccagtaaccatacagtatgagttgaacagcagtctcataatttttgcgatacacagattcagcaccattcttttagcgtgacccatttttacgtcgacggtttagattttgtatgtagagctcaaaaggccagggatacgtaacaggtttctatataaaaagttgaaatttgttggcactacggatgtaatcctcttggaggatgtgtacttttgtaacccacttgcatccaacaggaggcatttgttgacacattaaagaaaaatagtaatgctgaaaatcatgagtttttggaaccgtaattatctcttttatcttgttcattatcatattcttggtgagtaccgtatatcagacagactgctcgtgtgggcatgacatttcacgtcaccagtttatcggatggctgagacctgatgaagtaacatacaagaagctgggtctagtggtatatgatttgatgatccaatcattgtatccatccacccacagaatgaagatattttggaaataaaaaaaaggcctgaacccagaacacaaatggaacatttaatacaaacatactttgtctaattactagctagagcatgatccataaaaacattaagacaccaagcacaagcaggtaagcaattatgcagaaatgctagctcccaaaacaatccttgcatatatccatggctccatccttgcagtaacttgcatacatacatctactgcactagcactacatcggcgagattatttaacttgcatctgttcttgacagtctacacaagaagaggcgaactggatcatgttccatgtgcatttgcttaatctgcacaagagactaattctatattacaaaagctacggcgccgagaaggcgtcgtcgagcggccacgggaggtgccgttcggtgccgtccatgccgtccggctcagcggaccgcggcggcgcctgcaccatggagcgcagcgtgtcgtggaggcggtcgtggcgcctccggtggcggatgcggcgcagcacggcgtccctgtccagcgcccccgccccggggcgcaggtacaggcagctcgtcaccggcgcggcctcgacgacgctgccttcgccgtcgccgtacccggccggcggcggcgcgttcttggacaccatggaggacgacatggcaaggcaggtgctggttcctccccctgatgagctagctggagaacagagagagcaggtacgctaatggcgacgtgaggagggagagagtgatgagcgagattgagaggggtgaagtgaaggtggcattgacggagcgtgtatttatagacggcgat

SEQ ID NO: 29696 - DNA, 2708 bp, Zea Mays
ttttctttgtactctagtggtgaaatactttttgaaataattatgtgatactgtaatatgggctttgcagtctactggagcaactggaatctattgagcaatctttgaatgagtctggcttagaagctctctcatcctttctgaaaaccaaaaagaatttagaccaactggaagatgcaaaagatttggatgaaaatggcggcgttcacgttttgctgaagaccttgctgtcattatcttatctaagatcaattctaatgaagggtctggaaagtggccttagaaatgatgctccagatagtgctattgcaatgcgacaaaagtggcgtctttgtgaaattgggcttgaggattattcgtttgtattgttaagtagatacatcaatgctcttgaagctttaggtggatcagcttcacttgcagagggtcttcctacaaatacaagtctatgggatgatgcccttgatgcccttatcattggcataaatcaagtttgcttttcaggttggaaaccaaatgagtgttctgcaatagtgaatgagcttctttcttggaagcagaaaggtctatctgaatttgaaggcaatgaggatggaaagtatatttgggcactgagactcaaagccactcttgatagaacaggaagactaacagaagaatactctgaagcacttctttcaatattccctgaaaaagtcaaggttcttgggaaagcccttggaatacccgagaacagtgtcagaacatacactgaggctgaaattcgtgctagtgttatttttcaggtctcgaaactttgcactgtacttttaaaagcaactcgagcagttcttgggtcgtctgtgtgggatgttcttgttcctggagtggcccatggagccttgatacaggttgaaagaatagctcctggatcattgccgtcatccatgaaagaacctgtcgtgctagttgtaaacaaggcagatggagatgaagaggtcaaagctgctggggataacatagtgggcgttgttcttctacaagaattacctcacctatcacatcttggtgttagagctcgtcaagagaaagttgtatttgtaacttgtgaagacgatgacacgattaaaaacatgaggttacttgagggaaaacatgtcaggttgggtgcatcatccaataatgttgatctttcagttgtatcaaacaaagatgactgtgctgccatgtcttcagagccatccgctggaggagatctatttgcacagcaattctcactattgactacagacaagaagttagaattgtctgagggaccttcacttcagcaaaagagctatacttccgtagcaaatggtatgtctggtgtgctcgagctttcagaggcatcgattgaatcatctggtgcaaaagctgctgcatgtggaactctttcggttctttcctcaatgtcaaataaagtttacaatgaccaaggaactccagcagcattcagagttcctgcaggtgctgtgattccttttggatccatggaggacgccttgaagaaaagtggatcactcaaatcctacactaatcttctagagaggatcgaaacagctcaaattgaaaatggtgaacttgatagcctatcctcgaagcttcaagcaactgtttcacttctttctccatcggaagaaatcattgaatctttgaagaaaacatttgatcagaatgttcgactaattgtgagatctactgctaatgtggaggatttggctggaatgtctgctgctggactctatgaatcaattcctaatgtcagtctctctgaccctagatcctttggagctgcggttggacaggtttgggcatcattatacacaaggagagcaatccttagccgtcgagcagccggtgtacctcagagagacgcaaagatggcggttctcgtgcaggaaatgctgcagccagatctctcttttgtgcttcatacaattagcccagttgaccatgatcccaaattagtagaggctgaggttgcccctggtcttggagaaaccctcgcttctggtacccgtggcactccatggagactctcatgtcacaagcttgatggcaaagtcacaactctagcttttgcgaatttcagtgaagagcttatggtgctcaactctggccctaccgatggtgaaatgagtcgtaggaccgtagactacagcaagaagccgttatctgttgatgcaacctttagggagcagtttggtcagcgccttgccgccattggacagtatctggaacagaagtttggaagtgcccaagatgtggaaggttgcctggttggccccgatatatttatagttcagagcaggccacaaccacaataaacaaaaagttttgtgtggttacctggctagctgaataaaaatggatactggctgaagaaatatatggacttcgtagcacgcgtagcagtgatcgagtcttttttaatatgctatctcagcttcttggccgcttctgcccaccagaattggattctcgtaaacaaccgcccggcggccgaagcgattgtgggggagcagcctttcaaccgcagccgagaagcggctaagaggccgtggccgatggaagcggaaaggattcttcggagaacgttagtttgtgttcggtttgatttttgaccttggcttttttcccttaaaagctactaaaagccaaactaatataaaccagctttttattttttt

SEQ ID NO: 29697 - DNA, 416 bp, Zea Mays
gtacaacactgtgaccaaggaatcgggctttagggatccctatgtccagtaccaccacctcgcctccgccgccggccgccggggaccatccccgcgttctgctccgaggtttcctctcccgtgagacatgcaaggagctggagttcgtgcaccggagctgcggcgcagcggggtaccgcccctcggtgatatcgacatctctgccgcacctggcggccaccggctgcggccacctcctgctcccgttcgtgcccgtccgcgagcgcctccgcgacgctgtggagtccttcttcgattgccacttcgatctcttcatcgagttcaccgggcttatcagttggtgcaagggagcttctattggatggcacagtgatgacaacaagccttatcttaggcaaagggcattcacacttgcg

SEQ ID NO: 29698 - DNA, 1159 bp, Zea Mays
ttggtggggaaaagtgtcagctttggcgcgaatttggcgagatgcatcgagaacggtggatcaagtgcatcacacctttagggaggccccttggacagcagtttgtgctgcaaattctatatagctctgtcgcagcatggcctcggtgggcgtggcacgctcttctttgggatttcagaatggcacaagttctagcagtgacccagatcgtcttcccaacgagttgggcagtatgagcataagggacgacaaggacgttgaagatattgtagtcaatggcaatggggcggagcctggtcatatcatagtgaccagcattgatgggagaaatgggcaggcaaagcagaccattagttacatggctgagcgggtggtaggtcatgggtccttcggaaccgttttccaggccaagtgtcttgaaactggtgagaccgtagctataaaaaaggttcttcaagacaagagatacaagaatcgtgagctgcaaaccatgcgagtgcttgaccacccaaatgtggtggctctaaagcactgtttcttctcaaagactgagaaagaggagctttacctcaatttggtgcttgagtatgtaccggagactgctcatcgtgtcatcaaacattacaacaagatgaaccagcgcatgcctttgatttatgcaaaactgtatatgtatcagatttgtagagccttggcatacattcacaacagcattggagtgtgccacagggacattaagccgcaaaatctcctggttaatcctcatacccatcagctaaaattgtgtgactttggcagcgcgaaagttctggtaaaaggcgaaccaaacatttcttacatctgttctaggtactacagagctccagagctcatatttggtgctactgaatacacaacagccattgatgtttggtctgctggctgtgtgctcgctgagctgcttctaggacagcctctgttccctggagaaagcggtgttgatcagcttgttgaaatcatcaaggttctgggcacacccacacgtgaagaaattaagtgcatgaatccaaattataccgagtttaaattcccgcaaatcaaagctcacccatggcataagatattccgtttaaagatgcctgctgaagcggtagatctcgtgtccaggcttctacgaatc

SEQ ID NO: 29699 - DNA, 1805 bp, Zea Mays
gttcgttcctgccctctctctgtattgggagctagacgaggaccgagccatccaagagcttggccacggggacgggggaagctctcgaggctcgagggaaagagacagccccccaaaggcccaaaccctctcctcttcttcttcccttccattcgggtcgcgtccagttgctggcagccatctctcgcggtcgcggcctcgcgggcaacctcctgtcttctccccatcggatccagtgctgcggatccgcatttccgcaaggtagtcaatggcggcttccccggcggaggcgggggcacaggcgctgcccgaggcgacggaggcgaaggagaagggcaagcggggcggggtgctgaggagggtgtggcgggcgctcttcggtggccgcgaggacttcgagaagcggctgcagtacctatccaaggaggaggccgccgtgcacgcgcggatgcgccggcggacgcagttctcgcgccgcaccgtgcgaaacctcatcgtactctccgtcctcgccgagttgagcggaaagatcagaagacccttgaaaaattgagggctgagagaaaagccaagattgatgagcttaaagagagaacaaactattatcttacccaacagcttattcagaaatatgatcttgatcctgccgcaaaggctgcagcagcttcagttttggcatctaagcttggggaggacactggcttaaaagttcatgttggagaagaaccaaagctggatgctgcagtggctagaagcaatgatgttgagatagtaccatcagatggtttgagaaacaggaaacaacccaatgcaagaggaagcaggaccgggagccctactgctgataccccagcacggggaactgaatccagtctaactgctggtgcagacctggaaactgctccagctcctttggtggtagaacatcatcaaggcttaggggctagtgatggtggtggatggattgcaaagattgctgccttacttgtggcagaggacccatcacagtcatatgctttgatatgtggcaactgccatatgcataatggcttggcccgaaaggaagattatccgcatgttacctactactgcccacattgtcatgcattaaacacatcaaagcagtccatgtggcaatactcgggctccaactcagggcggtcatcccctgttgttctggatgatggtctatccacttccagttcagtacaagagactgaattgagtaacctgacacacactgcaggagctacctgaggaaggaaatgcagagaagcaagaaaaggcaagttgatggttcacagaacttctattgatgtgtgtggaactacttaatctttagacgtatatcgtcatgtgttctggtggagccacagatttagcactgttgtaaattggaaatagtgactgatatgatccctcagatacttagcacacacccaaaagaagaaactagccatggtgacatccttgagtggatgattttttgttgtcaatagagcgcgaagacttcctgctgcatgacaagagtcacaagatggtgctgaaaagctatatatgataaatgaggcaatctaacaggtcagatgtgtaacgttcatacaagatggtgtaggatataacataatatcattgcttcgttttctatttctatcatttttatatgcacacgcttgttcagagaccagaaacgtggataatttttgcgtttattttgaccttcgatctttcctattatgtttgttacttcactgattccaaattgtgtaagtttgttcagattttgatacagctaaatatgcatt

SEQ ID NO: 29700 - DNA, 1236 bp, Zea Mays
acctaacccttcggccttcgttgcggacccgccactcacttcttctctcgaccgcatcttttctccgcgccgccgctcgcctgcacttctacgtgtgaaccgcgtccgcgcctatggcctgcccgtgcccagctgccccctctccacacgagcctctctaggcgtcaagcgtgccattaagcaaccgtggcccccacccctcctcggctctctgcgtgagcacaagcacgtctctgtagcccatgttcaacggaagcgaaaggaaacaggtaacccatcacattcgtcatgtgcaattctctcatgtcgtgcagcccattaattccactgaagaaaacatagaatgtgcatcataatgtcacagaaggcctaaaatgttgtagtgtgcggccattgctcacgaggaggcagagtgccgtgttgccgagtgccgctggaccacatacgattgttgatggtaaagaagttgtgaactttgcatcagcaaactacctcggtttaattggcaacgaaaagattattgattcttgcatcagttcattggagaaatatggtgttggttcttgtggtccacgtggcttttatggaacaattgatgtccatcttgactgtgagtcaaagatagctaaatttttggggactccagactccattctttattcatatgggatttctacaatattcagtgtgatacctgccttctgtaagaaagaagatatcatagtcgcgtaagttcaccgtattacaaaattatgaaattcacaagtattattggaaccttgacttgtttggtgtatcgaggtatgcatgcttggccttttagacataatatggatttatccagctcaactttaggctttagcacaacattgtcatctctttcttgtgtctattgatgagttgtttttccttgtcagttaactgtacatgggtagtttgatgtgattgcggtgacgagggtgttgactgtttggtgaaatgcttgggacaaagtggccaacaagaatggagtcatggaacatcgacaggaggggtgcggcagcagcaaccgatgtatcccttggacaatctggttttgacaagatgcaaatcaatccgctgtacactgtattccgcacttgcacagattgtttggttaattacaagattatctcagtgttttgattggtacacttatgtatgaaatattgattggtactcatctatattatatgaattatattattattaaatata

SEQ ID NO: 29701 - DNA, 3242 bp, Zea Mays
gtagatttttttttatatatatagcgggtctaaaatgtattttttcttatagcgggcctagaacgtgttgacccacaatagagaaaggcaccactgccgtttccgtcccgtttgcttacgtcaccaagccgccgagaaccagagacagacagagaagaaaaactgcagccgccgagctcagcctcagccgccgcgacggggacagggaaagatggccgacggcagtgcctccgcctcgccgccttccgtttctccgcaccagtaccaccgcgacgccatcaagtcctcagtgcgtaatacagctgctaataggaggagggaacatgccattgcaatagggaaagaaagaagggaagccttgatgcgtgcaaagcgtgtatgccgagctcctctttctggcagtgatgaggctgcaggagaagagggtgacatggttgttgatgaggagaaagcagatcttgagactagaacgactcaggctgttgaggagctgaaatctgctttgtcaagccagggaaaaggtgcacagaataggaagacagaagtgcttcgtgctttaaggcgtttgttgtcccagtctgaagtacctccagttgatgcagcaattaaagctggagcagtccctctattagtgcagtctctgtcatttggatcgccagatgaacaattgctagaggcagcttggtgccttacaaacatagcggcagggaaacctgaggaaactaaatccttacttcctgctctaccattgctcattgctcaccttggtgagaacagctctacacttgtcgcggaacaatgtgcatgggccattggtaatgttgctggtgaaggagcagagctgagaaacacattacttgctcaaggtgctttgtggcctcttgcccgtttaatgctgtcaaataagggttccacaacaaggactgctgcttgggcattgtcaaatctcatcaaggggcctgattccaaggctgcgaatgaacttattggtatcgacggcatactgaatgcaatcattcggaacttggaaaaggcggatgaagaacttgtaactgaggtggcatgggtggttgtctatctttcagcactttcagaaaaagctaccagcctaatagtaagaagttcgatgccacagttgctgatcgggcgccttctagcatctgaaaacttgcagttgctcattccggtacttcgcggtttaggaaatcttgtagccggtgatggttacatggttgattcagtccttattgttggaaacagtgtaacagatcaagccttatcaagtcttatcaagtgtttgaagagcgaccatagggttctcaagaaggaggcatcatgggccatgtcaaatatagcagcgggcagttttgagcataagaaactgatatttggtagtgaggcgactcctttgctgatgcacctcctcaggactgcacagtttgacatccgcagggaagcagcatacacgctgggcaacctgtgtgttgtcccagcaggcagtggtaaccccccaactataatcgttgagcatttagttgccatcgtagatggtggagcccttccaggatttataaatttggtgaggtcggccgatatagagagtgcgagacttgggcttcagttcctggaactggtgatgagaggataccctgacagccagggcccaaagctcgtggagacagaggacggcattgaggccatggagaggttccagttccatgagaacgagatgatgaggaatatggcgaatggtttggttgataaatactttggcgaagactatggcctgtgagttgtgccgccgatacatctgggtaaacgtggagctatttgtgggtttgaaatgtaacgatcctggaacagaaggatgcgccgttcatcatggtttccatgtaatttagcccctaatatatagctggaaatgtgaatgtgttgaaactgaccgtgagctggagatgttaagtgtggataccttagatagacatagactgacatcttgcacagtgcttcctctatctcaaaatattttttcgtctcgtattttaagtgtggaaatgttggagatgctcttagagtacaaatatatgactgattaatctgatgatgtttataatgtaccataaaaactagtgttttttggtatatatttggtctaaattgagattgtttaaactcctcgaaatatgatatggagacttattttgggattgagggagtatgaaataaataaccctgctgttctctttctatagcaaccatttgacaatccaaatttgaaatttgaacagattgcggcaacacctagttgtaagggtgtatgtcctgcaattgcgatggtcaaccgctaaaacactttctgttagtggcctaatggccgtatgatttctaaagaagacgtatcagtatcaccgttgttgcagtagcatgacaaattctagcaccaaccaaacccatttatcagctaaaaaaaccctggtgggctataggactaggaggcagcagcagtggttttgatctcgtctcttgctcgcatttcgtcgagcacgtccctggcgggcggtgagaccgtggtctcccattccgcgaagtcctcctccacctccgccgcctcctcctggaagcccagccgcttcatcccccgcgccatcaccctgtacacgtacgcgtccacgttgaggcctcccttcctgacggccgcctcgtacaccctccacgcccgcgtcaacggcggcctcggcgtctccctcgccgccggagggcgagtgcggcgcggaggacacgaaggtggcgtacagcgccgggtctgggcggtaccagggctcggcgcgggcgatgtggagcgcggcgagggcgagggaccagtggccctgccgctggagctcggccatggcggccacgaggtcggccttgaggaggcggcccagggcggtggctgctgcggccgaggcagccgccggcgagcggtcggcggaggtgaggcgcttcagggattggatcgccaggatggcctccgtggagagggagcggccgcgctggaggggcccgcggttgtcgcgcggcccgcaggtgatggacacgggcctaggcttgtgaccggcactgggtcctgggttggaacatgggctccgggtgaggcgcgggaccaagaggagagacgccattggagcggaagcagggaagccacgaagcggtaggagaaagagaacagaggaagtcagtggatgctgcggattttgggttcc

SEQ ID NO: 29702 - DNA, 795 bp, Zea Mays
gaccaacacggtatagtttctctgccctcagaaccctcgccgccgcccgtcggagctccggtgtgtcagttcgccgtcgaaggatatggactatgacaggttgaattcgccgaacacgtcggctatttcgctggaggtgatgggccaccggctacatatttcacaggatccaaactccaagcaccttgggaccacggtctgggatgcatcaatggtgtttgtcaagttcttggaaaagaatagcagaaaaggtcggttttgtccatccaagctaaaaggaaagagagtgattgaattaggagctggctgtggcctggctgggttcggaatgaccttgttgggttgtgatgttacaacaactgaccaagtcgaggtgcttccgctgcttatgagaaatgttgaacgcaacagatcttggatttcgcaatcgaattccgacacaggttttgtggagagaaacgtctgttgtgccattcatagccctgtttcagtaattctcatagctgtagttttggatatagttatatggcattctagcttttgaaataatcaagagttaattattatgttggttcctgtgaatgcatagggaccatgttaagtaagttgttatttagttctgacaaatataaattggcaaacttaaaacagataccatcggctcaattacagttgcagaattggactgggggaacaaagaacatatcaaggccgttgaacctccatttgattacattattggaactgacgtttacatcatgaagaacatcacttataacttcaccagtatgtgga

SEQ ID NO: 29703 - DNA, 911 bp, Zea Mays
gccgagcccccacgcaacaaaccacccgctcacacagaccgccccaccaaaactggccaaaagccccccaaagagaccccacaaaactccccgttatcccccacccggacaatcttccttcaggcttcagctgtccgcccgcggcccacccctccgccgtctccaccattccgccgttcccaccacgccactcgccagttcggcactccctcctgtctcccccccttgccgagacggcgcggacgccccgtcgcccaccccgatggctgccactctcctccacgccgccaccgcctcgctccagagctcctcccagcccgcacgcgcgggcgccgccaccgcctttcaccccctcgcgtccaccccatccatacgcctcgcgcgctcctcgttctcgtccaatcgccgcctcgaggtttcactccgggcggtttcggccggtcactgtttcgcggggaggggagcaccccggggccgccgcgtcgtcgccgccctagcaggggagcaaactgagggttcagaggtgggcgatgacaaggataacagcaacgaggagataaagcccgaggaggctcaggaagcttggaaggtaatgctggagcagttcaaggctgaggccctgcggatgcaggccctgtcaatgcaggcatatgatgtctactccaagagggcgagggaggtcttgctggaagcctctgagaagctgaagatacaggcagacaaagcacaaaaggacctcagcgtgatcgctaccgaggttagtcaggagggacaggaatatctggtgatggcagctcggaactccccagactcgatcaaggatattacaacaacgttcagggctcttgggagattgaattggccatcagagtatgaggattatcatgttggcattccgtttgttattcttg

SEQ ID NO: 29704 - DNA, 3586 bp, Zea Mays
atttttttttcaaatatgagagattttgcaagtacttcgactcctagaaaccgggaacatggaacttggccacgttcctcgtaccgggaatgtgggaataatcacgttccttgtgttataacctagttttagtagcgtaccgtgtactacgttcctgttcctcgatcccatcgattcgggaacctggttactaagcttcgaatacaaattgactcgtataatttacacacttgcaaactaaataatgtaagagttttttttttaagatttgaccaaatcttatcttaaacaagttactagtatgatcaaaagtacatggaatctaggcttagcttgttttaatattcattacattctttcttgttgtgctgctacaaacatacatggaatctaggtaatagtcttcgttgatgtctaattgtctacctagcactatcccactagcaaatgtttgctagcctgtaatctgttgaactgtataagtggataaactaccttctcccattagcttaagcttttgggtttaactggttagtacgtccactctaacatggtatcacagacagaggtctagagttcgaatcttggcataggctttatttgtgcctccacccatttatttccacgtttgcgcctttctcgttggctgcgtttgcgcctttctctctggctgcacgtgagtgggggtgttgaaatgtataagtggataaactaccttctcccataagcttaagcgtttgggttgaattggttagtgcgtccactctaacataatcgacaatctaaagctgcatttgatgttgtactcatcttttaaatcaacttacatttcattattttttgtattttgagcgtttcatgcttctgagtcaataggtcatgagtttgaagcatcctctccccatctggggtggggtggggtggggggaggctggcctccgcttatcccttccaagacctcaagggagctgccggcactggctcagcgccctttttttatttagtgtttcatgctctctcccctctctagtactgattgttggtgacgtttacattgagcaagccaagttcttaccatagttcggtcaagcctccttttgtgtagacttagccatatttggttcagaagcttctgtctttttaaaaataaatgtcgctctatgctccttgatcaaaagaaatgtctccgtttagtttatgaccaaaaagattcatttagtcttaaacagtctttgcacctaaattctaaactgtaaagtaagcagtcggtcacctatgattttgtcattaaaagaggccaattagccaattaaatgaggtaaacagctcaaaggtcatccgttggacatggcttaccaccatgtagaaatgtgctagacaactgtttaggcaaacagtgggtttaatcacattcagacggagtgtgtggtgtgtctgtgcttgagtttgtgtcggtatgtgcttactcttccttttggaggggtacatgtaacctgttcaatgctctctttgttttccttattgacagacataaaactttctaattttactcctgacgtttgtttccccttccatctcatgcctatcttgattcctctcacatctcttgtccatgatgcccctctgaattgcttttctggcgcccttacgcaccccaatccactccaacacaggtggattgaagtggatactgcatccaaacaagccctaatgatttccattaaaattggaattctagttttgttctttgttattcaacaatacagctaagtttttgccctgactaatataggtcgtgtttaagatattaaacttatgaataccatcctactgtttgcatctctttacaacatgtttcttaagccatcaggtaggtggctaggtgttagggcagtcatcgtactgatgctttccaaaagcggagagggagagagggaccccttttccccctgctagctccaacagtggtcaatttgaataggacagcatcggtgtttgatctggatagggacagtggcaggtgttgttataggcctgcagggtttgttgatactacctctcactgtgctcaattgctgctggcaagatgatataacgttgcgactgcttgcggcgtgcccaattacggtgactggttggtagggcttggattatgtcagtatatgttttctagagtaagtgcatgagttggggctatctagaaagggttacgggctggaatagtctaggaaaattcaatcttccctgtatgtttcttatattatttatgttctcttgacaagcgagcatgtgtatggcatctccttgcgttgggtgcctaggagatgtggaggtggtggtcagtgggtcactgctcaccataacatgcgttgctttactgctgccccgaatgttgaagattcttatcctgagcgaccaggggaaccagattgtcctatgtaagtttaaatctaaatgcaagttcaaccatccgaaggatatggtgaatgcattaggaacaggaacaaacaatgaatctctaattgctgatagcgctgtcttaccagtgaggccttctgaacccatttgtgtggaaaccatatatacagcaacaactgatgcagcagatgccccgaccgaggcgtgtaacgcaaaggggcttcctataagacaaggtgaagtggattgctcgttttatatgaagacaggcagctgcaaatatggttctatttgtcgcttcaaccatcctgatcggccagggccagctgcggatatagcttttatggttccactggttcaagctactcttccttcatcagcacccattgtccctgcagtggttgaacctttgccaatgatctatcctcaaaggccaggagaaactgtttgtgatttttacatgaagacaggatcttgcaagtattctcagaaatgcaagtttcaccaccccatcagtcgttttgccccgcattccaaagaaaacggggatcctcaacagcctgcgacacttgctagcctgccaaggagagaggacgctgaggcttgtgccttctacatgaggtctggcatgtgcaggttcggtgcgcactgcaagttcgaccaccctcctcgcgaggaggctatttccgagctgcaggcagccggaaaggaaggaatagaagggccgagcctcgtccagcgcgaccatgatgtctaatactgtatcctgcttcagtatgtaataccatgtgaatcgcactgttagttaatgcttggtgctgtcagtcttgttgggagtctgactcgtaaagctcattatcatcggaagtgtttgtcggaggagtgctggcactaactatttatcttcagttggttgtcgtgttgccaacttgcgatgtcaaggtgcatatttcagttttttagagtaaaaatgcactttacatcctgccgccaaacttaactatgggcctgtttatggccctgtttggtttagcttttttttaccagcttttctaaaaatctggttgtggaaagaatttgagtatcgtgaagattacatgtggagaagatgaagtggtccaaagggtccatgatctagaaagcgatcaatttctattatcacaacgac

SEQ ID NO: 29705 - DNA, 1595 bp, Zea Mays
aagcaaagcatctcattccccaggccaccccccctctgccctccctcacctccccccctctaccttttgtagctttcccattccccctcttgcgtgcaagcatcttctccggttctccccgctctcccatctttaaccgccccccctccctccctctccgtggtcttggaggagctcgctgttctacggctggctgcctgccgcggcgatccctgtctgttcgtttccgtcgcgcgggagccgcggttgcttttgcttgcttgcgttgccgcgagagaatcgtgagcagagagtgtgacctggccttattggcgtcttccgtgggcgggggcgggggcctgggccggggccgttgctggctgtttgttcgttgcccatcgatacactcctcccttgtctcccccgcatgcaatccgtgtgtgtgtgtgtgtgcgctctgcctctgctcgccggcgttggtttcgtgtgtcgcctgcctgtcgtcctcaccgcaacgctactcgttaccagctatcaactagcattgccttctccttccgctacaagaatctgacgagcccccctctccctcccgtcccggcgctgttcccagctcgctcctttcgagagtgtactgtttagtccgcgcgcattgctcggaccgagccaccgagttcttgccgcgcgccgcagcagtagagccattgccgcgttcgctcgcgccgcgcggttcatgcgccaggagtctgaggcggctacctagttaacggcgggggcatgcgtttcatcacaggcggcggcggcggcggagtaggaggaggagtaggaggaggcggaagctcggcggcgcggtcgtacgagcccatggccacggccgacaccacgagcctgcactactggctgcactggcgggtggggctctgtggcctgtgggtgctggcctgcatggccgtcgcgggctacctaatctggcgtcacgagggccccagcgccgaccggcgtcccggcggcgcgggcgcgggcctgtcgtccccgggcgctgcggctgacggcggcaaggagaggtgtcacggggtgctgtacgacgacgaggcgtggcggccgtgcctccgggacatccacccggcgtggctgctcgcctacaggctcatctccttcttcgtcctcctcagcctcctcgtcgtcattgtcatctccgatggcggcagcatcttctactactacactcaattttcagaaaacattgggtcttgcgactctgtgtgtgtggtcaggcttctctaggcttaatcataaatgacaagtggatagtgttgtaaggaatacccacccccaactagatggccttcattgacactttctgttccactgaacctgaagattttctgatacaagtttccaatgcataaataaatacctgcctttttttctctccaggtattgtcttcttctgtttacaaatcactagtgtagtagccttttcccaccctttttcttcttaaaagaaaaaaaacctctgagattgtgactggtagttagtacgtaccaaatttctcagagagatctggttgctgctgctcgagtagtgtagtgtttctgctttgtgataaactctg

SEQ ID NO: 29706 - DNA, 1987 bp, Zea Mays
ggaaacggactaccagcgctgagccgttccgtttcttttcaatcttggcgttttgtctccattcaatagggaaagggatgtttcgcttgaggctttcctttgtgcctgtgtcttctctgtagctttcaagagaataaaaatttggagcttctctcgcaccagcgtcctttccttcttccttggtttcatgctgacaactagggctgatcttcaggacggcctgttcttggttcggttcctgagagcgattgatagcgccagacggagtttcttctttaggagtcgtgcactatgggtaattgctggtttaaggggaatccatactttaacagggtttcttccaatgcaaccaaagcaggtacgactatttattactttggtttgatctctgtgatgatgtaactgcaactgtagtatgcagaagtttcatatatttgtttgatgccctcaatttagacattaacgaaactgctgctatgtgtgtgttctctcgtcttgatagaatcagggaccatgtccctgctcttgtttagtccaattacggctatttcagtactgaatattttcttcacaaaaaatcagtcctaatgttcaatcttatccaacccaatgattcttttttccctaaccttgacagttgattttatgattattccatgtaatgatcagatacttttgttctgccgtatgaaattcttgttcatcttttggtaacttatttacaaagtttctgaataatctgcaccctgtatttcagtccccgtacttgacttgtctatttgttttctgcagaatctcccaaaattcagagcccctcggagagaactgaaaaggaggattgccagctaccatccaacccgaaagaggtggaggcgctgagaaaggatacagctcgcaatcctttgatagcgttcacatttgaggagctcaagagaatgacaaaaaatttcaggcaagattcgttactaggcggtggtggatttggcagagtctacaaaggttttatcaccaaggatctccgcgaagggttagagatagaagagcccacaagagttgccgttaaggtccatgatggtgacaatagcttccagggccatagggagtggctggctgaggttatatttcttggacagctctctcacccgaatttagtgaagttgatcggctattgttgtgaagatgaccacagggtccttgtttacgagttcatgcctctaggaagtgtggagtctcatttgttttcaagtaattcttatcctattcttgacagattgttgattggttttatatagtttcttgtcattttgtcataacactgactatggtatatccacacatggcattcatgcaaattctcatactcataactgaaaagaatcgattgaaaacgagcataaacctgtccctcactcctatcctgaaccagtataatttaacttgcttcgagtggcagcattataaatttctgcatgacctatgtggtcagttctgcattattatttgtccatttgagatccaccagtgtatattatcagatcagtggagtatttgttttcataatgcaggggttatggtgccacttacgtggtcgatcagaatgaaaattgcgctcggtgctgcgaaaggacttgcttttctgcatgaagctgagaagcccgtcatctatcgggacttcaagacatcaaatatattactagatgaggaatataatgcaaaactatctgactttgggcttgcaaaagatggaccagttggcgataagtcccatgtttcaactcgtattatgggtacctacggttatgctgcaccagagtacattatgacaggggcggacctacaagaaaatgagagtgtgggcatacttgtaaggatgggcacaaaaatactagagcagggacatctaagcgatgctgagcagaggactttatggtgaaaatttaggctctactacttctaaaggagaaatgagcgggggcctgggccctca

SEQ ID NO: 29707 - DNA, 6314 bp, Zea Mays
atggcctcacccacggtcgcctccccgatccgggcgagccccgtcgacaaccccaccgtcgcgccctcactggcctcctgccgctgcgccttatcgctagatgctcgacatccccatccgcgcgctcgaggcagaggccagggacaccaagatgagcccgaccgcgaccgcctagccatcagctccaaagaagaagccaggggaccgatggacgtcagtgttccgtcgtggtggcccgctagatccatattcagcaagaaagatatctcgccatgccggcccagggccgcagcccgtcaccttcctccccccgcacccgccgtgacagccgcctccccacgcccgcttacccgactggccgcacaagatgcccacagtggcccccatcgcgcccacccgctccccccatccaccgcgacctcagccgccacgccgacgccatccccgtcctctagcgcgttgtcgccgtcgtcacaccgccaaaggtgcctgccccctgctaccgaggtcgacgaccagcagcggcaagctgccgagctcgacgacacgcacgccatgcttggccatatggacgagtccatcgcctgctacgagaaggggctccagatccagatgtccgcgctcgatgagcgcaatccctgcctccctgagacctgcaggtaggtgacaatgtcatcaagggcccctccccctttgtcgcttctcgatctagatctcgcctctccctaaagcacgggttgcacctccccccgtcacccactccttccttggcttctcccgggaaacgaccttcagtctttacaggtatgaggtcttattgtgtgccatcattttcttttgctattcattcccgaatccccactgtgccctccagtgatgatggggtatgagctctgaataacaaacaaggtaaatgtttactcttttgagtagctgaattttgctatgatgtagtaaattatactagtaaattatacttgtactgaatatgaatataagaaaaaaatactgcactaattatttttctacgctctatattgtaaaataataggaatataataaaaagctgacataaaagctaatttacaacatccctttattttactatgttttatgataaataccttgattttccttgtaagttgtatcttttagtgattttcaaagaaactcctatttgcttggtgctttttctgtaagcatatgttgattaaatctttgtgtattctttctgtacactaatttaacttatcattattctgtcatccagtatgttgtcttatttgaatggttcatttccttctttaggtgattgacaaggtttaggaggaaacttccaaaagccggtcaagtatggagtgcttaacatcactttggcaacttatatttttttacatgtttgctttgtttgttaacaacataatttatgggctgacaatgtgatcatgtattctttctggtagtcttcgtgtcactgcttgcagttgcaggggagggatcatggctttcttttattttccatgtgcaatgtttaatttaggtgatgaactccaaagcttatcccattgttttctagcaagagctaagcaatactggatggagaacatttatctttttaataacgagtaaaagcataatggcatgcttgtgtttagttctctgtttgttgaccaatcgctatatttaatcttgattttttttatctataacttgaatttcaaagattcaatattttttattcagacattttctcttctctagatattcttttatgcaaataacgcggttacactagatcagccaacattctgggaaataagctatatggtcagagtaagaggttcaagagttgatagttcaacaactttaactgagagcaaatctacaagaaaaaggaaacaagcaacctggaacctacaactgcaggagcttgcttgaaagtgaacaatcaaggttgtgtgtatatattatgcccgacatttttgaaggatattgcgagggccattgtatctgctggaaaaatcatttcaacttgtcgaacatggtattaggatacgaattggagtggtcaacagaaattctggacagatatgtcaaatttcagaatccacgatggtcctccaagaaataaagatgctcttgatcatctattgagaagtggaatactaattttttgctgcagcgtgatggataaaggtttttgcgtattcttgggtttttttcctttcctttttggctacacacaactctttttaaatatacattcagtaggtggcaatgcctcctatttccctaaaaatatagcgccaaagagttcaaaattgaattctcataatctgctattaggaaaagaggtcaacttctatattttttacatcaggtaatttggctataatacaacggcatgctgaggtcaacttctgtatttttttctgcaagtaacttggctataatacagcggcatgctccattctgaagctggtcaagaaataaatatagcacttgcaatattttccagtagtcaaacctctccattacttcaattctcgttctcatttttgactatgttcttcatgtcagttcaacataataattaagaggtcgcttgcccctgagacggcttcatggtattttatttgttttttacaaagtattttttaagcgctaaacttacagtgcactttctctattcgttttggtgctgcttataagtcttttgtgttttagatccatcgaagatggcgcttaatctcgagagctagggagatgaaatgccttttgtacatgatggaaggaaacaaattacgtacatgtatatgtggatcgaattgactgttgcattctgcctgtatttaagcaacggtttccacccaaaacgtctataatttggtccttcctagatgtgtcaaatgtgtttactgcactgcgtttgcttttgtggcagcgccctaatagttgtttataaagtctgatgttaacaaactattgtcatgctatgtaatatatagtcttaacatgttggtttgttgagtgttcgaatatcagttttatattattatgtcaggtgttattagtgttcaattttttaagttcttgttgtacatcctatcattacatgagacaatgttgtgatgtttacaatattgtgttatgtatgttatatcattttggtattatagtataatttaatttgtatcagtttagttctgtattggttgttgccaaaaaaaattatgagatattaaggtcgataataatgttcgtttttatataatcgttttgcactaatattttgttaatttttttgtataccgttgcaacgcacgggcacctaactagtatgagactatgagtacatcaagtgcattcccttagaactcttgttgtgtaaaaaaatgtgtaacatgtcttggtacagagattaatttggtttgtgttttttagactgcaattatatctgggttctcagccttgccatggttagtcaagcccctctatgattttatcagttgattcaggtggttgattatatggtggttcagagagctcgaggtgaatcacagagtacatatagatctctccactccagtcactatgttgggaatcctcagcctttggaggaatcatgagtgcatacttcagtggttctccagtcacttatggcgtaagatttgtctttggtgttacagcacttttgccactgttccgagtagcagagaaggacaactctggcaaactgtgaagaaaataaaagattttcacaagcggaatcttcagaatctgaataaaggagttcgtgggaatcagttgtaccaaaaactggttcagttttcgtattccaagcatactactggaagttcacactgatcggcgacaaactctcgcccaaggagaagttgaaggaggatcagcgtgaacacccactgaaagagagatggagttgaatgagaaatctgaaaagaatacgcaagaggtagatgagaagttccaaaacacaaacttgtatctcaagaacttagagatggagcttcgggagttacaagtgcttcataagcaatcagatagatctgaaagttttactgtgccaacacatgcacacactggtggtgcctgcatctagctattcagatcaaagcctgacaggtaccatagggcaaagtgaagaagaaacagaagagttgagcaagatcacgctagagaataaggatattcagcttgatatcaatataagagtgtttgatggagccgaccctatggagctgcatgtttatgattttaaaggacctggtgtaaccttatcaatgtacaatagcgatgagtttattaggccttttgctaagtcctccatggatatggctctttcaaaaaagtcgtctcttcatctcagcaccaagaatacaatcatcaagaagtatgacgacaggcatggatcatctatgtttctacaagctcgcggtcacatttattaggccttttgctaagttcatggatatggctctttcaaaaaagtcgtctcttcatctcagcaccaagaatacaatcatcaagaagtatgacgacatgcatggatcatctatgtttctacaagctcgcgttacaatggaatgctaagagacaaatagttaaagaactgctttaacctaccttgatggagaggggagaatgcatcgtgttagcaagggagcaccagagcaggtgatcaacttgctattgggaaagaaactgcacgtcgtttgggaatgggtactaatatgtacccttcctctgctttactcagacagaataaggatgagtcaattgcttccttgccaattgatgaattgatcgagaaggctgatggctttgctggtgtctttccagaacacaagtatgagatcgtgaaaggcttgcaagcaagaaaacatatatgtggcatgactggggatggtgtaaatgatgccccagctttgaagaaggctgatattggtattgcagtagcagactctactgatgcaactcgtagtgcttctgacattgtcctaactgaacctggccttagtgtgattattagtgctgtgctgacgagtcgggcaattttccaaaggatgaagaattacacgatctatgctgtatcgattaccatccgtattgtgcttggttttatgcttcttgcgctgatatggaagtttgacttcccaccatttatggtcctgatcattgccatcctcaatgacggtaccattatgactatctcgaaggacagagtaaaaccatctccacaaccagacagttggaagttagctgagatttttgcaactggagtagttcttggtggttatttggccatgatgactgtcattttcttctgggctgcatacaagactgactttttcccgcggctgttccacgtcgaaagcctcgagaagaccgcccaggatgactttcagaagttcgcctctgccgtgtaccttcaagtcagcacggtcagtcaggcccttatcttcgtgacacggtcgcgcagctggtcgtttgtggagcgtcctgggttcttgctggtcttcgctttcttggtggctaagctgattgccactctgatcgctgtatatgccaactgggcgttcactgcgatcaagggcattggatggggctgggccggtgtcatctggctctataacatcgtcttctacttcccgctggacatcatcaagttcctcatccgctatgcgctgagtgggagggcatggaacctcgtccttgagcagaggattgcgttcacgagcaagaagaatttcggcacggaagaaagggagcgcaagtgggcgcatgcgcagaggactctccatgggctccagccgccagaagcatccatcttcgagaacaagacgacattcaatgagctgaaccagctcgcggaagaggcccgcaggagagccgagatggcgaggttgcgagaagtgagcaccctgaaggggaggatggagtcagtggtgaagcagaagggtctggacatctagaccatccagcagtcctacactgtgtgactgactgactgacgacgacggggtttatagaggtttcttcttatactatacaatctgtactaggtagcaataaggatcaaggaaggaacccctatatattggctgcggttcgcaggaaatgaatgatggtaatatttatgatgtcggtgtggtgcttctgtcgccaactctcgaccatactaccctcaactcacccccggcaccaccggcaggcattgatattcagagatgagcgatggcataatagctgcacaggcatgtatatgccatgagcatgtgcagtgtttaccgttg

SEQ ID NO: 29708 - DNA, 8695 bp, Zea Mays
cagaaggccaccaagttgatgatcacaagctttgtccacggttcagacggcctgggaaaccaggatttccctccatcagctaccaagcctgtagatcaatcggctgctgccttcctggttgagcaaccaaatctataccctggacaagttaccattgtcgccctcagtccactaaccaaccttgctctgacagtcgagcttgaccctttgttctcgaagaatatatggcagattatttttcttggcggtgtgtattcaattaatggtaatgtgaactatgcagctgaggcaaatgtagatattgtgttcacccgcggtgctgatattttggctatggtactaattgtaacacatcaagtagttttaacccgtaattctgccatatttaagggtcacattatttctgctcaggatgtatgcttcatatactgagataatgcttcttttataacctacttctcattagtcaatggcaatctctactactctataagggtccagtgtgggcgtccacactggtaccgtgcccccgcccccaaaattctcgccccgcctcgctctccgtcgcgccattccagggaccctccatcgccgcccccgccatcatcgcgtcagcgcccgcgctccgtcgatggaaggcgccattccagggacccaccccaaccctgcgatcctcacccttccaaggatgccccgcacccatctcgtccaatccctcctcccgcctcacccgctcacaaggtcgacgacgacgaatctaaggacgccaacgccacccctctctgagctccctatggccactgcgggtgagtgcctctgggtagccggtcacccctctcttgcagcctccgagcttcggcgaacgcagaactggcagggcgcgacggccgacgcaatgtacgtgggtagccggcgtccaatgtcggccgccgctggcgagcgcccccggcgcggctgcccaaccaagctctgtccagatctgaccgtctagggcgaggtgaccccctcctggcggcgagcgagacagcccccactccaccccacctcgcaacagccaccgatcagtggagcgcactcaaaactgttggatttattttggaacttaggtgaaggaggaatgggtggagggacgagcaagatggcaacgttctattgaaacaaactgcctcgattattaggctatcattactaaacaaactacctttatcgtcaacctactaacttccatattcttcacattcagctttgcaaaatttacttgactggattttttagcttaacatataactcagggagacatgcgattttgggacgatcaaactgttggtaagtaaatacttgttggcctgttgctcttcttttagctatagctgaccataatttttcttggttgaggaaactgtagttagtgatagctcaatattttgtgtgtagaaacctgtataaagtattggacatgtatttcatagtttttgtaacttataaggctatgtaagtcacagattaactcttcaaagaattatacaacaaagaaattagcgctcagaaatgggatctttgcatttttagtcttgctcattttttattattcatgtatgactcatggttttctagagaaaaatattggaccgttacaataatgctaatatggtgttaatctaggattgctcattttgagtattcttgtacgactcatggttttctagagaaaagatcttggactgtagcactacctccacttgtgagatctggacttctgtagttatatgccatagcaacactgaaagtgacaatgtttgaatggtatagttcttttccttggtcggtgatatatattcacttgatggtatagctctgccaaaagcacaacagctcgtgcttgatccacaaaaaataggatgctcatgtgattgtattttgattttttagttttatttttgttgcatgtataatccaatcgccgagatcgacctctaccgtctcgagccataggacctcccctccctcttcaacatccgcagtcacaacgccaaggggtagttcttcgcccgtgcggtcgaggcggtcccagcaacaggaccaaccacgcacacgccgatggggtactggagatccggacggagtagcattcttgctggcccagggtcagcccacttcttgcgcaagtttgttgttgggaaccaatggaatccgactattcatttttcttgcggatggtcgtgtcggtggggtcaagaaaattctctggaatttggcactgataagatagaaatgcatgttggggctgtacaggccaacgatcgagctcttgtagtcgatgatcttattgccacccgtgtgcagctgtcaaacttatcggagatggacgatgaagcgttggatcaaggagatggaggttggatcaaggagatggaggaggtggccgccacggccaccacttccaggtcgattatgccctttagggccatccagaagggcaagccgttgtcggtgtccttggcatcgagaagaagtccacccctaagctctagaactccaggtgctcgccgtggccacaagcgtgtagtcccccgacgcagagaagaggaagggcatgtggcgtagttagagggatctgaaccctagcggtcgtccgcccgtccagatctgtgacccgcccttctcgacgcttcggtgacatgagtgcctggaaatctagggaggcgaaaaggtcagagttcagtcatgtcatgcttgatttgagttctgtgccagatcaaagcaagtagtagtacgtgagaagttaaccatgaacagacaccctttttctctttgtgtatcacagattttgaaacttgctgagagggaaaaacaaatttatggggaaaaaatgtgacactgaaagccatttgcttccagcagcttaagaattgttgcggtagatgcaactgaagagggtcttcaagtaagtaaatcaactactacaatggctcactaaaaatggtcgacaggacagtttcggaaccttattgttgttcttcagagagaacatcgacaaaggaacttgaagctccgtaggcgaaaggatctctagaaacgactaactaaattctcctaggtactactctagggaggatgctgaagatgctgtcaaatacattagtggaacaatgcttgacgatcgtccaatccgtgttgatttcgatcggggctttgaagaaggcagacagtggggccgtggacgaagtggtgtacaagctttacaaaccatgatatatgcagacaagactgaattagttcctacttctccccatcaattagaaatggggactatagaagatgtccgaacagagcctgatgtctcacaggaacaaacaactaaagaaaatggaagccagacaacctttagctatgaacgattgatatcaaagtccactgaccctgttagtgggatagacaacaagcacagagagtctgacaagtacttgagaaatggaatggtagtatgtttttgtttcttaggtaattagttcaccttatccttagatctctaagtttagatttgaatttgcttgaagtggatgctccctcatcataattttgtcccgtgtaaccagtgtcgttgccattagaattctcctatacagacatctatgcataaggttagcccttccattcttctattcagtgttgtttcctttgttttgtttttggcctctttgaatgaacaatagaaattttgcccattgtgtcccatcggtaaaagaatataaggcaacatggcgctcttagttgttagatcccataaagggaaaggtaagtcaagttagaatttattcagactgtcatgtaattgttgtaggacctttgtttcatttttatgccacacgatgatttatcacacatgctactactgggttgtgaaaaataatttcattttgtcaatgtgcctcaagtcaatcttttgaattttattatcagtctaaaatacttatttgttgtttgtttataatggctggaaatattcattattactgacctgacccataagacctagctgattgctcaagatagttatgcaattaagggtttcattctaaatattcataaacctgggatcctatgttgcatggcaaagcacccaaaatcattctgactttatgcttgataaattgataactggcatattagttgttacagtcaagcatcatgattatgaatctagattttattaatgagtcaagcatcaagtacttatgttaaatactcttgcttgcatggacttcttgagcgaaaacactatgtgacgctgtttgcaggagacatactttgctacagattctcaaggagacaacaacacaaaatcatataaaacatagtaccaaacatgaatggcttcaaggctagcaaatgttcgaggacacttgatctgcaccaatgaggacacttcaagttgttgtctcaatctttccagttgacctttggcgagcaaaacacagagaagcaagcacatgccattctcgcttattctttggatcaaggtgccagtatcttagacacagtagaaattttccaactaacaaggaaaatcgagggtcaactgatctttatattatcaggtggatgcaatcaaaaccaagatgcaagttgcaagtctggaacgaccgactaccattcaatgttgcaagtgatttctattgttaagaagctatgagcgaaaattttgtgtctcaagatttgaagcatgagaagcgttgcgggggagaagcttcagtgcaacattgttgttctatagggatcaacatcctcaagatcacttggaaaactttcacgaaaaacttgtaatgcaagcatatgttttattggaaaagttttccaagctgaatttctaaaagcctcctcactgctttagttatgctgaattggaatttgcaactaggggtttcttacaagtaaatttcttagctaaaggtggattttggtctgttcatcgacatgtcctttctaatggtggtagtgtttgttagctacaaatcatcaatcaaagatagtaattatattgcatcactgttttgtatcaattttaagctgtcgtagcaacgcacgggcaccctactagtgcattcataagacaggaatttgcaatgttactaaattgaaagaccaattgtgtaggcatggtgcactgcacattgatctttcttcttctatcgtatgatgtgacttgtgattgctttgccaatgcgacctacatggagctggattgttattacagacaacagaactgtatttatcttgaataatgattgatggttaagtgcatgcgtcactgggttcgagatcgactacagccactgggtggacgagcagaaaaggcacatggcagagctgacgtcgacgctccaggggcagcagacgtcggagctggagctccgcctgctggtggagacgtggctcagcaactacgagcgcctgtttaggatcaaggcgacggcggccaacgcggacgtgttctacgtcatgtcgggcttgtggaagacccccgccaagaggttcttcctctggatcggtgggttccggccgtcggatgtcctcaaggatgtaagcaatctcatgcacctgttgttgctcgcaaggttcatccctcacaagtacaagatcaaagactcgaaagcttaggttgctttgagccgtggtggatctcccggtgtgatgacatggggctgggtctgggagctcttctcaaatctgggggttctcggatttggttcagcttctcactttgtttttaatgagaagaagcagacaacaaattatagtgaaggctcctctcgtcccccgttgcttggtggatcacccccacggaaccagcctagccaaagacagggtgactattcttacctgaatagagtatttcgtgatctctttatccaggaagataccagttcaactatgtgtttgactggaccattctgaagtatcctcagataggctctaacctgtgaaccagggcaggtgaaagaaccagtggagctgctgggccctcaatgaataagatggagaaggccccaggagaagcgttcggtagaaggaaccctagcggtcctatgaaccagaccgacagttatgcgcaacagccacacgagaccgtatccatgtcgctaaagaaaattatgcatagcattgattgatctgggaaaggactatggagagatcactccaaatatctataaatagatccgtgccttttggacctccacttgctgatgacatgatcaaggacataaatagatcactaaaatattgtcaaagacccaaccaaagagagggtacaaatataaactcttgggaactttcttttaatttttacaattattatctataaagtatggtaaacttttctgtccaccttttctcttggcatttttacaattattatctataaagtatggtaactcagcacttctgtgtggctttgaaatgaagagcgccttttgggttttttgctaagagtaatggtttgtgatctcgaccctccttgtgttttgtatttggagaccagtggtgtgtttctaatatatagcaatactctttcaaggcctcacttgtgagtttgagggtgcatttacttgtactagacaagtttgcacttaaacatttgtttactgtaggtatcgtatttattttaatttgcaaatccattctttaagaatgtgagtccagttccactgtatttcatcatggaaatgaatgtgctagaaaagctcttattttgtgtttttcttatttgtgccatgatgcatttttagtttattgaagttctttacttctgttattgcttgggaagcattataatttacattcaatttgcttgtatggttcatgttttcttaactttgtttgagtggctacaagttctgtactaatgatattgctagggaagccttataattttcattccatttgcttggatgattcattttttcttaagagtttttttgctatcagtatgattcgccaaatcaagttttggattaaatttgtggttaaatgaggacttatgcttatttggcttgatttgttgaggtttcatgtgagtctccatgttatgtttgatgagctttgataatttgtagtgttttttggtgcatgtattaatattttttacatggcgttcgaatatatgtatatgtttgcgtttaatcttcattcatgtttagcattgttatcacagtcacaagcagcgcctctttgagatcttaagcatcatttgcaaattccccttggttgtcaatcgctctgctaattcagtcaactcctatcttgtcaggtcaaatagttttgtactcaacttctatccacgcaacagttctgaggcccccgatgaagtatatctcactataattagtgtgatagttcgtcgcagcttctaattcacacaaccctaatgacaaacaaaacattgcttctgattagcagggaagcacaaaatttaaaccatatagctgaattcaaatgataaacagatagaaaaaacacggtatgatagagggacataactaatcagaagtctagactttatgttgtgcatcctgtaatagtaaaaatttccccattgttgtgatgtccattgctgatgttttgctacatattgcttatgcgtcaattccttgctgctgctgagggctgcaaactttcaaaactaggctgcaaggtggtgtctatattgttaagctgaggaggctgaaatgatttcaatcgttgattatgcatttcagcgaggaacacaacgtcagaaaaggcaattgttagttgaactgtactcccctgaacttcagctattcaaggatctgactgtgcaaagttcctcctgatacaatttccaagcttgggttgcagatatcatctgtcctgcttcatatgactattgtgattgataaaatcttggagaaaggtaccgttgagtacttaatagtgcacacggccatattggactactttacaattgcagataagacctcagcctcggatgctatttgtcaacttatcccccttcttactcaaggggcattaatcatagatggagatgaacctacaaacgctccagaactaccaaagaaagcaaaagctaagaagaaaaggtcgaaagagccacttattgttcggatcatgcagacaagggaaggattaaaactaggaattagttgcctcaagtatggcagtgcaaagattagctttggaagatacacgattggccaagcttgagcatggatgaaaattcctagatgatcgcaaagattgttgtggtttgtaatgatgcaatcattggccactctgagcatcaatatgttgctacagggatgcccacaaaagctgctctgaaggacaatgcttccaccagcgcggccgtagaggcggaagcaaggggttgggcttctgtcggtgctggacagcgtgatgccaaacgtgccagccactcttgctgtcgtccgcctccctcttccacgataggttcgcccgcaccgagcctagacgcagatagctctcgaccgtccgctacagtgctgtcgaagagacggtaatggaggaggcctcgcccgagacggtggaggagccactgctggtgagcgcaatcagagggaaaaaggttgagagggcaccaatctggctcatgaggcaagccgagagtgcctcaagattctgaaggtttccgtca

SEQ ID NO: 29709 - DNA, 2574 bp, Zea Mays
ggagtaagaggtttcttcagcacacatgttgtggatcagagccttgtttcttcagaaacatacaatacctagattttctgtgaatattgacaaccactctaattgggatgagatggttgattcatgtgctttgcagttatcacatgacttgattcgacatcatgttcaatttttgcatgatgaatctcataagaataataatcatcaacaaaaagaagtgtttgcttccatgaatattagtgcagaaggtgaacttaagtccagtgagaatgagcgacccttgtgtggagttgcttctaaggagaatccaattcagctggctgcaggcagagctcagcaagagcctccaccatccaatgtggaagataaagtagaaaatgatcaatttttttttgaaggcatagttcaaagaaatccttctagtagacttgtaaaaggcagcgagtcatttgctattgttgcttttggaattcagatactgcagcatcctcagttctcaaaactttgttgggctacgtcaaagctacgggaaggcccctgcactgatataaatggaccatggaaaggctggccatttaattcctgtttgttgcagagcagcaccttacctggtaaatcactaaatggaggggacaatgttgtaaagggaaaggaaaagtctgtctgtgtgagagggctggttgctgttggcttattagcttatagaggtgtctatgggtctgttattgaagtttgtgctgaggtgagaaaggtgttgggactgttagtcggacagattcaaactaaaattttggaaaagagaaatcaattccgaacacatgttgatacccggacaggaacatcccgcatgaagagttcaagtgccaaagaatgtcaaaggaccaagtatgctgcaggaaccaatgtacaagttgctcctgttgccatccctgctgaggttcaagacattccagcccaacacactcaggatcatgaagttgttcctggtcctactgaggtgcaaggcaatccggttaagcatactgcagaacaacctggaagctattcgatggactgtgaccttgataatcatgtgaactctgtttccagcaaggatgcagtagaacacgatcatgtccattcagctttacctgatgtgcataggggcaatacacatgcagatacagtaacaaatgacggagaacctattggagcaaacaacaatgggaaagtgtccaggttaacctacggtgaagataaattcagaccaggtattcaaagatctgaaaaccacacagaatctatggaaggtttaagctgtttgcaaagggcaggagattccgttggatccccagcaagtattaacaatacagaattaccaaagaacaatgtttcttctgaagctcatattgatgataatgagttgaggagaaatgatcttgtgaatgatgttgaatcaaattcgatcgatggtaaacatgacaccatgatgaatctttcagttccaaaaatttcatgtctctacaaatgttgttctccatgtttccaatctatttataagatggttcatggtattatttcaaatactctaaggcctaatctgcattgcttaacagctgatgatatgcatgacattctgtcatcatggtgcttgaatctattagggtctgttagaaagttgtacagctcacatgatgaggccagctgcacagaagtttttgttagaatgtccaataaagaaacccacttagagcattgtgcttgtcagagtgatatctatctttcaagagaatgtgtatgccacttggaaagcaatggggatgttgaaactgcaaatactgattgtcatcctctatcaggacaaagcttaagttttttctttaaagatggtgtatggatgccgttggatctcactgcggaaacaaaacttcattgcagcttcaggagattctgtgtttgctcgatattaggaacagtttctatgctcagctagatcctcagttcatgatattgtctgatgcagttgcaaaagtacatatagtactctaatgctctaagtgtggctccagttgtgcacataacacaacatcatcaggatgtctttggttgattggaacttctcatccttgatgcaacttttgggcaagcttttattgcacataaattgcctctacctgttatggtcattagtggaaaactggctgttgtagttgcttcgtagactgaatatttaaaaagaagctaagatattagtcttcattttttttccaacgaagttacccatgtaggttggactgttgttgctgctggaaatttcacggttagatgatgactgagtgactgacgccatttcagttctcattgtaatatgtattatggcccaattaagcatcaagttgaaacatgattgaatcttatactcacattttgtgttgtacctctattctggtcagtggtatgctttctaatggacaactgacattcagcatgataaatctttataggttatataagaacacactgtttagatgaggttggaattatatttttgtacctgcttataggagtgtgaactgtgaacaagtttttagtaga

SEQ ID NO: 29710 - DNA, 2539 bp, Zea Mays
catcgtgctgcggtgtccgagtcacatcgtcttcccggaaccaacaagtcgttgggtctgaccgtctgccgtggccgtaccgggccgccctgttcatcgggtcaaatccttcgtcttcttcctcgtcgcatcctctccacctaatccacaatccggaacctcaccgtggagaaccccagatcaaaccctttccccgcccattccccttcgcacttccactctcccagtcctccggtgcgattcgtttcttccttacttccctgcccgcccgagggagaagacgaaatcgggcgaggaatccggccgccagggtttcttgatccgggcgcgtgattcgtcgtgcccaggcaccagtgagaaatcaaatcaagaacacgccagcggaagtgagacgagggcgcggggaggaatcaagatcgcttctttgagctgccagttcccccgcgccaatgccggatccggccggcggcgccgggctggcatgttccctctaactgcccctgtccgccgccgcggctcccgatgctcgtgtggtcttcgggagcaggagagggagcagcggccgtcgtgggcggcggctaggagcgaagatgcagatccggctgtcgccgagcatgaggagcatcaccatctccactagccatggcctgctagacttgatgaggctcaaggtcgccgcgcgacacttttcctaccgcaccgtcttccacaccgtcctcatcctcgccttcctcctgcccttcgtcttcatactcaccgccatcatgacgctagagggcttcaacaagtgctcctcactagaggcttgtgagggatttatatgtgatgcttgataaagtaaattctgaggaagcacctcttgacttgaaggttccagaaacttttgatgaatttatctgggacatgaagaataatgattatgatttaaggtcatttgcttttaagctgaaggctacgatggagagcatggataaggaattgaggtcatcaaggctatcagagcagttgaacaagcactatgctgcaattgctattcctaaaggcctttattgcctttcattgcgtttaactgatgaatactcctcaaatgcccttgcaaggaaacaattaccgcccccagagttggtgccttgtctttcagacaactcctatttccattttgtgttagcatcagataacatccttgcagcctcagttgtggtcagatcaacaattagatcatcactgaagcctgagaggattgttttccatgttattactgataaaaagacctatcctgccatgcattcatggtttgctttaaattctctcagtcctgctattgttgaggtgaaaggtgttcatcaatttgattggttaacacaagaaaatgttcctgtacttgaatcaatagaaactcagcgcgctgccagagatcgttaccatggaagtcgccgcccaataaccagtgctaatgatagcccaagggtttttgctgccaagcttcaggcaggaagtccaacatatactaatgtgctcaatcatattcgaatatacatgcctgagttgttcccaagcctcaacaaagtcgtatttcttgatgatgatgttgttgtccagcatgacctatcaccactttgggatattgatctatctgggaaggttaatggcgctgttgagacttgcagaggtggagatagttgggtgatgtctaagaggttcaggaattatttaaacttttctcatcccctcattgcaaaaaactttgatccttcagagtgtgcttgggcatatggtatgaatatttttgacctgaatgcatggaggaagacaacaatcaaagacaaataccatcattgggtcaaggagaacctgaagtcaaacttcacactttggaggctgggaacattaccaccaggccttatagcatttaaaggccatgttcacccaattgatccatcatggcatctgttaggtttggggtatcaggaaaagacagatatcagtagtgttgaacaagcagcagttatacattataacgggcaaagtaaaccatggctggagattggttttaaacatcttcagccattttggacaaaatatgtgaactactcaaatgaattcttaagaaactgccatataatggagccacagttgtagattgtcgtgacaaaataaataaaaagcatatatcaagtgaaattaaattcgttattttggaagtcaacatcagagagtttatgaagggtaactggggagctcagtaacccccctccatggtcatatgcgttgatggtgaatatccaatgaacagagcatctttcccctcataggaccccttcccttttaatttattccatttgtatcatagctcatgaaattatgatattgtttaggatggttcttttgtattcgatggagcaatatatgagttgaattgatggtagtcccatcattattgtaattgattaagagtatacacagttcatgtgaaaagcatggattttgattatgcaaagcaaaccttgtatacttgttacttatttttagattctctcaa

SEQ ID NO: 29711 - DNA, 11509 bp, Zea Mays
acaacaatcacaaccctctctctccctctccttcacgtagccgcctctgaatccccacctctctgctctcccgtcggcctcctccgcgaccgatgtgtgtgccccgccgccggcccaaaacactagaggtgacgagcaggtaaggggttccgatcggagatggcggcggcggcggccgcacatagagccagcttcccgttgcgcctgcagcagatccttgctggaagccgcgctgtctcacctgcgatcaaggtcgagtctgagccgcccgcaaatgtcaaagcatttattgatcaagtaatcaatattccactacatgacattgccataccgctatcaggcttccgttgggagttcaataagggaaatttccaccactggaagcctttatttattcattttgacacatatttcaagacatacatttcttctcggaaggatcttcttttatctgatgatatgactgaggctgaacctatgccaaagaatgccatcttgaaaattttaatagttatgcagattattttggagaactgtcagaatagaagttcttttactggtcttgagcatcttaagcttctcctggcatcgtcagaccctgagatagttgtagcagcattggaaactcttgttgccttggtcaaaataaatccttcaaagttgcatatgaatggaaagctaattagctgcggatccataaacacccatcttctatcattggcccaaggatggggcagcaaggaggaaggcctaggcatatattcttgtgttgtggcaaatgaaggaaaccagcaggggggcctgtccttgttcccagtagacttggagagcaaatatcagcatcgtcttggttcaactcttcattttgagtataatttgggttctgcacagtaccctgaccaaactagtgacaagggcaagtcatctaatttgtgtgtgatacatattccagacatgcatcttcagaaagaggatgacttgagcatactgaagcaatgcgtggacaaattcaatgtgcctccagagcacaggtttgcattgcttacaaggataagatatgcccgcgccttcaactccacacggacttgtagtatctatagccgcataagtcttctttcgttcattgtacttgtgcaatcaagtgatgctcacgatgagctcacatatttctttacaaatgaaccagaatacataaacgagttaatcaggcttgttcggtcagaagattctgtccctgggcccattcgtgcacttgctatgctagcactgggagcacagctggcagcatatgcatcatctcatgagcgtgctaggatattgagtggctcaagtatcatttctgctggtggaaatcgtatggtgttgctcagtgtcttgcagaaagcaatattctcactcaatagcccaaatgatgcctcatctcctctaattgttgatgctcttcttcagttttttctgctccatgtattgtcctcatcaagttcagggactacggttagaggctcaggcatggttcctcctctcttgcccctgctgcgagataatgattcttctcatatgcatcttgtctgcttggcagtgaagactcttcaaaagcttatggagtacagcagccctgctgtttctctgttcaaagacttgggtggtgtagaccttttgtctcggaggttacatgtagaagtgcagcgtgttattggtactgctgatggtcataattcaatggttactgatgcagttaaatcaaaagaggaccacctgtactcccagaagcgattgattaaagctttgcttaaggctttggggtcttctacttattcccctgggattcctgctcgttctcaaagctcccaagataattcattgcctgtgtcactttcccttatatttcagaatgtagaaaagtttgggggcgacatttatttttcagcagttacagttatgagcgaaataatccataaagatcctacatgctttcctgctttgaaagaacttggtcttccagatgcttttctctcatcagtgactgctggggtaataccatcttgtaaagccctgatctgtgttcctaatggcctgggtgcaatatgcctcaataaccaaggacttgaggctgtcagggaaacttcagcactacgatttcttgtatataccttcactagcaggaaatacttgataccactgaatgagggcgttgttcttctagctaatgcagcagaagagcttcttcgtcatgtgcaatccctgagaagtattggtgttgacatcattattgaaataatcaataaactaagttcatctctgaaagatagaaacaatgaaacagccatcttggaagaaaaaacagatatggaaactgatgttgaaggtcgtgatttggtaggtggtatggattccagtgtggagggcagtaatgatgaacagttttctcatttgagcattttccatgtgatggtattggttcaccggacaatggaaaactctgaaacctgccggttatttgtcgaaaagggaggtctaaatgctcttttgacactcttgttgaggcctagcattacactgtcatctggagggatgcctattgctttgcatagcacaatggtgttcaagggatttactcagcatcactctactccacttgcacgtgcattttgctcgtctttaagggagcatttgaagagtgcattaggggaacttgataaagtttctaactcatttgagatgaccaagattgaaaaaggagcgataccttctttgtttgttgttgaatttctgctatttttagctgcctcaaaagacaatcgttggatgaatgctttgctctcagaatttggcgatgctagcagggaggtcctggaagatattgggcgagtccaccgggaagtgctttggaaaatttcgctttttgaagaaaacaagattgacgctgaaattagtttatcttcttccacatctgaagcccagcagcctgacttgtctgccagcgacattggtgatagcagatacacttctttcaggcaatatcttgatccaattttaaggcgaaggggttctgggtggaacatagagtctcaagtgtctgacctcattaatatgtatcgagacattggcagtgcagctagtgactctcagagagttggttctgatagatattctagtctgggtttgccctcaagttcccaggaccagtcttccagttcatctgatgcaaatgtcagcacaagatcagaagaggaaaagaaaaattctgagcattcctcctgctttgacatgatgagatctctctcctaccatatcaaccatctttttatggagcttggtaaagcaatgcttcttacatctcgtcgggagaacagtcctgtaaacctatccccatccgttatatctgttgctaacaacattgcttctattatgttggaacacctcaactttgaaggacattcggtaagttctgagagggagatgactgttaccacaaaatgccaatatcttggaaaggtagctgaatttattgatgggatattattagatcggccagaatcctgtaatccaattatggtaaattcattctattgctgtggtgtcattcaggccatcctgaccacatttcaggccaccagtgagttgctcttcacaatgagcaggccaccatcttcacctatggagacagatagtaaaactggaaaggatggaaaggatatgaattcttcatggatctatggtcccctcatcagctatggcgcaattatggatcatcttgtgacctcgtcttttattctctcttcatcaactagacaattacttgagcagcctatttttaatggatctgtaaggtttcctcaagatgctgagaggttcatgaagttacttcagtctaaggtgttgaagacagttcttcccatctgggctcatcctgagtttccagaatgcaacattgagttgattagttcagtcatgtccatcatgaggcatgtttgctctggggtggaagtgaaaaacactgttggcaatgatggtgctcgtttaactggtccacctcctgatgagagtgcaatttcattgattgtagagatggggttttctcgtgcaagagctgaagaagcattaagacaagttggaaccaacagtgttgaaatagcaactgattggttattctcacacccagaggatgaacttgctcgggcgctcgcaatgtctcttgggaattctgatacacctgcacaagagggaaatggtaggtccaatgaccttgagctggaggaagtaacagtccagctgcctcctatagatgaaatgttacactcatgttttcagctacttcagacaaaggaagcattagctttccctgtcagggatatgcttgttactatcagctcacagaaggatggccaaaaccgagtaaaggtgcttacatatttgattgaaaatctgaaacaatgtgtggtggcatctgagccttcaaatgatactgcactgtctgctcttttacatgttcttgctttgattctccatggagatactgctgctcgtgaagttgcctcaaaggcaggaattgtgaaggttgctttagatctgctttccagctgggagttggaacttagggaaagtggcatgattgaggttcctaattgggtaagttcctgtttcctttctgttgatcagatgctccagttggaaccaaagttgccagatgttacagagctagatgttctgaaaagggataattcaaatataaaaacatcacttgtgattgatgagagcaagaaaaaagattcagaatccttgtcaagtgttggattactagacatggaggaccagtatcaacttttgaagatctgttgcaagtgcatagaaaaacagttgccttcggcttccatgcatgctattcttcagctctctgcaacactgacaaaagttcatgcagctgctatttgtttccttgagtctggtggtctgaatgcattgctatcattgccaacaagtagtttgttttctgggttcaacagtgtggcttctacaataattcgtcatattttggaggaccctcacacccttcagcaagcaatggaattagagatacgtcacagtcttgtcacagctgctaatcgacatacaaatcccagggttaccccacgcaattttgtccagaatttggcatttgtcatatatagggacccagtgatatttatgaaagctgtccagtctgtgtgccagattgagatggttggagatagaccgtatgttgttctgttaaaggatcgtgagaaagaaaggagcaaggagaaggataaggacaaatcagttgataaggataaagcaacaggtgcagtcgctaaggtagtgtccggggacacagctgcaggatctcctgcaaatgctcaggggaaacagtctgatttgaattcaagaaacgtgaaatctcaccgcaagccaccccaaagttttgtcactgttatagagcatctcttagatctggtgatgtcctttgttccgccaccccgtccagaggatcaagctgatgttgtctctggtactgccttatcttctgacatggacattgactgcagttctgcaaaagggaaagggaaagctgtgtctgtcccacctgaagagagcaagcatgctatccaagagtctactgcatcccttgccaaagcttcatttttccttaagttgatgacagatgtgttgttaacttacacatcatccattcaagttgttcttcgtcatgatgctgatctgagcaacatgcacggtccaaatcgaacaaattctggtctaattagtggtggaatctttaaccatatcctgcagcatttccttcctcatgccacaaagcaaaagaaagagagaaaaagtgatggagattggatgtataaattggcaacaagggctaatcagttcttggtggcttcatctattcgttctgcagaggcccgaaaaaaagttttttctgaaatctgcaatatacttcttgatttcaccgactcgtctgcagcttacaaagccccagtagcaaggatgaatgtgtatgttgatttactgaatgatattctgtcagcccgatcaccaactggctcctcattgtcagcagaatctgcagttacatttgttgaagttggtcttgctccttcattattgaaaatgcttcaaaatcttgatttggatcaccctgattctgcaaagatcgttactgccattgttaaggccctggaactcgtcagtaaggaacatgttcattcagcagataatgcaaaaggagagaactcatcaaagattgcttccgacagcaacaatgtgaattcatcacctaataggttccaggctcttgacatgacttctcagcccacagagatgattactgatcacagggaaacatttaatgctgaccaaacttcacaaagttcagattcagtggcagatgagatggatcatgatcgtgatatggatggtggctttgctcgtgatggtgaagatgattttatgcatgagatggctggcgatggaactggtaatgaatctacaatggaaatcagatttgaaatttcacgcaatagagacgatatggctgatgatgatgatgatgatgacaacactgatgaagatatgtctgcagaggatgatgaggaggttaatgaagatgatgaagacgaagatgaggagaataacaatttggaggaagatgatgcccatcagatgtctcatcctgacacagaccaggaagaccgtgaaatggatgaagaagaatttgacgaggatctactagaagatgatgacgatgaggatgaggagggagtcatccttcgcctggaggaggggattaatggcattaatgtgtttgaccatattgaagtatttggtggtagcaacaatttgtctggggatacactgcgtgtgatgcctctggacatttttggtacaagaaggcaaggccgaagtacctccatatacaatcttcttggcagggctagtgatcatggtgttcttgatcacccacttcttgaagagccttcctcgacattgaatttttcacatcaagaacaaccagagaatcttgttgagatggctttctctgatcgaaatcacgaaggtagctcctcccgtttggatgctatattccgcagcttgcgaagtgggcgtaatggacatcgctttaatatgtggctagatgacggtccacaacgcaatggatctgctgcccctgcagtacctgaaggcattgaagaattgctgatctctcatttgagtcggcccactcaacaacctggtgcccagactgttggtggtactcaagaaaatgaccaacccaaacatggctcagctgctgaggcaagggaaggatcgccagctcagcaaaatgagaacagtgaaaatacaacgaatcctgtagatctgtcagaaagtgctggccctgcacctcctgatagtgatgcacttcaaagagttgtgtccaatgcaagtattgagcatgctacggagatgcagtatgaacgcagcgacactataacacgtgatgttgaagcagtgagccaagcaagcagtggcagtggtgctactttaggggagagcctcagaagtttagaggttgaaataggaagtgttgaagggcatgatgatggtgaccggcatggaacttcaggggcctcagaacgattacctttgggtgatattcaagctgctgctcgatcacgcaggccatctggaaatgctgtggctgtaagcagtagagatatgtctctggagagtgttagtgaggttcctcaaaatccagatcaagaacctgatcataatgctagtgaggggaatcaggagcctagaggggttggtgctgacacaattgatcctacatttttggaggctcttcctgaggacttgcgagctgaagttctttcttcacgtcaaaatcaagtgactcagacttctaatgaccaacctcagaatgatggtgatattgatcctgaattccttgctgcactcccccttgatataagagaggaggtgctagctcaacaacgtagtcaaaggatacaacaacaatcacaagaattagaaggacaaccagttgaaatggatgctgtttcaattattgcaacattcccttcagaaattcgggaagaggtccttttgacatctcctgacaccctcctagctacactcacacctgcactagttgctgaggccaacatgttaagggagagatttgctcatcggtatcacagtagttctctttttggtatgaactccaggaacaggagaggtgagtcctcccgacgtgacataatggcagcaggacttgataggaacacaggtgatccctccagatcaactagcaaaccaattgagattgaaggtgctcctcttgttgatgaagatggccttaaagctcttattcggttacttcgagttgttcagcccctatacaagggtcagctgcagaggcttcttgtgaacctttgcacgcatcgggataacagacaggccttggttcaaattctggtggacatgcttatgcttgatctgcaggggttttcaaagaaatcagtagatgcatctgagccaccatttaggttgtatggatgccatgcaaatatcacatattcacgtcctcaatcttcaaatggtgttcctccattggtttcacgtcgtgtgctcgaaacactgacaaacttggcaagaagccatccaaatgttgctaaactcttgctctttcttgagttcccttgcccatcaagatgtcgctctgaagcacatgatcataggcatggcaaggctgttctagaagatggtgaagaacggaaagcctttgcggttgttcttttgttaactctgttgaatcagccactttatatgagaagtgtagctcatcttgaacagttactaaacctccttgaagttgtcatgcataacgctgagaatgaaattaatcaagctaagctagaagcgtcatctgagaagccatctgagaatgcagtgaaagatgtcaaagataacaccagcatttctgattcatatggatcaaagtcgaatcctgaggatggtagcaaagcccttgctgttgacaataaaagtaacttgcgagctgttctgcgaagtcttccccaatcagagcttagattgctatgttcattgcttgcgcatgatggattgtcggacagcgcttatctccttgtaggtgaagtgttgaaaaagattgtggctctggcccctttcttctgttgccatttcataaatgagcttgcacgatcaatgcaaagcttgacattttgtgcaatgaaggagcttcgtttgtacgagaattctgaaaaggctcttcttagttctacatcagccaatggaactgcgattcttagagttgtgcaggctttgagttctcttgtcagtactcttcaagatagaaaggatccagaacagcctgctgagaaggaccattcagatgcagtttcccagatttctgaaattaacacagcattggatgctttgtggttggaattgagcaactgcataagcaaaatagaaagctcttcagagtatgcatcaaatctaactcctgcttctgcaagtgcagctacattaacagcaggagtagcacctccattgcctgcaggaactcaaaacatattaccatatatagagtcattttttgtgacatgtgagaagttgcgtcctgggcaacctgatgctgtacaagaggcttcgacttctgatatggaagatgcttcaacatctagtggtgggcagagatcatattcctgtcaagctagtcttgacgagaagcaaaatgcttttgtgaaattctcagagaagcacagaagattgctgaatgcattcatccatcaaaaccctggattactggagaagtcattctcgctgatgttaaaaattcctcgcctgattgattttgacaacaaacgtgcatatttccggtctaaaatcaagcatcagtatgatcatcatcatcataatcctgttagaatttctgtgcgtcgttcatatattcttgaggactcctacaatcagcttaggatgcgctctcctcaggacttgaagggtagactcactgttcattttcaaggagaagaaggaattgatgctggtgggctgacaagggaatggtaccaatcgctttcacgagtcatttttgacaagagtgcccttctatttacaacagtcgggaatgatttgacgtttcaaccgaatcctaattctgtatatcaaactgagcacctctcatactttaaatttgctggacgagtggttggcaaagctctcttcgatggtcagcttttagatgctcattttactagatctttctacaaacacatacttggtgtcagggttacataccatgacattgaagctatcgatcctgcatactacaagaatttgaaatggatgctcgagaatgacataagtgatgttttggatctcaccttcagcatggatgcggacgaagagaaactgatattgtacgagaaggcagaggagggcgtaacatcagggttactgaggagaataaacatcaatatgtagatcgggtagcagagcatcgactgacgactgcaatcaggcctcaaattaatgccttcctggaagggtttaatgaactcattccacgggagctgatatctatcttcaacgacaaagagcttgaacttctgattagcggtcttccagatattgacttggacgatttgaaagcaaatacagaatattctggctacagcatagcctctccagtcatccagtggttctgggaaatcgttcaggggttcagcaaggaagacaaagcccggttcctccagttcgtcactggcacttcaaaggtaccgttggaaggttttagtgcacttcaagggatctctgggccacaaaggtttcagatacataaggcctacggcagcacgaaccatctgccttcagctcatacttgctttaaccaactagacttgcctgagtacacatccaaagagcagctccaggagcggttactattggcaatccacgaagcaaatgaaggtttcggatttggctaatcagttatactcgtttgtccgtgccctgagaactgcaataggcgagcagcacgtgtgtggctgatcacattatgaactccacgtgtgtgatgagagatggccggagagaacatgtccaggatagacgaatgcccgtgggagaggtactactgttaagagagagagcgactattttgtgtttataatctttgtctgtttgtagtttttgccttacattggtcgttgctccgaagtttttccccttcttttcgttcatagactggtgtaagttgtaaccgaacattatgtcaaatgcaggtcatcttacgctggaatgttatacctcccctaatctgttaaaacaactgtaaattccgaaggactatttattctaatattattagagcgaaaattctctctttcgctctcccaatcctgtccatctcctactgcctcttattccgtcgtctctctcttacgcttcgttctttcagttatat

SEQ ID NO: 29712 - DNA, 2191 bp, Zea Mays
gttggattggaggagcagtagcagatggtctttcacttggagcctggtgtgcatgtgcatccccgtcctctccagtcctatcctcctgtccgatggctgcaagttcctccccttctagccggagcctcctcgccacacggcccctcttcttgccgttgaggacgaggaggtcgcttccacccacgtccatcccgcctcgcctcagctgtctccgatctccttctgcgtcctcctccccgtcggcgtcggcatcggcgtacaacggctgggccgacctcgccgcggcgcccgacaccccttttcccttccccctatccttcccgctgcagcccaccacgcatggcctcctcgtcctcctccccgccgccgccatcgccctctccctctccctcgcccgcctacctcccctccccctcctcgcggccgcctttaccgctggattcgcagccaggcacctgtcctcctcagcgcaggcacagtcccccggccgcctctccgccctcctcgccgatctcgacgcccatgcccgcgccttgagggagcagctggtctccgacgcccacccgggtctcctcgtccaggccgtcgatcgcctgcgggatgctgtcgccgacgccgccacagtggccgccgaacagggcgacaccggccgcaccatgtcagacgcgctcggaccgctcggggaggtcgccgactatctcggtgcctgggctcgccacgccgtgcgggacctcagcctcagcccgccaaggaagaagcctgcaaaaggcaacaacagttcagatgttcaagccgcggccaatcccaacaaccgggctgctcaacagcaacaggaaattgggagcaataagcccgtggactctactctgcaacagcagccttttgcatttgatccatctgcagtcgatgatgcaaatggaaggccgcttggcatgttgcagtttgacgaggatgacaatggatccaaggatgcagggaccggtgctcaggccacgctggagagactggtgtccaagcacaggcatcggcgtgaccctgatggccccccgtttgaaggcaggttttccgacgagtcatcatctttgctggagaggacgcttgaaatccgggacaggtcctacaggctcaagatcggtgtgatgagcgaagcgcatcctcctgtatatggtgacgatgaaagcgccgccagtgctgctgattcagatggcgaggagtttagccgaaacgtcaaggaagctgcggagatcctgaggaaggccagggcatccatggctgacgaagagaccgcagacgcactgctgtacaaatcagctaggctcctttccacagctgtggctttgaggccaacaagcctggtagcagtgggtcagctagggaacacgtacctcctccacggagagctcaagctcaaggttagtcgcgagctgaggacactcttggccagcagcggcgcctttctgaacggaagagagcgtgctccacggtccaggaaggtagacaggaggatggtaagcagagagagcatctcatccgctcttgtggatgtatgcgaggaatgcgagagcctccttgtcgaggccggcagaagctacaggatggccctctccatcgattcaggtgacgccaaggcattgtacaactgggggctggcacttattttccgggcacaattgctcgctgacatcggaccggaagcagcagccgacgctgaccgggtgtatctagctgcaatcgacaagttcgacgccatgttgtcgaggagcaacacttatgctccagaagatggggcactgcgttgcagcagcgctcccatctgcggcctcggagcaacggtgagaagataaggcttctggagcaggcgaagagcttgttcgaagatgtgctgtatgtggaagcagacaacaagatggtgagggaggcgctgtcatcgtgcatatcagagctcaactaccatggccgctggttataaccgtgaggagctttgtagcaactagcaagcgaggggaggagggctaatgataacttttgagttttgaatgatgtattagcttctagctttttatgctgacaagaagctcaaacaatatcttgcaatacaatgcaatatgacctttttttttcttgtatggaacgtgtggttgaatcgattaatacaagtgaatgaaaaagagcaagcatctttcttgaaaat

SEQ ID NO: 29713 - DNA, 2343 bp, Zea Mays
gtcagtgatggctagacttctcactccctcccagcttcttcggacgcttcgcttgtctaatcgctgcaactgcagcttgctcgctgacttgccgccggcgagccccgctccgagcatctccgctgctgcttctgccgaatcccagagctccttctcccgcttgccccctttccctcctgtcacattgattcgattttcgtcgcccatggagctacaaattaagtgtaggaaccaattaaaagcttgccaaaactagggcggcggcatcagcattcagcaataccctaggcgggctctcctcgcctccacagctccaggaagccgacccagagcagcacagcgccgcccattctgtctctctcggtctcggcagcgtaggcagcgtcaccctccgcttaaaccaccagcaccagctgctggtgcgccgccccgcccggcaccgccgctcctctacctcttcctggtggattgattattgtgagtttatccctgccccaatccatctgtccatggtccgcgtgggcttgtcttccgcgcccggggtcaatctgacagagcaaatcgataatgtttttgaccaactgatcaacaagatagaacatgcggattttgatacgcggcctttcttgaaacaattgaatgtgttaggccgctatgaaccaatcaagcggagtatccttgccaactagacttttgaatcttcactgtaatataggagtattgtttttctcaagataatttatttgcacatttgcctcgtttaattcttactgttcatcatcaaaatatcatattctgacacgtccttgttcaacatattcaaactttctattctatgcctcttttatcagtcaagttagtatttcatccaacatatcctgtaacttgactacattacatagtcctagcctgaagtagaaatcagtgcaggaacgaaactagcaattcaatactgtgactacaacagggatatgtcttaatgttatatcatttttctttttcttattgagagtcgagtcaaattgtttttctagcttctgagttctgagtgaaaaaagagaatcgaaatattactataccttggtgaatttgaatatgtgcctttttatggatatgtccacatttttattgcctttaattctactaagatgtatattgcactaagagacgcattgaagattatggcatttcttgtcactgtaagccttctcctggttcatcagttgtgtgtggcagagactgccattgtggcatgcttttctcttgctgttcatcacaatgtgaatgtgatgacacatgcaccaataaatcattccagcacagacctcttaagaaaaccaaattgattaagacagagaaatgtggtcatggattggttgctgaggatgaaataaagaaaggagaatttgttattgagtatgttggagaagttattgatgacagaacatgtgagaataggctatggacaatgaaaaggctgcttgacactgacttctacctttgtgaggtcagtagtaatatggtcattgatgcaacaaacaagggaaaccggtcccgattcataaaccatagctgtgaaccaaacacagcgatgcagaaatggactgttgatggagagaccagggttggaatttttgcacttcgtgacataaagataggggaggagctgacctatgactataaaaaaatgctaggcacgacgaagtattcaggaagctcacagaatcatcatgccaagaagaaaaagcggaaaacaagttgtgagaattgcatacagcagtttcttcggctgtggcatccacataaaaaaatgtatgttggttgttggataattgacttcgatcaagaaactaaaatgcatactctgaagttcaatgatctccatactgaaaagttcaatttgaaggaagaagaatggcacttcttagagggttgccatggtttgctgcaccgccggcctactagttgggggttcatttgcgatggcagcatagacagacggacggccatttttcttccattttggagtaatagtccaagcctgaactgtgacattcgtgcatgcttatacgtgaaagtgtacctgagagcagattatacgtgaaagtgtatcagcgttgcatatgcatggacggttgggtcccccagcgttttttttggtgctgcggcgatgcttgctgcctcgacaaacaagcatgtttcaagcgcctgcagctcatgtggtggcctacaaccgcaaccccccttccgttaccatcttccttctactacagtacagtactgtttccaacaacacatcaccaaccaatactacactacacaactacggcacagaaaataaaa

SEQ ID NO: 29714 - DNA, 2971 bp, Zea Mays
gacggagtgaggatgggcccttcctcccccgcgctcgcccctacggcgaccgagctccaaagcagcgccaccgccagatccgcccgcctccggccgtccccggctcctgccggctgcaccaagtcagatccaaccccgcccccccctccagcaccaccagctcgccctcctgtgtcccagctcccaccgccaccgccctcacatctaccgccggcccgcccttctgatccaactgcatgccgtgcgccggcggccccctaccaaaccaagcgggtgaggtttgcattcactgcaagcaccacgccgccccgcattcactacccctccgccgtatcccgcagccacagtgccacccccgccccgacagctggttcgaagcccccgtctggaagctgcgaccgcattgaagatgaggatcttgaaggatggacgacgattcggcgcaggcgtggacgcgccgcccgcgcaggcctaggctgcgccccagcggcgcctcgccttctctcagcccatgcccctagccgtctgatgtttggatgatttctcactttgctagctgcggtggacaggtggtaaagtgaaccagaactggtaaaatgctggcatgtgattgggaaaacaaacagctgacatggtggtttcttttctgctacactcttgtttattaactatactcattacattctgtgttggagttattccagtcagtgcagttcttgcagacaaggatgtcatgctgtgtatcagaccatgggaacatggtagtatgaccaaatctctatacttttctctgctctcttttcttctttccaacttttctccgcttcaaggttttccaatcaaggaaaaaaaatgcttacgtgctgacgtcaaaacttagaattaggggcatgttgatgttcaaattgaagcatcaaagaaccatatagtgccgccggccaacagcagcatcaaagaacaatattgattgtcttgcaaagtgccgccggccaacagcagcatccaagattctcttcttctttttttttgtgagagggcctctagccgagttagttaggtggtctgacattcttcgggttctgggttcgacttgttgtggaagcgaattttagctgtggttaaaaaatcacctcaactgtctcacgccaaatcctatgtgaggaaatcttttcttaatataatactcggggctatcttatctcgtagatcgatttttttaatttctttttctcaatatattccttttttttgtctccacggagtgaactaatttagataaagtttgtgttaaatcactaacatgttgtttttactgtatttaccccatctttgatgttcgccagcctcgtgaagacagacaccctcgcagacgtcatttctttatgaatagtaagatgcatgcatcatcatgtatgatttaatcacagcctcaaggaaggactgaacggtcacagaaagtaccctcagtccataaatatatgacacgttgactttttaaaaaaactttgaccactcgtctcatttaaaaaagaatgagttattatttatttttatgatttattttatcacttaaggttgtttgtgtttgacttaaaattttatattttaaataaatattttgaataagggagtgactaaagtttttttaaaaaaagtcaacggtgtcatatatttgtgaatgaagttagtactggtttgtagatgtttaagtgccatatgaacttttgaacacaacacacatcttattaggtttttatgacagttaaaccctgtttggttagagggactaatctttagtccctaatttttagtccctattttgccaaacgaaggactgaattagggactaattagctttagtctttatgctctcacatgggtgctaaaagggaccaaatgacaatatttactccaattatccttgccttgcctagaaagctaacgtcatacacaataaacaagaaaatagatattttagtctttatgtgttgtatttaatgtatttagaatcttttttacaaccaaacaagatagtgactaaactttagtctatgactaatggagccaaacggggccttaatatagcgatctcattcatgattcgtggcactctgggttggacagcttgcaacatcttgaagccactgtagccctttaggtccttggtcatggccttatgctcagcaggaaaccttggaaacctgctactgatcattgtcccggctgtatgcgttgaaagaagggaacccgtttgggaacgatcccaagcatttgctgctcatgcagtctcctactcgtccttgtccatgggccatggctgatggctgtagtgtaggttctgctctcttttagttccaaaaaggggcaacctgtcttgtttattcaaagatgttgttgtgtcaaaggtttagattactgagggggttaattattagggatccgctgtgtggagataagatttcagggaaatatttttagtggagcccctgtacatagtttttgaggaaaaaaatccttgaaagacttttgggcacggatcttaaaaccttttttagactacatctttgaacatcattgttgcacacagagtgcaaataactccagcttcatgttgtatcaaaattaaatagacataatatgtaatggtctactagttatatgtccgtgcattgcttcgtttatatatatatatatagtttatctattaagagccctgggctctatataactgtagagagccccagcccacgtccgatcactttttacgcaagcgaacagatttagcgtaaacggaaacccattttagcgtaaacagagtaacaaccgcgagccctacatgtttacgttattccattcttccgtttatacataatagtgatttagcataactacttcagccgacccacgttccagaaataaaggaatgggcccactaccccacttcccacgcggtcaaacacttctataccct

SEQ ID NO: 29715 - DNA, 1527 bp, Zea Mays
aagcgacatgttcacgcctgttggttcggttcggtttcggcatggaggtagctgagagaccgatggcctcgtcccacctggcagctctcgtctccctgctgatcccctgcctccttgcgcttctgctgctccgcctcgccgccgtgctggacccggaccccgacgccgccgtgccccgcatcaaggcggccgcgcccctccctctccggttccgccacgatggcgccttcaagatcctccaggggacaacatatttgggggcagtgcaactgacgcagcagaatcactactcagagcaatcagccctgctatcgaatacagggtgccatgggctgccatcttaggtaatcatgaccaagagtcgacaatgacccgggaggagctgatgaccttcatgtctctaatggactactcggtatctcaagtaaacccacctggttttttggtacatgggtttgggaattatcatgttggcatccatgggccattcggatccgagctggtcaatactagcctgcttaacctttacttcctggatagcggtgatcgtgaaatggtgaatggagttaaaacatatggatggatcagagagtctcaactcgcctggcttcgttctacttccctggagcttcagaaaaaaatacatgccccagcattagcgttcttccacataccaatcccagaggtccgagggctctggtactcaggcttcaagggtcagtaccaggaaggggtggcttgctcatctgtacattctggtgtccttgggacccttgtctccatgggagatgtaaaatctgtctttttgggtcacgaccatcttaatgatttttgtggcaatctcaatgggatctggttctgttatggtggtggctttggttatcatgcctatggaagaccccattggccaaggagagctcggataatttacagtgaactcaaaaaggggcagaggtcgtggttggaagttgactcgatctcgacttggaagctgctagatgatgaaaagctctcaaaaattgatgaacaggttatctggagacatagcacagatgattctgaccacagagtctacttgtgaagaccatgaacctaaaactacttcctgtatgtgtcatgtgtataatgtttgtcgcaaagattcctccaattttataggtcgattgattattggtagtatgatgtggcacggacctattttaggtttcacatctggttcaatgttgatatgctaaccctggtttgggtcgctgacctgttttcgaccttcttgagaagctgccaattggtccccttgttttgggacttgggagcatcaccacatcataatctgtttcacaacagatgattcttaatttttttttttgtaattcacggcagatgatcctgaccacaatgtttacttgtcaaggccagagccataagacaacttccagcttgtgtcatctgttccatgtataatatctgtaaacaagtatggtccagttttgtttgtgggctcgttgaattattcttggcaatatgtgt

SEQ ID NO: 29716 - DNA, 1576 bp, Zea Mays
caacctcacagcgtcgtgacgtcgtcctctgcttcgcaagcgcccgagccgcgcgccgccgaacccgccgcctcctccagcctccgggcacatcggagcacgccagccaatcgcaccccgacacggcggcaccggaggaacccctccttcttggtcgtagcctccgtggcctccctcccctcaccccttccggtgttggattgagggtggagcggagatccgccacggcttgattgatccctggctcgtcctcctacgcaggatcgatacaccatataatttgggattctaaggtcccggtgcagcttcttctcgcagaagtttacgccctatgcccctcgctaagcccacccctgtgattccgccgtgacgcgtcatccacgggagaaacgccatgatgtcgaggttgataatttcgtccatgcagatatgcacccaggaaatattttagttcgtgttgcacaaccaaagaactcaaataacacccttaaaaagtcaaggccacatgtagtcttcctggatgtaggaatgactgctgaactttcaagtaatgaccgtgtgaatttacttgagttcttcaaggctgttgctcgccgagatggtcgtacagctgcagaaagtactctaaagttgtcaaaacaacagaattgtccaaatccaaaagcttttattgaggaagttgaacgatcattctctttttggggcactgctgaaggtgatgctatccacccagctgagtgtatgcaccaactgcttgagcaagttcgatgtcataaagtgaatatcgatggcaatgtttgtactgtcatggtgactacattagttcttgagggctggcaacgtaagttggatccagattataatgttatgaagactctgcaaactttactttttaaggaagattgggcgaagtctcttcaatacactatccaagggctcatggcgccttagggtcgtccgcaatcctttctaaagttttgatctggtttgtgttcgactggaggatcctcttctctcaccatcacgtctggcttcttttctacgttatttcacgtttcgtttctctgtacctgtcctggcgttgtgctgctaaagcagccttgatgataaagtaataactgcagtaaaaattttcagaagctaccagagtactatgctgctcagctctgggctgtcttcttatatgttcttgatgaagggccaaagaattaggtccttttcccccccctcctaccaacacttttgacaatagctcttagatgatgtagcaaaaggcgttctgttctgatgatcttttttgtaactggagagattgtatccgtggactggagagttgcttatgtacagacagagatactgttaatctcgaaggaatccacttgtcaactgacaattattcccaggaaaaggctcccagttttttcttgttttacatgtattagcaatgctgaatgtctgaaatttgaatgattttgctggtagggaggtatattgaacaacattgtggttacccttatatgtttgtagcgttttataggtcataaattaacttggaacatgaagcgtgctctcgtca

SEQ ID NO: 29717 - DNA, 1743 bp, Zea Mays
cactctgggtcctggtcttctcagcccattcccaccggccagtcggccacccaccgtgcctcgtcgtcgccgcagcccgcacctgcagccgccatgtggaggggcggcgccaccaccgccttcgtcgctagggccctccgctcgcgcctcctcctcgaccccatccaccacccggtcacgtcgctcgctcctatttcttcggcgcgtacctcttcctcttccacctcgtccactgccgcggcgaacaccatcgtggaagaagcggcggtggcggcggctgtatccgtttcgcagcataccggatccatctccgacgcgctacggcactatgggaagtgctaccgggagctctcgaaagtccgcctcagtgctcttgttgtggcaacttcgggggctggttatgtgcttggtagtggcaacatcgtggatattgctggactttgttgcacatgtgctggtacaatgatggttgcagcatctgcaaataccctcaaccaggtgttcgagataaaaaatgatgctaaaatgaaaaggacaatgcgacgtcccctgccatctggtcgcatcagtcctgcacatgctgcaatgtgggctacaagtgttggagttgcaggaacagctttgttggcctggaaggtttgtgcaggctaatggcttggcagctgggcttgcagcttctaaccttgttctgtacgcatttgtttatacgccgttgaagcaaatacaccctgttaatacatgggttggggcaatcgttggtgccattccaccacttttggggtgggcggcagcttcaactgaactgtcactaaatgccatgatactccctgccgcattgtactattggcaaatacctcattttatggctcttgcgtacttatgtcgaaacgattaccttgctggagggtatcgaatgttttcttttgctgatccaactggtaaaagaactgcatgggtgtcgctaagaaattgtctgtacatgctacctttgggtttatttgcatacaactggggcctcacatctgagtggtttagttttgaagcttcactcctaacattaggccttaccattggatctctatcatttgtgctgaaaccaagtccaaagactgcgaggagaatgttctatggtagcctgctgtatctccctgccttcatggctgggcttctgttgcatcggctgccaaatgaacaaaaggcgcacaacttggctgagaaaagtgaactggacggagttctgtacggggccgatctgcaggacaaagaaagagccacacagaaacgccaagacaggaatccttccagcatgcaatcacgccctccggttgcatatgcttctgtggctccattccctttcctaccggtgcccatatatgactcatgaaaagtttccctggttcttcctgcagcagtgggacagtcagagcaatgtattcatgcacttttggcttacatgaatttctgccaccaagagttctttggtgcgtctgttgttaaaattataggatagttttttaatggattgagctttttgcggctcacctaaaagtaaaaaaaaagtgctgtggacactcgttctgatgcctcgggtaacacggatatgctgatgtactcttgtgcttttcttgtaagattcgatgtccggaaacatgcaataattgaccgtagacagaagtaacatggtaatggacatttagggcgtgtttggtttgaggaatgaagtgatttatcttcttctcactt

SEQ ID NO: 29718 - DNA, 627 bp, Zea Mays
caataccactcggtccgcgacgctttcctctcccttcgcgatgccgacgatttcctcgcgttgcctcccttcgcgccgccgcctccctcgcgtcggccgtcgcctccccccacatcggccgtcacccctcaccgatgaagctcaaaggaagtgacttgtcaaattatcaatgaagaatgtcaggagcatttggtgaagagtgatcggcatatcaacttctggaagttgaattttgaagacgtttgaagtcctaagacatttctagaacatgaaaattatgaattcctaaggctagctttttttgactgactgtgttgttgactttgtgtgaaaataacccgttgtttgaaacctattatatttgctagctttatttgctattcagcaagacatataaagttgctagctttattggttgtctgtgttttcaactgtttgtgaaaataaccagtataaagttgttgtttagaacatgttatttgtgctagcgcaaagctgaaaataaaatcagtatttttgtgcgccataattttgaagttgttctttaaatcagtatttatttgctacggcagttcataattttgaagtaaaataactatttctgtgcggctgctaggcttatgtgtg

SEQ ID NO: 29719 - DNA, 974 bp, Zea Mays
accacactcaccgcaccaccgaccactgcctccgtacgcgtccctctggcggaaaatcggtcctagtgccgagctcgttttgtttgggtgagtaatgcggatcgcctctcctgatcggattccgatggattttaggcggatcgtggtgcacagacacggatatgttcgcggatcgatcggatcttctgtatatctattaaggaggcttctccatctcctcggagcagcaaggctgtgcagcaatggagaacgataacagcaacactcaatttgcaccattgagagagactccgtttgccctccgtggtgctcttggtagttcaagctcatatcttgagcaagccaggggctacacatcttcccctgtagcagctctgcgcccaaagatgtctacacctggaaatcgactcctgcatacgagctgccccctgtcatctgctgtagcgaaccgcccgctgtcgccccatcttcctctgaagaagccacagttcagcgctactttctctatctcgcaccgtatcttcggtgtcgcgctgggagttgccatcatatccgtccccctcgccaccaagttcagcctgatgtttggcgtttgagagcgatttgctgcatcttatgaggaactgcatttccccgttcctgtgactgtttcatcgttcgtctgggttaccttgcaacacaactttaggtgcagttggaataacatctttgtcatgctgacagacttctgtaatacagtaataagtaaaactataaaatatcagtgcaaggaggtttgccccattatggatgtacatggtcatgaggtctgcagcctgcaggtttggctgggaaatagttgattatcatcacaacatattaactgcatggtgcgtatcttcgctacgtgcccttaagctcgtctggaaaatttgtgaaaattgttaaacgtaacgtttctcaaaatatacgtatgagctatgttttctaggcat

SEQ ID NO: 29720 - DNA, 2336 bp, Zea Mays
atggacctcaaatctaaaggtctgaagactattccttagcgatagcttaatgtataagtctctggtacaacacattaaatatgcgattagcaacattacgggtctgacttagtgtaccggcacacaacttacgctgcagggcacttgagaccactgcacagtacatacaccggtcatgtagccacacgtgtgcatgcagagtgtgctgtaaaaacaataaaatactaagggtcaagttggccactagttacattgtgccaggtgccttggaccgcggtgtctgtagacgagggttatctggcaagtatggcaatcacttcaggaagggatgactgcaactaggcccgtgtatcacattaaatgtaatacatgacattacggtcacgccttcgccctaacacgctctaaggggagcaggtgtacccgatgccactgcgcaagggtgctcgtgcatttaagaccatatctgatcagacaatcataaccaactgactgggaataggaaatccctatggccatgacaaggcagtacgacgatactttcatgtaattaaaagtacaaggaatcatacttaacaccataaagcacctgtccccactctaggctgggcccagaaggtcacttcaacaagtatcattacattggcgcatgccctacgtatgttgtacgattacaaggttgagacaggacgggggcagtcaacccaatgacagataccgggcatcatttagatgaagatgaacagattgcacaggctctgcaagaaaatattggtcataacctagctgaagacgaacagcttgcacgggctctgcaagaaagtatgaatgatggacctcctcgtcagcacattccagttgaagatgttaactcagaaagtactccagcaagcatcttgccctcaaatattttccgcacaagtggcttgagggtttgtgctggatgcagaagtccaattggccgcggtcggtttctcagttgtatggactctgtttggcatcccgagtgcttcaggtgttatgcttgtgatagaccaatatcagagtatgagtttgctgttcatgaaaaccatgcctaccacaggccctgctacaaggagcgtttccatcctaaatgtgatgtttgcagtagctttattcccacagataaaaatggcctcattgaataccgggcccatcctttttggatgcagaagtattgtccttcccatgaaaatgatggtacacctaggtgctgcagttgtgaacgaatggagccaaaggacagtcaatacataacattagatgatggccggagactctgcttggagtgtctgcatactgctattatggagaccaatgaatgccagccactgtacattgatattcaagaattttatgagggtatgaacatgaaagtagagcaacaagttcccttgcttttggttgagcgacaagctttaaatgaagccatggaagcagagaaatctgtgcaccaccttcctgaaacaagaggcctctgcctatctgaggagcagattgtcagaactatattgaaaggaccaattggaccaggcaacagaatcatagatatggtcacaggaccatacaaactcattagacggtgtgaagtgactgcaattcttatactgtacgggctgccaaggctgctaactggctcgattctggctcatgagatgatgcatgcttacctccgacttaaaggataccgaaccctgagtccagaggttgaagaaggcatctgtcaggttctagctcatctttggcttgagtcagaaatcacatcaggttctggtagcatgtcaaccacctcagatgcgtcatcgtcatcttcaacatcttcatcatcgaaaaagggcgcaaagacggaatttgaaaaaagactcggggagttcttcaagtaccaaattgaaacagattcttctgtcgcttatggagatgggtttcgagcaggcatgcgagccattgagcggtacggcttgagaagcacccttgatcatatcaagatgacggggtcttttccatgctgaagctggtttttttttacctcggcttggatatgggtatacatattttttttggagaacttttggttcaggttatacatacgaaaagccgaacttctgtgtcgagaagaggcataaggatttagctatactgtccattgcaggaaaaaaaactgtttcccttttcaattataaaatttcacagtgcagacatgaaggtatgtggtctttagcttggccaaccttgtggaatgctgtcacttgatgcaaaagaaatttcgaatacatatgctttgctgtgcttgaaatgcaatggttggatgctatgct

SEQ ID NO: 29721 - DNA, 1874 bp, Zea Mays
gaaccatacactctatctcttccttctcccaaccccgctcaaaaccctagctcaacgccacaggctcgccgactttcgcccggccgccgccggggacgatggcgaagcctcggcgcggccgctccgcgtctcgctcctcctcgggatcttcttcccgctcgctgtcccactccgtctcctccggctctgtctcgtcccgctcccggtcgcgctcccgctccttctcgtcgtcgtcctcccagtcccggagccgctcccctcctcaggctaagcgcagttcgcctggagcacggaaagggcgatcaccttcaccgccccctaaaaagggttcaccttcaaagaaagtccgttcgccatcaccaccacttaaaaaggcttcaccccctaggaaagtgtcgcctcctgctgaatcagctgttctctgcattgatcatttatcaaggaatgttaatgaggctcacttgaaagagatatttggaaactttggcgaagtggtgaatgtggagctatcaatggaccgaatggttaaccttcctcgtggctatggatatattgaattcaagaagagagctgatgctgagaaggctcttcttcacatggatggtggtcaaattgatggaaatattgttaagttgagattcactcttcaaccacgccaaagggctgcatcacctgtaaaagctccgccccctcctccaaaaagagatgctcttcagattgaaaaaggtgttagcagtgctgaaaaggatgcccagcagcgtcctaaggaatcatctccacgaaggaaaccagcttcacctctacggaaacgatctccaaatcgaagggctgaatcacccaggcgtccacctgacccatcacctaggcgccgtcctgattctccacctatacgtcgccgaccagatccttctcctgtcagacgtggtgacacacctcgcaggagaccaccatctccagttcgaaggcgttctccttctccaccacctaggaggcataggtcaccgatgcgtctttcacctaggagggggcgtggtagcccatcaccacgcaggcgctcccctgggcctcttaggcggcgctcaccacctccaaggcggttgaggagcccaccaagaaggccaccacctccacgtcgcttcagtcgctctcctcctcgccgaccccttcgctcccgctccagatcaatttctccaagaaggggacgagggcctccattgaggcgtggtaggtcagactcatcatattctcgatcacctactccaccaccaagaaaggggccaaggagggtatcaaggagccgcagccctagaaagtaacatatatgtatttgttttgcctcctagagcaggaagaagcgtctccagtgacagccgcagcagcagttcaccttcccctagacgcggcaggtagaaagaacccgtggcattgtgtatgcggcaggtaaagccttttatcccttgactctatctgtatcgtttgcctgtgcttgtgacttgctgtgagttcaagtattggttcgaggagaagatgagagaacgctacagcaatgctccaaacggatctgctcaacatgcctggtcgaccgccctagtttgtgtggtctaccctagacagaattatctgctgtgttggcttgtgtactttgattgtaccccaagtattttgaagttctgaacttatttctgctaattggtgtctgaagtggatatgttgaatgtattttgttttgttggatagagttcctcagcattgccaccgtatgaaagatgaatctattgatcaaccaatttgtgcatgcgtcactatgtagttgagactagacgcatgtgccacgcgcagcttacaatttgttttctaatctgtttttaaaaaag

SEQ ID NO: 29722 - DNA, 1390 bp, Zea Mays
cccggtcgtctttctttcgggcctctccgagtggtcaataaaccccgcctcccttctgtcatcccgtacgtctcgacctcgcagccgcaaacgcgaaaccctagcctcgagctctatctccggccacagctggtcagcgacgaaggatgagcaggcgctggagccgcacgatctacgtcgggaacctccccggcgacatccgggagagggaggtggaggatctgttctacaagtatggtaaaattgttgacattgacctgaaggtccccccaagaccacctggttatgcttttgttgagtttgaagatcctcgtgatgctgaggaggcaattgctggacgggatggatacaactttgatggacaccgtctaagagtggaggctgctcatggtggtagaggtaatgcttcctcgcatgatcgttcaagtggctttggtggcggtggtggagcacgtcgtggtgtgtcgagacactcagagtatcgtgttcttgtcactggactgccttcttctgcatcatggcaggatttaaaggatcatatgcggaaggctggtgatgtttgtttctctgaagtgtatcgcgaaggcggtggcaccgtaggaattgtggactacacaaattatgatgatatgaaatatgctataaagaagctggatgatactgaattcaggaacgcctttgggcgagcctatataagggtgaaggaatataacggcaaacgtggtcgctcctactcacgtagccgaagcccaagtcgtagttacagcaaaagcaggagtccgagtaaatcacccaggactcgccgttcatcatctagatcccggtcaagatctgtttcttctcgttcaaggtccccatcaaaaggacgttctccatcaagatcaccagcaagatcgaaatctcctaatgtttctccagcaaatggtgaagcagcaagccccaagaagcagagcccaaacaggagcccatctggctcacgctctcctgatgcgaagcctgaataaaattgctatgctgttaaaggattgcagatggagtcaggagctcttcttttcttaacatttgtcctctgttctagtaccatcagtgtcttatcgcagtacgagattggatgatattaactatctgtatcagcttgtatcgatggactccaagtgttgtcactcttgttgtctagtgtgctgaaggacccatttacttttgctaaacttttccattggtgattgttggatgcatggtgtggatttgtgctgtgttggctaaatcatgttgttctagaccttatgcatttttttcatttcactaaattacctgacggttgctgcatattatgcacagttttgcaccttgtgaaccatatgggctttatttgacaagtgaaatatttctg

SEQ ID NO: 29723 - DNA, 735 bp, Zea Mays
ttttaaatcaataattttttcctttgtcaaatgtggaacttcctattgcctgtatcatactggtttgcctgtttgcactgcaacactatggtacacaccgggttggcttcatttttgctccagtagtggtcacatggctcctatgtataagcgttattggtgtttacaatattattcactgggaacccactgtatatcgagcattatctccgtattacatgtacaagttcttgaggaagacacagagaggaggttggatgtccctgggaggaatactgttatgcgtaactggttctgaagcaatgtttgccgatctagggcattttaaccagttgtcaatacagattgcttttacatgcatggtgtatccagcattgatccttgcatacatgggacaagctgcttatctgtgtaagcatcataccatggaaagtgactataggattggattctatgtgtctgtgccagagaaaattaggtggcccgttatggcaattgctattcttgcagcagttgtgggaagccaagctgtcatcactggtacattctcaatgatcaagcagtgcacttctctgggctgctttcctcgggtgaagataattcatacatctgccaaagtacacgggcaaatatacatccctgagatcaattggattctgatgatactgtgcttagctgtaaccattggtttcaggaacacaaaacacttggggaatgcatcagttatttttatac

SEQ ID NO: 29724 - DNA, 3784 bp, Zea Mays
aaatctgtttgggcgactgtggaattcagaaatcaggaggcgactgcgacatacgacgaagccggcacacgcagacgcaccggcctcctcttctcgctcgtctgcttctcttttgctcgttttaaccctcgctcgcgtcgcctcctcctccgccgcacccggctgctgcctctgagcctgcccccgccacctcggcgccctggtcgccgccggagcgccgcctcaacgtctcgatcccggtacttcctcccccgaatctcaccgagcccgccagatccgcccgcgccggcaggatccgatcgggaaacacgcggatcacgcgcacagaaagctcctgtctcatcgcgcttccgccgccgctcgattccgcaggttctacgtgatgcagccgccgatgggtaacgagaggccgccgcctcccggtcgcactgtctcagccttcgtgcccggcgccgctgtcccgcctccaccgtttgccgccggtggcccgttcgccccgccgccgtggcagggagtgccgcctcctcagtctggtgctgcggcgcctcatttcggggctgtgccacccgccgcaatgggtgggttcaggggtccaccgtcgtcacagggcccctttggtgctggcacaccgccccagcgccctttcacttccgcgccaccgcctcagagccctttcacctccgcgccaccgtctcagggcccctttgcctccgctccaccgtcgcaggtcccttttgcctccgctcaaccgtctcagagtccttttacgtctcctccacagtctcagggcccattcgctgctggaccgccgcctacgggcccttttgctgctacaccagcaccttttcgctctccgctgtcatcccttgcgcagccacaatctccaacgcaaggcgctttgcctccaccaccaacatatgcgaggccgctgtcacaaccactacaggcgcaagggtattaccctggtgcaccaccttcgaaccctcaatttccgatgtcaaggccagcatttcaacaacctgtgcagaatatgccacctcctccaatggggtcagctgccacatttggtaaccaggcagcttatcaaagtggcgggcctccagttggaggcacacttcagagtttagtggaggacttccagtcgttgtcactgagttctgtgcctgggtcacttgatcctggtgttgatgtaaaagggctgccaaggccattggatggtgatgaggagccagttaagcttatagagtcatacccatttaattgccacccaaggtacttcaggctgacaacccatgcgattccggcatctcagtcattggtctccaggtggcatttgcctcttggagctgtggtacatcctcttgcagaatcacctgacggggaggaagtgccagttatcaactttgggtccgccggtgtcattcgctgtcgaagatgtaggacgtatataaatccttatgcaacatttgcagatgctggaaggaaatggcgctgcaatctttgtacattgctcaatgacgttcctggagagtacttttgtgctcttgatgctagtggcaggaggtacgatactgatcaaagacctgaactctctaagggaactgtagagtttgttgctccaacagaatatatggtgcggccaccgatgccgccgtcctatttctttcttattgacgtgtcagtgtctgcagttcgaagcggattgcttgagtcttctttgtcacaacctcaaatgatggtggttgctgatttggatgatgtttttctgccattgcctgatgacctcttggttaatttggtcgactcaagacatgttgtggaatcatttcttgatagcttgccaaatatgttccatgacaatgtaaatgtggagtctgctcttggtccagcacttaaagcagctttcatggttatgagtcaaattggggggaagttgcttgtcttccagagtactttgccatctcttggtattggtcgtttgagacttcgaggagatgatgttcgtgcgtatggaacagacaaggagcatactctgagggtacctgaagatcccttctacaaacagatggctgctgaattcacaaaaaatcagatcgcagtggacatattttctttcagtgagaagtactctgatatagcttctttggggtctttggctaagtatactggtggtcaggtgtaccattatccatcattccaggcacctacacatgaagacaaacttaaacttgagcttagtagggaccttacacgagagactgcctgggaatctgttatgcgtatcagatgtggaaaaggagtacggttcacaacctatcatggtcatttcatgctacgatccacagacctgttagcccttccagctgttgactctgataaagcttttgcaatgcaattgtcgctagaggagacattaatgaccacccaaactgtatacttccaagtggcattgctatacacatcatcctctggtgaaaggcgtatcagggtccacacagcagctgcacctgtggtcacagatcttagtgaaatgtaccgtcaagcagatacgggtgccattgtgtcattgttgggtagaattgcggttgaaaattcactgtctgataagctggacagtgtccggcagcagttacagttaaagcttgtcagaagtttgaaggaataccgcaatttatatgttgtacaacaccggataggcgggagactgatttttcctgaatccctaaagtttttgccattatacatcctggctatctgcaaaactcttgctcttcgtggaggttatgccgatgtttctcttgatgaacgatgtgctgctggttttagcatgatgatattgcctgtaaaaaggctgctcaattttatctatccttctttgtacagagtcgatgaagtattaacaatggaaccaaataagattgatggttggttgaaacgcttgccattaacgtttcagtgtttagatacgggaggtttgtacctccttgatgatggcttcactttcttagtgtggttaggaaggatgctcccacctgaacttgtgaacaacattcttggagtgagcttggcaaacttccctgacctatctaagattctattgagagagtgtgacaatgagttatcaagaaatttcatgaaaatactaagatacctgcgggagaaggatccttcttatcaccagctatcccttgtggtgcgacagggtgaacagccaagagaaagctatctgcttctatctaaccttgttgaggaccagatggctggaacaagtagttacgttgattggatacagcaaattcaccgtcaaacacaaagctaatgacgaaataccaacaggaagctatgcctgaaatttttgcctactgtaagctgctgcagggcgtagattcagttgctgccagttccaagtcaatctcgcaaccccttggagatcttattcacaacccagctgtccagtatgccaccatagtgggaatacagctgttgtattggaataagtaggcagcaaatgcggtgggtatattatacaactggggtcgtgtagtgtggcctgtgcgttctttcctgatgaattctagtcgggttcagttacatggcatttgggttataaaaagttcatcgtgtaaactaatttttggctattttagtctgtttgtaatgggagatctcatttaatttaatgtcattccgttattaaagttacttccgtatactgaatttttagaccgcatgatccttcatttgtggtttatataaccagtaaaacttgtagttttggtgaata

SEQ ID NO: 29725 - DNA, 2289 bp, Zea Mays
gtcctgcatgctcaaactctttcgctagtcagagccaggtagcctcccgatctatggatgctgaaagcccaattagtggacagatttcggaatatgaagatgctgaaacagataattctcgagcaagctccagataccaccctttcactgagatgcagcagcctgtggatggtaccgtgatgggtaacttctttggcgcttcatctccaagtgtttctgtaaataatctaggttatcttggtgaaatgcaacctacgggagctaattttaccagtcattttgccactcgcaatgacatagctagtgtgttcaatgatactggctctgagttaggaggtggtcccaaaacttcaattgattcagtactgttgggtgaaccatttccagaatatccaggcggcttcatggagtcgacactctattcttctgttgcaacattgggtaacagtctggaagatggtttgcagacatttatgtctgaggctctctacaccaacaatctcactcaaaaggaagttgatgcacttggtgcagcaggcataacatcctcgaagtatcttaagaatgatgccgtagggcattggagtttacctatttccatgagctggtatgatgtaaccctttattttcagacagagaatgatggttatacagatcaaagtgtcaggtatccacttttaaagcagtcatcatcagacctctttaagatggagccagatggtttgaaaaaattcgacagcttttcaaggtggatgagcaatgagcttccagaggttgttgatttggatatcaagtccagctctgatgctttctggagtactactgaaaccgtgaatgttgctgatggatctagtatacctattaatgagccattggatgtatttgtagtcagcccctcactttcccaagaccagctcttcagtattattgatgtatctccaagctgggcatacaatggcacaaaaaccaaggtcttaattactggtacattcttggcaaaaaaagaagatgtggaaaattgcagctggtcttgtatgtttggagactctgaagtctctgctgaagttttagtggatggctccctgcgttgctatacaccagtacaccattctggacgagtcccattttatgtgacatgttcaaatagagtagcttgtagtgaagtgcgagaatttgagttccgtgattctgagacccattatatggatatctcagataagcatactacaggcataaatgaaatgcatttacgtatccgccttgataagttactttccctggaaccagaagactatgaaaagtatgtcttgagtaatggaaataagtctgagctgatcaacactatcagttcattaatgcttgacaataatttgtctaatctggcattaccatctgatgagaaggaattgtgcactgtacaggatcagaatcttgagaaacaggtgaaagaaaagctatattactggcttatccataagatacatgatgatggaaaaggtccaaatgtcctaggcaaggaaggacaaggtgccattcatttagtagccgcacttggttatgattgggctatcaaaccaatagttgcggcaggagtaaatataaacttcagggatattcgtggatggactgcgcttcactgggctgcatgttgtggaagggagcggacagttggtgccctgatagcaagcggagctgcatctggtgctttaacagatccaacgcagcagtatccatctggaagaactcctgctgatttagcatcagaaaatggtcacaaaggcattgctggttttcttgcagagtctgctttgacaagtcacctctcagctcttacattaaaagagtcgccaagtggcaatgtggaagaaatatgtggattaacagcagctgaaggttttgcagcatcaagttcttcccagcttgcttgtgttaattctcaggaagagtccttaaaagattcacttggtgcagttcgtaaatcaactcaagcagcagccagaatatttcaagcttttagggtggaatcattccacagaaagaaggttattgaatatggagatgatgattgtggattgtctgatgaacgcacactttcacttgtttcccttagaaacccgaaatctggacacggtgattcacattctgctgctgttcgtattcaaaacaagttcagaggatggaaaggaagaaaagagtttatgcttatccggcagaaaattgtgaagatacaggcgaaaatcaaagtatgtggtggtggtggtcgtagttatttgaggcgcacttcttttg

SEQ ID NO: 29726 - DNA, 1840 bp, Zea Mays
tcgagagcgagccaaaaactcgaactgttcaaaccccgccagcccttccgctcccacgacccaaccccactgcccggagcccccgagccttctcgaatcttgcgagaaccccaggggcgaggagcagatgtcggcgaggctacgggtggcggagctccgcgcggagcttcagcgccgcggcctcgatgtatccggcaccaagcctgctctcgtgcggaggctggacgccgcaatttgcgaggcggagaaggccgtggtggctgctgcgccaaccagtgtggcaaatgggtatgacgtagccgtagatggcaaaaggaacggcgggaataataagaggaaaaggtccggggatgggggtgaagagggaaacggcgatacgtgtacagatgtgacaaaactagagggcatgagctatcgtgagctgcagggattggccaaggcacgtggagttgcggcaaatgggggcaagaaagatgttatccagaggttgctctcggcgactgctgatcctgctgcagttgcagatggtggtcctcagggcgaaaaggaagtcataaaaggtggtgatgaggaggttgaggtgaaaaaggagaagatggttactgccacgaagaagggagctgcagtgctggatcagcacattcccgatcacataaaagtgaactatcatgtcttgcaagtgggcgatgaaatctatgatgccaccttgaaccagactaatgttggagacaacaacaataagttctatatcattcaagttttagaatctgatgctggtggaagctttatggtttacaatagatggggaagagttggggtacgaggtcaagataaactacatggtcccttcccaacacgagaccaagcaatatatgaatttgaggggaagttccacaacaaaaccaataatcattggtctgatcgcaagaacttcaaatgttatgcaaagaaatacacttggcttgaaatggattatggtgaaactgagaaagaaatagagaaaggttccattactgatcagataaaagagacaaaacttgaaactagaattgcgcagttcatatccctgatctgcaatattagcatgatgaagcaaagaatggtggaaataggttataatgctgaaaagcttccccttggaaagctaaggaaagctacaatacttaagggttatcatgttttgaaaaggatatccgatgttatttcaaaggcggacaggagacatcttgagcaattgactggggaattctacaccgtgattcctcatgactttggtttcagaaagatgcgtgaatttattatcgatactcctcagaaactaaaagctaagctggagatggttgaagcccttggtgagattgaaattgcaactaaacttttggaggatgattcaagtgaccaggatgatccgttgtatgctcgatacaagcaacttcattgtgatttcacacctcttgaagctgattcagatgagtactctatgataaaatcatatttgagaaatacacatggaaaaacacactctggttatacggtggacatagtgcaaatatttaaggtttcaaggcatggtgaaacagagcgatttcaaaaatttgctagtacaagaaataggatgcttttgtggcatggttctcggttgagcaactgggctgggatcctttctcagggtctgcgaatcgctcctcctgaagcacctgttactggttacatgtttggcaagggtgtttactttgctgacatgttttcaaagagtgcaaactattgctacgcctctgaagcatgtagatctggagtactgcttttatactacgagtgggctatttaacttcaatttgcc

SEQ ID NO: 29727 - DNA, 351 bp, Zea Mays
gcccctcccggaagtcggggtttgttgcacgtattagctctagaattactacggttatccgagtagcacgtaccatcaagcaaactataactgatttaatgagccattcgcagtttcacagttcgaattagttcatacttgcacatgcatggcttaatctttgagacaagcatatgactactggcaggatcaaccaggtagcacgtcctcgcagacgggccagcgccggcctccgcgcggaggcgtcgtgccgggctggccgtcgttcgttcgggcggaccgattcttgggcgcgtgacgccaacgcgtctccggccttcagcgtgagccacatccgagaccaaaagcgcc

SEQ ID NO: 29728 - DNA, 5651 bp, Zea Mays
ttttccttctcccgcgtgcggcgcgccctagcttcctccttcccttccactcccgtccatagcagcgctgccaccaccgacggaaggcccttagcagcgccgccaccaccacgggagatgcgtggagagatgaagcaaaccaagtcaggaagaatagaaatgagggcagaatggaatgaaacaagaacttgtttttttgtgagcttactgaaggagtacaattcaccaagatatcgtgcccaaaatggttggacaaaagaagcatggaacaacatgacacaacgcatcaacgataaatttgaaacaaattttgtggtgacgtaattgaagaacaaatgaccagtgggggccgaataaacttacaaattcataccgaattttgcctggtccactaaagctgcctgcgcccccccccccccccccccccgcatgggctcgtagcccacagacgtcccaggagctggcccaatttatcttcgccatccatttcgattgaatggccacgatttaccgaaatcgcatatataaatgaaaatttcggcatgccctaaccctagcttcattcgcttccgatatttccggagtggtatagggcggatttggtggcggcgactgtgaggcgggcgagcgaggtggtcattgggctcgcgccggagaacgctatgatcccgctgttcgagacggggggcgcgcagctcgagctcatacgggatgccgagattgagccgtgtgcctacgtgaggtgggagcaagggaggccgagaggatccgcttcatgagttggatgcacacgagagacgttggggatcccagcttcccaatgcgggagatccagaagagtcaacggcggatcgatcaagtggattagcactctcccctgtctgcgtgatctgtagaacaaggataagtcggggacgctgttctgctttgccgcgatggaacatgtgttccaatccgagaatttcaggctggggcggttgggatgagggggaagccaatgggagatggatcaaggagatgagcatggtaggctgttcaattctcaatggcttcgtcgcgaaaagtgaggaatgcaaataaacgctacaccaaaatcaacgaagattggcaggataaagatgagacaaatgtacataaaagtaaagtgcgaaagaaaaagttatctgacatgcttgggtctcaatggagcaaagatgagctcgagcgcttctatggagcctacagaaaatatggaaaagattggagaaaggttgctggtgcaatacgtgataggacatctgaaatggtggaggctctttacaacattaataaggcatatttatctcttccagagggaacagctactgctgcggggttaatagcaatgatgaccgatcactacaatattctggatggaagtaacagtgatcatgaaagcaatgattcaccaaaagcttcaaggaagccacagaagcgtggtcgtgctaggtttcaatctgtttctaagacatctgatgcacgttatgctgatctagggcaatctcagccttcttcatcaagctatggctgcctttcgttgttgacgaaaaaatgtgctggagatctgcttgtagggaacaggcctcgtgctgttggaaaaaggactccaagagtacctggtgcaagtatatactatcgagatgacaggggtgtaacagataggcgtgcaaaaacagttgctaacaatggtgatgatgaaggagctcatgtagctgcgcttgctctggcagaggtatttcaaagaggaggctcacctcaggtttctgaaacatccaaatggtgatcacatgttcctgtctcctgttaaaagtagtgacagaaaaaatgctgattcagagatgggaagctcaaagttgcatgggtttcatttggatgctgattaccccgaaggtagcttaggaagcagggaggccgagactggtgaatattgcaaaggttcatcatttttgacgaaaaatgaaggttctggtaagcctctgaagaagggaaaaaagtctcagaagaggaggaaaaaagctgcacataaaacaggtgatcagttcgaggatgacagagaggcttgtagtggaactgatgaagggcataggtcgataaagattaaagaagactcagagctggagtcattgggatggccgtctagcacgtcaaataaaagaagtcgtcaattgttttttggtggattgctaacaaaagaacagtagcggaggcccttgagggtatggcgtggattagtgatatcagggggaccatctcttgggcagttattttcgatctcctgatcctgtgcgaagctgtcacagaagttcatctacaggctgggaccaccgacaagcacttttggagattttccacttctggccagtattctgcgaaggcagcttatgagctgttcttccttggctccactgccttcgggcctttgaaaggatttggaaaacttgggctcctgccaaatgcaagttctttttgtggttggtcatgcataacagatgctggacagcagatcgtttggcaaaaagggatctccctcaccctgcggtctgtcctctctgtgatcagcaagcggaaacaatccaacaccttctcatttcttgtgtttttgcaagacaattctggttcacgctgctgcaaaagatgggggctgccgaacctctccccagacttggatgccaccaatctggacagttggtggaatagtgctgctgagaagctgcctggagaccttcaagccggctttaattctatcgtgatccttggcgcttggagtatctggcgtccccgcaatgactgtgtcttcaatggcatgtcacctagtgtgaccacggctatcacccttgctagtgatgagctgaggatgtggagcctcgctggtgctaaaggtctcaacctgctgtcagccctggtttttgtgttcgatccagggtgggggttttttcttgagtttttgggtttttgggtttgtgtgtgagttgtgctgtgttttgtgggttgtgttctggtgaccttgtggtcgctgggctgtttgggtgtgtgtttgtgtgtgtgtgtcgtggtgttttgtactccctttttatctttaatggaaagatacgcagctctcctgcgtgttcgagaaaaaatatgtccttgttttgcatacattggctgatctatctgtgaatatcctaccaccttcatcagtaatggaatctgaatcttcagcccaaattaaggatgaaaacaaagatgttgattctgatgacaggcctggcatgcctgcggcagtatcagtgtatgagcagaaagttaactccaaaagcactgcaaggaaagttaaaaggcagcctgaaatttcaaattcagagatggtcactaggaaaaaagctaaagttactaaagatcctcatcacgatgggagcaccacttctgatgtaaagcagcaagcttgtacatgtggtgtcaaaacagagaaaaagaagaggaaatcatccacgacaaaggtttctgctgaagaagggaaggtgtcgtctaatatcgggacaaccacacaaggtgatacaacacaagctgacttatcatcaaagggtaaaagctgccgtaaaataggcattcagcaagcactaattgaagaatgcaaatcaaccaaggttgccaatgatactggaagtgataaattttctcactcagtgaataatgttattgatcttaaggacaaactctctcactgcttgtcctcacgtttgcttcggaggtggtgtatgtttgaatggttctatagtgcaattgattatccatggtttgcaaaaagtgaatttgtggagtacttgaatcatgtcaagctgggtcatgttccaaggctgactcgtgttgagtggggtgtcataaggagttctcttgggaagccccgccgattgtctaaacaatttttgcatgaggagagagagaagctttctcaatatcgcgattcagtcaggcaacactatgctgaacttcgatctggtgttagagaaggactacccacggatcttgcacgacctcttgcagttggacagcgtgttatagcctgtcatcctagaacaagggaacttcatgatgggaatattctgacagttgacaataatcgttgtcgggttcagtttgatcggcctgagctgggtgttgagtttgtgatggatattgattgtatgcccctccatcccatggaaaatgagtccctcaggcaaaaaaacatcgtgaataaatacttatccgaggtgaaacttgaggatcagatgaatgacttgggtagtgggggtgcagcaaggttcgcatcaaatgtgaatgtgaattgtggcgatgcagcgttccaaataccttctagccacccggtaaatagtttaacgaagcaagcaaaggccaaagctacagttaatgaggttgcaattgcagcacaacaagcaatgtacaatcagccatgcagtctctcacagatacaggaaagagaagctgatataagagctcttgctgaactatcacgtgcccttgataaaaaggaagctttattggtagagttgaggcacatgaatgaagaagtgtccagaaagcaaaaggatggtgagactgttagagttgaagcatttcaggacgcaatatgctatggtgcttgtgcagctaagagattctaatgatcaagtagcctcagctttgctttctctgcggcaacgtaacacgtatcatggaaatcaattaccgtcatatcctatttccatggaaaatggtggaaccattactggagcaccagatccatataaccgttttggttatattaatccagaatccggttcccaagtaatggaagttattgagacttcaaggtgcaaagcaaaaatgatggttgatgttgctgttcaggcgatgtgcaaagtgagggaaggagagaacgcctttgctaaaatcggtgaagcactagatgatctcgatagtcgtggcacaggctctggttcaagcatactaggaataagacggatacctcccgattcagggaaggcaaatacatcctttcaagataacggaacgcctgcccctgcagcaatcaactcttcaggtccaagattgcccaacgggtatgattctgaagctcaggttcctactgatttgatttcgtcctgcgtagccacgatacttatgattcagaactgcacggaaaagcagtatcatcctgccgaagttgcacacatccttgattcggccctgtcacgcctacaaccgtgcagctcccagaacatcccgatcttcagggagattgagatgtgcatgggcattataaagaatcaaatgttggcgttgatacccacaccaagcggctagttccttgctttcctgtgagctggccggaagaggggtaaatttcggaaagaaaccggaatactgtatgtggcgtgtattgttttttttttcccattttttactgatttgttgtgttgtacaagctgtatgtttttttactgtcgtacaagctgtatgttattgctttatacatgtataatagtaatcatgaaagttcattgttctggcaagcgcatgtacattcagcttgaaatactgaaccctttttccaaacggaaattttttcctgttcctttacttttttgaaattcttgcgttccaaacggggc

SEQ ID NO: 29729 - DNA, 2051 bp, Zea Mays
tgggcgtagggcgaaggcaacaggtgaagtgtcaacgtgtggctgcaatctgcctccgcactcactccacgcacacgccgccgctatacgcgacggcgccgagcgcatcgccgccggcccctccctccctgcgcctgtactcagcccgctgcttctcagtccacttcatccacagctcctcttctctcggtctagagatccgtccgggcacggtagtctcgccttcgttttgaggtacatctgtccgtcagcgatgtccatagaagagaggaagataagtatgataagcaagagcactgcactaaatccaaatgcagaggaatttgttccttcgtcccttagatctttcagtgattcctccaagaaatcagatgcaactatgattgtctcagggtcatctaaagaatctagcacagacaagccagaatccattttacgaagtaactctgatgaagaagcacatcagtactggcagcaacagctccctgacgacatcacccctgatttcaaagtcctgggacaagacgaaagtcctggacctgacagtctatcactcacaggcctgtcgattaatgatggcattgacacatcaatattttctccaaaccagacactgggcgtgcagcaccatgcttcaccttttatcagggacaaactgaatacacgcccaaaaattaacttgtctggcccaacttatatggacgaacggtcccaagccgcaattttgagtccaactgcaggttccatgagtccaaatgctgctccatgggtgaagaatctaaggaatgggggacattataacacaagcagaagggatgccactgccagtcactacaatggagattctagcattggggcttcattgcacaacctcactgatgcgtatcatggaagcaggcgcagcttaagcacgactatggatatcatgagtcagctggagagtaaagtcgatgggcgactcaatcagaacctcaggtcactgtcgtttggaaattcaagtcctccatcaccagcatcatatgcccaaaatgctggacgtgaacatatatccctcgatgttcctagaggaaggtataagacaactagtttgcctgttcctggtcttggttcaagcagaggttctcaggtgttgggtggcccatataatggaaaccatgatatgatctcaaccaataccctacaaaacatggctggaattcagacaggagcagcttggcttgaaactgatgctgcggcaaacacatatttggaatcaaaggatgaagttcatgattttgcaagcctgcgacatgcagttcttgaacagcaggatagacaggcttttctgatgggaaacaaccctttagcaaaggatctaacattgaaggagctatacagtatacaaagcaggttggctcaggagaaagctagagaaacaacataccgacaaagattccaaataccagagcttcaaggcctcatccaggagcagaatcccccaatcgatctctgtggtcttcacatcagcgaggccatgcacgtcctgaactacgagctcaacaaccgaagaaagatcgtgagatccactggtcgccgactccaggctatgatcatatcaagcgcccgcaccccagcacggctgactgctgccgtcgagcagtacctcatggaacacggccttcagtacacgcaggcacaaccaggcctcttccgcgtcctgctctagtgatggagccggcctagctgttgtcacaactggatcagacgagaaagaagaaaaaaaaagttgtacttttgtatatggcagagatggctagcaggatagaagcgttaagatagctcatgcattcacatatcaggctttagcaaatgtatacatcttaaaatttgcggagttaggtctttggtgctggtggatgcataaggtgatagcatcttcaaaatcatgttctcgttcacaatctttggtgctggtggatgcatagttcttttgttgctggtgcgttcaaattgtgcgtaatgcgtggtggatgcacaagttcttcacaacctttgctgccagtaggtgcgtg

SEQ ID NO: 29730 - DNA, 3338 bp, Zea Mays
ccgctgctactggagtagttatatagctagcttgctcagacacctttttggatgctcgctgctcccgacaagaccgcccgccatcgtgcagccatcgcagatcgggatctcgcggagctgcgattcattcgccagccatcctactcaaacgccacccatctctgagtctttgaccaactgttctgaagatttgagacactgttggagatgggtacaaggatgccaatctttccccgactatcgagcgcactgtccacggcgttgctggagtggatcttgatgctcctgctgttcatcgatgcggtttacagcttcctggtcactagattcgcccgtctctgcagattaccggcgccatgccctttctgctcaaggctcgatcacttcctgggcaacgagaaaccgtgcttctatagggacctgatctgcaaaacccacaagtcggagatttcgtccttggccttctgcagcctccaccagaagctcgcgggagcccgaaatatgtgtgaagggtgctgtggggaagtcgccggtgatgataagacagatgagactgatagcaatcaaagaattggtgatgctttcaattctcctcgtgaaaaagtctgctcgtgctgtggacagcattttaagcgacggagtgtagctttgtcctctagagagactgcagaactagaacctactcgagcgtttggctcaccaaaaacttacacggagtactctgtagtatgtcaagtggatgagcctttggagcctaaagatatataccaccaaagtgactacaggtctaatgagccagacggtctgctacagatgacatctgactctgagactgaggtcccttgtgccattgatgtgagaagttcacaatctcgtgaagccgatgttaagggcgaagacttgcaagaagatccagcttgtgagcaacccgttcttccttcccctgtggtgatcaagaaatctgaaatagtcgtcaggaaggagcctagtgttgaagacacctgcattacatcttcagcgtgtcctgctgtggatgatcatcctaatagcggaggtggtgtggaccagatggaagaaaaagaaagcctatccagaaaatgggcaccccagcacgatcctgtacttgttatagaaaattcaggtttacaagatgctggtatttcacaaattatgccaagtgatgagctaccacaggtttctggtgagactgaaccatctcagagcacaaatgaaggcaacacggatccatataaatctcagttcacaatactagaggagcactatgctgtttcggaagaaggaaatataaaatgtattctggaacaatttgacgtgacagaaattactagcagatcaggtggtgagtttcgtcaaagaagtgcgtcagcagctgattcacatacaaatgcactggtactagagaatactcatcatggtgcttcagaagatgcagaacagaaaggtgctggatccaaaacgagtggtgaagttgaagattatactaagaaaattgaacccactggtgacatgggagaacatgaactggtagtacaagatccttctggtagtgctcccaaagatttaatagttaaagattatgtggacgaacctcatgtatcaacaactaccatgagatcgagcggtgaagtacctcaagatcatagtgccaccgaggaaaacccaaaaacaattgacagcattgttgaaaggagaccatctctaagcagtcagattagcattaccctaagatcaagtggtgaagtacttcaagatcatagtgccaccgaggaaaacccaaaaacaagtgaaagtattgttgaaaggagaccatctctaagcagtcagattagcattaccctaagatcgagtggtgaagtacttcaagatcatagtgccaccgaggaaaactcaaaaacaagtgaaagtattgttgaaaggagaccatctctaagcagtcagattagcatgaatgaagcctatagacttgccattggcaacaagggtagcttgacatcccctacattgacggatgtaatccttggaaaggactctacttctagcataaacgaagaactgaggctactgttatcacagatctcagcttccagggggcttgaggcaccatgggccgatccaggccctagcccacgtgcatatggacgtggtgatgagttggtggtgcagaacattaccaatagattatcacttgagaggaatgcttccggtttggagtctctagacggaagcattgttagtgagatggaaggtgaaagcaccattgaccggttgagacggcagattgatcttgatcggaaatcaatacacctactctgcagggaactggaagaagagaggaatgcctcagccattgctgcaagtcaagctctggctatgatcaccaagttgcaggatgagaaggccgcaatgcagatggaagcttcgcattaccaaaggatgatggaagagcaagctgaatatgacagtgaagcggtagcgaaagctaacgagttactcactgaaagagaacagctaattgaagaactggaagttgagctcgaaaactataggagacagtatggaggtggatcaacacagagacgaggcaatcgagtggcttttaaacaagaaaatagggatacaactatgcttgacggtggtggtcttgaagatcctctgattaacacacaacagggcataaattccttggtgggtttggaagaggagagggcatatatagcgactggtttgagaaaattggaacagaagctccaattctactccaacaacagtgtttccgttgagttacccagtccagatgttaaggatgacctctccgacaaagtatatgtcacagaagacttctcgttacactgccaggaaagctcgatggagagcaaggaagctggctcatcgacaactagtggggaggttgatctagttgcagtgcaggaagaaattgcaaagttgaacagaagactgaagacactagaaggagatcgcagttttcttgagcatagcatcaactccctcaggaatggcgacgaaggtttgatgtttatacaggaaattgcttgcaatctgagagaactgcgagcaattgctattggcaaaaaataaaatgcaccaaaatgtgtataatagtcattttctcgaaacttatttgtgcaatagacgccgaatcaacatatgaatcgtgcatcatgtttgtcatataaatgaaaagaaattcttgtaattagacaccagatgttgctgtaattatctttaaattcgtagggttgagatgtaaattggttctatatattatcatgttattatgttaagtttttgctatgaaa

SEQ ID NO: 29731 - DNA, 2994 bp, Zea Mays
aaaaactcgaacctccgtgactgggtcggccacggcaatctcgaaatcaacgagatcggcgaccaacacggagatctcgaacctcaggaaagatccaacacaaccgaggtggaggtggtctcgaggcagcggtgttgaattgacgatgtgtgacatttgggaggaattccgggcggcgctttgcatatccggtggaaaccgccgcccgcccccaaccctccctcccccgaatctcgccggcggcggtgacgaagatggcggtggtgtcgaaagtggcggcggccaggaggagggggacatcatcagtgcgctacccgacgacgtcctcctcttcatcctcagccgcctcccgtccgccgccgccgcgcggaccagcgtcctctccaaccgctggcgcctcctctgggcgcagctcccggtgctgtggttcccgctccccgccgaaccggcccgcgcgctgccctcgcccgctaccgccgcgcggaccagggaccgctcccaccgttggcgccgccgcctcttggcgcatctcccagcgctgcggttcccgctccccgtcggaccggcccgcgcgctgccctcgcttgcctccgctcgcgccgcactcacccaacactcggcaccctcgctctggatcctgaggatagacgctaacgacgcggacccggtggacgcggccgcggtactccgcctcgccgcgccccgcctcaccaacgcgctctttctccgcaacgtggtacccgaggatcggaagaaggccgtagtgatggaagtcattgagctgccctgcttcgacagggctgcacatcttttcctcgacttaggttaccttcgcctcgcatttccaccgtcgggcgtgttcacgaagctcactgtgctagttctgagccacgtccggttccaaggcgccttggacatcggcgacaccttgtcgtcggcccgctgcccttcgctgcgactactccatctcttcgacgcccaaggggtgtccaaccttggcatctgttcggagtctctcgtcagtatggttctgcataacctgaaagggttacagcagctcagggttgtgtcgccaatgctgagagatctgcatatgtttaattgcttcttcaagaggcaaccggtggccagcatcactgctccagtggctgacatcactgctccgattctggaaaagttcgggtggcttgatgaatatgatccgaggtgggtccagctgggtgaattgtcccagctacaggtactggcgatctccttctttgcaggtgcatggtatggattggttgaacatcagtacaaccggggcagtgtgaagttgttgcaacgctttagggagatccgcgatcttcacatcacgatcttctatccaattgtgagtatatgccttttatcatggatttcaaacttttctttacttaaatattgctgagtacaaccttccagtaactgcaagtttgtaactactttgtagtagcagtgattgctaaatcttaatgtagtgaagcaaccgaataatgtagtttagagaccgggatgatacaacgctacaagtttagggaccgtcaatgcattttactctagataaatctttggtatattccgtcaagtatctctttgcaaactcttcttatatcagattttggaagaggttgaagcttgcctctttacattattttggcacactgttttattcttctatgcacccatgattctagaggcatttgtgggatatgttcatgccatttcagtgatggacaaaattttcttcaattgatacaaatccctacgaacttatatcagcatttcaaacacaatccagtatgacaaaaaattacaagttttaggaacaccccatttcttatctaaaattcttgttcaatttgtttttctgaagtttcacatttgtaatgtatttgtagtcattgatttaaatcaaatcttattgaaggatcatgtttagtcttcctttttcataaaaatttaatgcacattgtaccttatcagatgattgcaatacatcagcctccttttgtcagttgttcacgtagatgcgctggtatagttgtaatatttggtcaaggacgtgaattcaagggtggagggtagtggacatatttaactcagttatggcccaaacagggtgagcgtgtagttctctagtaattgtgaccctttactagctttatttaagtaagcctgcttgggaagtttgctgaaccctgagtgttcagaggcttttgatactgtttctctgtgtcactgtaggctcaaacctaacacttgtaatttcattgcttcacggtaatgaaattcggtcatgctgttgtgaaaaaagatgtgattctttactggagacatctgtgccattactcagcagaacaagtctgaagtagttctgcagcattttataacgtttatcccttgtgagaaaatcatttattcttgaaagttgctttatttcttgctgcatataaaattttcttgtggcctaatatgaatttgcagaagatcgtttacttccactactgcacggaaggcctgacctcgctgctggctaagaaattacacctgatccttctaacatgtggacatgctattggctcttgtgtgttccatctccttaagatttctactaggataagaagtctgtttctggatatacgtgaatccattaaggaacgagctgcttgttcaccagactgtgcttgtcaccagcagcatgactgggaaagcgaggagctcgtgctgaactctctccaggaactgaacgtttgcggacttagagcaaaccgtgacttcatgtttgtgaaacgactgctgggctggatgggagcgctcaaatcagttaccataatcttcgatcctaaagccactgtccacgaggagctctgcgaggagctactgggcctctctggaccagagacttgcgtgaagatttacctgtatcgcgatggggcaaagaaatatattctaccgttgtacctatttggttga

SEQ ID NO: 29732 - DNA, 1402 bp, Zea Mays
aactggtcttatgcaaatcccaaattctagcgctctgctcagaagttaaaacagatcgccttcgttggcacttcttattagcaagcagtatgtattggcaatgggttttgcaatgctggaacacctgacagaaattcttattctcccggaagtaaaggagttctggtttgtcagtaatattggccttctaatggttattatcggtgaaattatccgtaaacttgctgtagtgacagctggacgtgccttcacacacgttataagaacttattatgaagatcagcatcaattgatcacgcatggactgtataggtttatgcgccaccctgggtattctggctttcttatatgggcagtaggaacccaggttatgctgtgtaatccattatcaacagttgcattcacattggtcttgtggcgattcttttcaaaacggataccgtatgaagaatttttcttgaagcagttctttggctctgaatacgatgaatatgcacagagagtacactctggaataccatttattaaatgaaagtatggcacttgcaaacacacatctggagataggatattcatattgtgttcgtatcaaatgcacatgacccatcacccatctggagtgcacatattaaatctggacccttcgttcaacaattcagcaatcaatgactgaaagaggatgtaaagggaatgcaggtagagctaatggcccaagctaaaagaatgaatcatgattatcattcgaggcaattcctttatcatatttcatctgctgtattctccaagtgacattttcactgatgtatgctcgataactccaataaaggcataaagcgagagatgctacagctttgttgaatgcaaacaggtttgctcgtgttgaattattgtaaggccgcgcatagcagagcgtgcatatgttgaattattgttgaatgcaaacattgttttgtaccgtagactatattgtttacagagtagagtttgaaatagattagagtttgaaatagagtaaagtttgaaatagagtagagtttgaaatagtgagtaagataggagatgagatagagaggctgctggagatagcctatcgtattacaagtgcagaaacttgctccagcttgcttgggacaaaagaatctgatgccatttttgttgttattccagaacagcacaactcaactatcagggtttttttatctggttataagctgttgttttgtactgagatttcattgttcacttgaagaaacccttgctgggagagcagaatgcatggtgctgtttaagtgatcccgtgttatatttactcatgtagtcatggcatacatgtcaagtatgctggttgcttttctgctgtccggcgtcatgttctaaattaatatatgtagtgatatttctg

SEQ ID NO: 29733 - DNA, 687 bp, Zea Mays
aaaaagtactcggtaaagccaccggcactcggcaaaggcgcggattccggtagtgatatatcgctacacgcaggctggggatatcgtcgccaaattaaagcaagcgaactaaagtagtaacagggaaagtgggtgtgtcgtcgtcgtcgtcgtcccaaggcatgaacacggtgagtgctggatccactgatttgtttcctccggcgatcgatgggccgacgatggacgacgggtccactgccatcgatcgatcggtggccaccagctgatctagctttggcgtccgcgtcgtggtcggtcgtcatcagatccgagcactcgcggtggtcgggccggcgcagagacgccgtacgcggcacacagccggccgggccccgcgcgtccagacaaggcggaaggaccccgccggcgtacggacggtacggccgcactggggaagaggacggaaggggccccgacacggtctgcgccggtggccgaaacgggatatatgcgccactgctcacgggcgtcagatatgatccgcatcgatccatggggttcccgccggccgttccccggccacccccaccatgcatatggatccgacgtacgtgtgatcgagcgagctagctgctccgctgattgttttttggcgccatgcacgcacgcacagtatatatacctgccaaaatcttggcatgcatg

SEQ ID NO: 29734 - DNA, 2429 bp, Zea Mays
tttactagggccgtttggaattgcaaatgggagttggagcggcgaatgacatgtggcatgtcttgtgggatttgcatgctctgccagaagatgttgtgaggactgatgcaataactaagcttgctggatggacggatgcgattgcatagagccactatggcctaccgatgatcttctcgtcaagtatcagtacatctcagacttcttcatagcccttgcgtacttctcgattccattggagctcatatattttgtgaagaagtcgtccttcttcccatacagatgggtcctgatccagtttggtgcgtttatagttctttgtggggcaacccatctgataaacctgtggacgttcaccacacatacaaagaccgttgcgatggtcatgaccatagcgaagatttctacagcagtcgtgtcctgtgcaactgctttgatgctcgttcatatcattcccgacttgttgagcgtgaaaactagggagttgttcttgaagaataaagctgaggagcttgatagagagatgggacttataaggacgcaagaggagactggtagacatgttaggatgcttacacatgaaatcagaagtactcttgatagacatacaattttgaagactactctcgttgagctaggaaggaccttgggtctggaagaatgtgcattgtggatgccatctcgaagtggctcaagccttcagctttctcatactttgcgccaccagattactgttggatcatcggtgccaatgaatcttcctgtcgtcaatcaagtgttcagtagcaaccgggcaatcataataccccacacatcttctttggcgcgggttcgacctcttgcagggcgatatgttccaccagaagtggccgcagtccgtgtacctcttctacatctttcaaactttcaaataaatgattggcctgagctctcagcaaaaagctttgcaatcatggttttgatgcttccatctgatagtgctagaaaatggcatgtgcatgaattggagctggttgaggtcgttgctgatcaggtagcagttgcactatctcatgcagctattctcgaagagtccatgcgggcacgtgatttactaatggagcagaatgttgccctggatttagctcgaagagaggctgagatggctatccgtgctcgcaatgatttcctagctgttatgaatcacgaaatgagaacacccatgaatgcaataatagccctttcctccttgcttttggaaactgagcttactcctgagcagcgtctaatggtggaaacagtactgaaaagcagcaatttgttagcaacactcatcaatgatgttctggatctttccaaactcgaggatggaagccttgaactggagattaaagcattcaatcttcatgctgttttcaaagaagtgatgggtttcattaaaccaattgcatctatcaagaggctatctgtatcggttatgttggcaccagatctgccgttatgtgcaattggtgatgaaaagagactcatgcaaactattctgaacatctctggcaatgctgtaaagtttaccaaggagggacacatcacgcttgtagcttccattgtgaaggctgactctttgagagagttcagaaccccagaatttcatccaactgcaagtgatgaacatttctatttgaaagttcaggtaaaagatacaggctgtggagttagtcctcaggatctacctcatgtattcacaaagtttgctcatcctcaaagtggaggaaaccgagggtttaatggtagtggtcttggccttgccatatgcaagaggtttgttagtcttatgggagggcacatctggatcgacagcgaaggaaccggaagaggttgcaccgcaacattcgtcatcaagctcggcgtgtgtgacaacacaaacacctaccagcagcagctggttcctctagtctggccaagcagtgcagactccaatttgtctgctccgaaagtgctgcccgacgggagaggatctgtttccctgaaatctcggtaccaaagaagcgtatgagctcagtgtaaatgattgacggcatagtgccaagtaggggatcgattagtgccattgtctaattttgtttgtaacccagtcatagcaacatatagtgtacaaataatgtaaagccaatggagactgcagctgtgtatctgggtagcaacgctgacttgctgcattgagtagtatgtcctaccagcggattgaattgcttgttctggggtgtgcggcgcgcgccccgttgattgttctgttgtaacttgtaatcccatattaatcgtgtaatatgaaattcaatgcaaatacacggtcacaagctgttttcggtgccctcgctccatcagttggttcagatcgtagatgctgccagttgcatgtgttagataggactggaaaataagctcgaggcttg

SEQ ID NO: 29735 - DNA, 1185 bp, Zea Mays
atggatgcttttctttacatagttatgaaatttcagtgcacctgtgttgcatgggttccggagcgtgaaggaatttttgttgttagtcatgctgatgggaatctgtatgtgtatgacaaattcaaggatggaaatactgattggacatttccaactgttaaggatcaaagccaggtgctaatttcacatgcaaagtcgagtaagggcaatccaattgcaaggtggcacatctgtcaaggtgcaatcaatggcatttccttttcaccggatggtgcttacttggcaactgttgggcgagatggttatttaagagtatttgacttcacgaaagaacaactaatatttggtgggaaaagttactatggtgcactgttgtgttgctcttggagtgcggatggcaaatatttgttatcgggtggtgaagatgatcttgtgcaagtatggagcatggatgacagaaagatagttgcatggggtgaagggcataattcatgggttagtgcagtttcttttgatccgtgttggtcccaaccaaattcagatgaaactgaagaaaatgtcatgtatcgctttgggtcagttggacaggatacccaactgcttctctgggatctggcattggacgagattgctgtccctctacgccatccttccggtgggtcaccgacattcagtagtggaagcccttctgcacactgggataatgcatgccctccaaccggtgttctccaaccctctccacggatgcgagatgtgccgaagctctcacctctcgttgcacaccgggtacatgtagatcccctatctggcttggaattcaccagtgaatcaattgtcactatatgccgtgaggggctaatcaaaatttgggcacgacccatccatagtgaaaacaaccagcagccagattcttctgaacaggttataggcagtgccactgctaaggataagatgttaacatcgtcaaataaagcagagtagcttgggaaggcttgcagtaaaggattgaagaggctttgctagcatttttgttagccatttcttatcctgcttcatcggcaacgtttctagttacagaagtgtcattgttgccatcaatgttggcgaaagaaaataacagaacttgctcctgtacatatacagacattgccataagatgaaatattacaagcttactggtttgat

SEQ ID NO: 29736 - DNA, 3063 bp, Zea Mays
attgaatgcaaaatttaatatggaattaccagtgaccaaaaccggaagtagcgccaaataagaaagaatttcaaccacataaagtttaacacctgtactggaaagtttgagaagtcaatgggattgataaatcaataaagcactcgctatgtcagacaagaaaagatacataacacttatttaaagtagggaaccatagcaaccaagacacttattaaacaaaaaatataatgctgtgatgctcccataggtggtgcaagaaaacttatatgcaggcatgggttttaagacgtgatgcgtgaccaaggcgagcagacaacttccagccacctaggcaggctaagaaatgcccaggcagcaaatatccaaggcgagcagccactgcccggacgcctaggtgatacctcaagaacaatgtatgcaggtaatcagtgagagattctgatatttgccatcagcaagaaacagatttgtaaaattgctatcaggctcacatttcatagacccagctggacccacaattcatagacacagtggtaattataacaagaagtcaagaagacaacattgtgagtggcaaaaatcaatgaatagaataaagaaagcaaataaagaacaacggaaatgtcaattgctgcacactgacttaggaggggacacaaataaagtgccataagtgacaacccagaaggcctggagcacattaacaggaccttacgaataatctataatcttaccccataactgatgatgaaaacctcaaaaggggataactgctgccatagccggctgtcgtcagatattcaattgaaaattcagaatatagcagcgaccattagaaagggatagagttaattgtatgatatgaagacaaacaagtaccttactacaaaggcattgtagtggaaaaagtgtgtcatgccttccataagaaggaaactcaaaatccaccttagaccataccaagatatttgtgcaaatgaataatttttctggggtacctctaactgcaagatcgctacatcaaaaacaggttagtatgtgtaactactaggacatttccatataatgccactattcaactgctacatgaagcacagttgaaattcctctccaaaactcggcctcacagtttcttaagtcaccttgtgacatttgaggtaacttaaacaaagaagagtacaaaaggtattcatgatgattagtggtatattacaattatctatatctagattgaaatcaaagtctctttcatatttccttattttgaaagaaattccagactaaactgctgccgagttatagacaggcctattccttacaaactcaaaaagtctatataacccccaaatgtttcgatggttgactacataaccccctcaactatgaaaccaggtattgtaaacttaaagtatcccataccattcaaacaaccccaccatggtggttttgaaggcggttatgctgatgtggcatattaaaaggatggtggcataactttgagtcaacaaataatatctttctcatctccatctcttacgttaagaccccatatatcatttatgccttatcaactttgctcaactgctgtttcctgcacaacccagatctccgatggccactgtgcctgttgcccttccgctggccacagtggatgacaaaatctacaagctcatgccctgcatccacaactacaagaaccacgaggaagatactccggctccaggttcatcgttgtctccatggatgctgccacctgcattgtcggacatgtggacattcaggacctcgtcgttcatgccacacttgaggaatcaagggtccttgagctcgggaatcgctcctgctggttcttggctggctcaagatgctgcaatgttcaatgtgaagaaggtctggctagtatcctatctgccaccagggctcaagattctgccatacccacacttcgtcctcgacaacctcctcccaggacataatagccttaaggctttggacattgctggcgtcttccatgtggcgtgtagaccactcatccgttgtggagagaccgaagcaggagagatcacgggaggtgggaagggtgaagaggaagagtagaaataaaaaaaaaagaatataaaccttacaggggggctgtgtactagtgtggcatgccaaggtggcaaaactgccatgcaaaaccagctaaggggttatttgaatagattaattttttttatcgaacacgcatgatagttgtgcatctttatatatttaactttagagagaagaaaaggtcttacaagaaaggtaacttgctaggcaagttccccaaaaccacccacatacaaagggtagtattaaatactttaagggttacaatacctagtttaacagttggaggggttagtcaaccatcaatacattgaggggttagtgcagctccaaaaggacacaaattttcttccccaaggcgtcttattagcgctgttgttaaaaatgagattcctaaaaaaagttaaacccacagtagactcctaataaataagccctaatattttaatgtgggccacaccatgtgctaattgggctggttgctagacttgcatccgtacttgtgtccttaccatcagatggatacgcgtacctggcggctggcattgcaccggagtcagttagctgcgcgtgagatgggcgattggggaaggctccgcgacgcgcaaatttgcggggcagcaagcagcggatgcgggacgcgaagaatatggagacaagagagagctattggaggacttaaaatatgttttctttcctaaaaacacttttggggttggtttacaggatttcttggagatgctctgatataggctctttccttacaaactccttttttgaaggtgcgcataagaaataagaatagataaactgactggtaacacaacgcgccagctccctaagggaccctagcagtttgcctgctggtggtcatttttggtcgggttgttgctctgtgtgcgtggtgcgttgtgttaatttcaggggggtctcggcctaagggcctttgtattaggggttgacaag

SEQ ID NO: 29737 - DNA, 5869 bp, Zea Mays
cgtgcgcggcagcgagcgtgcgtacacgtcacgcaccacgtcagaagccccccaacccaccggtcccccactcagaccgtccgacgaacgactcgacgactgtcgactcctgcacaggcaacacctcacctcgatgatgcatccgctccgccgcatcctcgctctcttactcgtcggcctcctccccgcggccgcgtggtccttggcaccaccccgcttcccgaggccccaaccccgctcgcggccgggagctaatggggtgggagactacgagtacgagacgcgatacttccggcagcggctggaccacttcagctttccaggggtcggggacgaggacgaggacgaggcggctgcgttcttccagcagcggtacctggtgggccgcggcggtgggtgggctggacccggcggccccatcttcttctactgcggcaacgagggcgacatcgcctggttcgccgccaactccggcctcgtctgggaggccgccccacgcttcgccgccctcgtcgtcttcgccgagcatcgctactacggagagtccatgcctttcggtagcaaagccaaggcgtacagcgactccaagtccctggcgtatctcacggccgagcaggcgcttgctgactttgctgtgctgctcactgacctcaagaggaacctatcggcagagggcagccccgttgtgctctttgggggctcatacggtggaatgctagctgcttggatgagactcaaatatccccatattgctattggggctctcgcatcatcagctccgatcctgcagtttgaggacattgttccttctactatattctatgatctcgtatctgatgattttaggagggaaagtttaagttgttttcttacaataaaagactcctggaaagaattagatgaccaagcaaacgagcaagatggtcttctgaaactaagtaaaacgttccacctttgccagaccctgaaaacaagtggagacctttcagattggttgagctcagcgtacagttatctggccatggtggattacccacttccatcagaatttctcatgcctttgccagccaatcctattaaagaagtatgcagaaatatcgacagtcaacctaagggtactggtactctggaacgtatatatgcaggagtaaatgtatactacaattatactggcactgttgactgctttgatctaaatgatgacccccatggaatgggtggatgggactggcaggcttgtaccgagatggtaatgccaatgtcttacagtgaacaaaggagcatgtatccaccttataaatttgactacgcttcctatgctgaggattgcatcaaaagctatggtgtcaggccaaggcctaagtggattacaacagaatttggtgggcataatatcactaaggtcctggaaaattttggtagtaacatcatattcttcaacggacttcttgacccatggagtggcggaggtgtcctgaagaatatatctgagagtgtcgttgctattgtggctccattaggagcacatcacatcgatctgcgcccggcaactccagatgacccggattggctggtggccctgagagaatcagagctggagatcatatctggctggctatgggattactacggggctggaggagcactcttccagcctgtagctgtgaagggctcctcttcatactgaggaaccgcaccctggctaataactcaaatgcttggtctcagaaataagagggccctgctgcaagtgccaaccaccgttaatgctgctgcagtgctgcgtcatggagaaggaagatcttcatgttgatgatcgggtccgctcctgcatcatgtgccatatcagtagcatttggtctgtgtatcaaatgggacatgtacttggctgatgaggtgaggaaaacactggataacgtaacgactctttcgcagtggtggtggcggtcagcaggtgctctagaggcttgatatcacgtgcatgtgccgctgtaaataacataatgctctatgtacgtgtacatctctactactctataagcctgtagtgtaggcgtgcacaccccgtgcaccgtgttctgcctccaacgtcctctcgcccacgcgctccgtcaatcacgcaagttatgccaccgatgtcgcccgaccgccccatccgcattgcccccacccccgtccgccgctagatgcggatcccgccgcttccagcatccagccaagcccgtgagccgcacgccgctcctgctcccgctccgagcgccttaggtcaggcggcgttggcccgacggcggggggaggcatcacgctgccatccatgggcgcgcccccgccgccgctgcacccgacgcccacctctcccacggcgcgcccgcaccaccaccactacctcttctccatcaagcagctcaacacgctgggcgcggcggccgtgctcgccttctccaccacggtcccgctctcggagactgccttcgcggtgctcctcccccctacctcctcgtcctcgcctggctcgccttcccgcagcgcccaggccgctcgagacccggatcccgcctctacccctcggcaccatcgtcagtgtcttcgatggccacaacggccccgacgcccccaccccgacagacactgagccctcttccgctcgcgtgactggtgccccctcaaccctcgactctcctccccaccgtggccccttccccagccccagtgaccagcgcctcccttcctaagtgcggccatggcgaccatcgtgccctagcccgcccctgcaccatggcaagcacaccccttctactcctctcgccccaacccctgtgcagcccagcgcggtggcctataacccacagcaaggcgcaactagctggctggtggccctgccccggtgagcccctgctaggcgcggccagcaacccccgtggtctagcccctgcctaggcacacccaaaacccctgcccttgcaacttgtcctcggcgccgccccactcgcccgagatctgccgcgacaacaggaattggacgtacattgggactttgaagtgcagctaaggctacctggcgattggtggaaagagatctgatgacggcgatcatggtcgaagagtaggagaggccctagaagaaaggtgacatattctcgttcttcggcagcggaataaatgcaccgagctgagaaaggacagaacaaagaaagatcttaaaatcaaagctaaagaagtggagattcaaaatctaaaaaaaagctaatgtcatggaataaatgaggttgatgtggagctaaaaagggaggctatgtttttttgggtgaggcggttatcattggcttgttatgtgaacattattgtgatgtggtttcatgttgtccaggtgccagtttaacaactttttgcaccaccatgtcgagaatatcattgggtcatgtctggagagtaataatgatcaactgatgggccatgtccttgatgagtgtaaacttgttacaagaattttggaagcagagaagaactctgctctatcgtcagaattggacggtcgcatcgacgccaggttccagcagaggagtcgttactctccttgattccttcaccgagttcaccgaggaatatgaactgaaaatgaaagagaagggtgagcaactgattgtaagatctttcatcagtgcaacctctccttttttagctttcatcagtgctacactcccacagtccccacatgcacgcagatgtttgaaaatataaaataaaatcaacaacactgcaaatttactagctcaactacaagaggcatggagttattattaaaaaatgaagtactcatgatgaattccaaacaaaaaatctgacctaataatcaacataatataaattgttgtagctcagtcctatagtcatactgagctactgattagaatgttcaagaatgaaccattagatttcctgtgctaaaatgaggattgatcataagactaatgacgatcaagactatcaaggcccctacaaacaaagctcatgggaaattagaaagtgaaatgaaataccatgttgaaaacagggccaaagtagctagcaattcaaagaggcaaaatgctgcaaaatataatgcttcatgagttgttttcggtgttgtcaaaatctcaggtgccacaatggatgaaagaacaacatgtagaattgggttccaaaggacttgagggctacttcatcacaacctgtaactgaagatcttgaataactgactacatcaccatgcaagactaaagtttttattttattaagaaaatgaccccaaagaagaagatgtgtgatatatccctgatgactgcatatgtgttgagggttactacacactgaaaaatagaataacagactctgtggctgttagtgaagagggattagtcaaaaagagaacaaggcgtccaaaacctgttggcaatgagggggctgtcagaaagagaagaggctctgccatcccacaactataattgttcaatatatatggctgaattgaagggagaagatgatttatcagcaggctctatgagcacaactgcatagtcaagacataattcttcggcccctgcagacttcaagcagctaagaagtgttacgcccattgacatctttccacgacaagagacctgggcaagagaatccggacgtgctgagggggagaggaaggagaggaggaagatatcgggcaagagaacccattgacatccttggatagggtccgtctgatgccattcatcgctgtctttgatctcaggaaggcatcttagccagctcaattttattagaaatattgttgttttaagatacagagtccatggttactattgtacgcttttctgagaaacttgtcatcccaataatttggttctggagctatatactgatctagcttgttttagtaacaaatgtaagttgctcacatttcctttagactgtcactagaactttgaacgatcaactcgtgcttctaaatcaagaattaccatatgtgttttttgagttcgatcccttctattttttatttggccaccaaacgaagtttttacatgacaagaatgttataaatacttctttaaatcacgagtttcgtgtgtcacgtacgtgcaatgtaggtatatttctctttcatgcttctcgcgatcgattgtgccgtcgcaacgcacgggcattaacctagtctgtacatatgctgccagtgtgctgtgtgcgtctggtgtcgcactcgagtagtacgcgacgggtctcctgcggccctgttggagtcgtcaattgtcagccaccttcgaatacgagtagggatgacaattgacaacggggacagaccaggagctgtatgaaataaagaacattgtagatgctcttaatgagcaacgcgagaagttgcaagagcaaagaaagctgcttcattcagaccgagaaccaatctgacagcaaatccagcagcttactgggttagaagagctgaaaattgaatctgagaacgggcaactaactgtctttgacacaatgtgagaacttaaagaaataaaggtggcgtggaaaacctgaaagagaacggtgttcacatgtctcctgacgagaggatgtataaaaacgcaaatgcaaagcacactactgtgaagagattggaaccgtctcctgcgatccacaccaattttcctgggtgttattagaaaatgtgctcaggtgatattcaaaggctgtgcagagaagagcgctgatgatccccacaacacaacgatagattggtacctgcaaagttggcaatgcaaatgtcaatggctctagcttaattagctgctgctgcctattcagatgaactgttatttggtcatcagctggaaaatggtgctgggaa

SEQ ID NO: 29738 - DNA, 2891 bp, Zea Mays
ataacaaggagtcctttattattattcttattatcttagtgtaaatattattattattaggggcgtttacagcgtagcaagttcactcttgcaagcaagggacttttacaagagcatgtagctagttagttcatttggagtgtgaacatgtcttatttgcacacttgcttttttcccctctctttattttctccatcttcaggatggctattattagctcctttgcatgcgttcatggaattctgcgtcagaaaaccaaaacggaaaatagcattattggtcagtgtaatatacatgatatatatatgctacggtggagttattaggatgatatatctctactactacttatgttagtagtgtaggcgtccacacaccctctcggcgcatggttctgcctctgcagccgcgacacccgcgcgtgccttcgcctccgccgccgcgatggccgtgcctctgcccccgcctcctccgccctcgcgacgctgcgccctcccccgcgatgcctgcgccttcgtccccgtgatgctcgcgcctacccccgcctcctctgcccccgcgacaccgcgcgcgcagcctcctccccgcgatgcccgcccaagctcccaaatgccggcccccgtctcctccaccgcgactcccctcgctctcccgagactcccagatgctggcccccgtatcctcggccctgatgccgccgcgattcccagatgccggcccccgtatcctcggccccgcgctcgctctcctgagctccgacgggctcccgccctagcccctgacaccatgttgtgcccaaccctaaacctagccaccacgccgtcaacaacgccaccttccttcctcgccaccacaccttctttagatggaaggcgcgactggtggcatcttcctgatctcggagcacgtctaatcctcgctccaaatgctgctccgcccccaatccgtgcggcatcttcagatggaagccgggacaatgccccatccccctctcccgagccccgacgactgacattccagggatgtcgctctgcgatcctcacctcctcgtcgttggcggtcgcgcgacctcctgaccgtcgtctccgcccgcgagatccccccgactcgcccacctctccgtccacagccgcctccatcacgcacctccacgccgacgagaaggctcgcccacctctcagtccacgactgcctacgacgcgtcttctgaataaagatctctcgaagcacccggtggatgggttctctgctgggctggtcgacgacagcaatgtcttcgagtggcaggtcaccatcatcggaccgcctgacaccctatagattggttgttggacctgtttggtgttcttcatgatgggaagaagtcgtacccgaccattctggcatttgtgaacaatgttgatgatgcagagtttatattagcccatggtactgaagtctttggttcaccttctagcaatcctcttcccaaaagtctcgagaagcttgagcaggttctaatgcttggcctagaaaagggacttccaatggtgctgcctaatccagaattccagattatgtcactgtcgaagcttgagatcttcgtgtcatgtctgggtttggaggctcgtcggcaaccggacaggaaaacagcaaggcggaagggcattgctcgatcgctggtccgatgagtggcactgtcagggagcgtgacaggggcgacaaatctagacctccacgtcggtaagatgttgtggcaaaatgtcagtgagctcacattttgaggagctgagggtcaatgtcagcgagctcactgttgaggagctgagggtccctgagtacctgcagttcaaggaacaacttatggaagaaggctttaaggttgaggctgggagaacttaccatcggacagttctagagatacttgaccaattggaaaaaatttggcttacattgatggatgaatatgatttatatgaagttcctggtatctatcggcttcatggtatatctctactactcttaagaagataccaggtatgttcctttcctttcttttattttcttagccccatctttatcatgttttcaccattacagagtttgcctaccgcccccgttcgcccgcaagcaaactctagccgaggaagacgcggtttctcacctctgcgccctcgccagtcccacgagccccgccttccctagcctctcaatgcctccagattctctaccccttgccccccagtcgttgtttccgcccgcgccgctgacccatgacctcgcatgcggggctagggtttccacatgcgatggaagtagcggtgatgactttgctgttgtttgcatctgcctcgacttcctcggtccggtcttgccatctaccagcgctgcctaggtttgcctctcctgtcctgcagtgctgaagttccgcgtgtgctggttggtgtgtgttacgcgtcttggaacgagagggcaacttcgatgcggggctttgattggctgttttgtttgtggtgggggtagttgggtttgcgacattttttaggaaaccgattggtttcgtttcagcttgttttcagagaagggatagtggatttgtcaacactagactggattccataaaaatttgatagaatcagtgctttcagctttgagctagactacacatttttctgtgaggttgcaccatttttccctagataacttctatgttgaaatggtttagttctgaagctgtcattgttagataataacaaggcaaatagatggttactgtggcagtcaaaagtttgaagccagatgcgcttcaaggatgatcaaaggttacttgtatatgaatttcatggcacggggaagtcttgaaaatcatcttttcagaagcctaaccagtttttttcttcactaagtcttct

SEQ ID NO: 29739 - DNA, 839 bp, Zea Mays
ttccaggctctgccaccacctctcccaatgggcggccacagtttcttcctccgacaattcgtcacgcccatgccgccctcccctccgaccacctaacttcgctccgcccatggccgtcgtcgcccatgccggcctcccacggcctcgcctctttctccctttctccttccacggaagccccatctattcatcatgcctgtcattggctctgccttcggttgctgtagattatgaccatgggaacccatggtgtcgccctgacactcctcacaacggtgcttctcgaggccaccatcccagtgtcagcagtggatggccttgcgtgggtcgtgcaagaagccacgagttcctcatcaagatcagatgcaattattggtcttggtgaagcagaggaccgggtaggattgttgggtacacttgccaccttgcctacacactgagaaagtgtccatattaatgaaggcactcctcttgaggatcagaagcgagaaacttctcacacttgcaaacaacaactttgacacggaccagacgatgttcaagatccttgggcctaatccccaatgctctaagcttttgctagcaagaagtggtggtgatgctgcttgcaccaataggtctgagctacacatattttatagtctgggatgtttaatattgtagcttttcagctaatccttatatatatactagatgagtgcccgtgcgttgcaacggaaacgtataataatacgataacttatgtacaaatgtgtgttatattattatgagaaaatgtttcggaatccattgtgatcctacccatatataaatttggttatttaatctagctatttcac

SEQ ID NO: 29740 - DNA, 1161 bp, Zea Mays
ggaaagtgaggccacgcactatcatctctgtctctccccctagctctctattggattggcttgctcccccaataggagaaaagcgaggattcagaatcctcctcttcctcctccccttccacgccatctctctcttcagctagatagcttctcgattcaccttctttccttgcactcgtctctagcagccgtggtgcagctaggtgattgagtatatacgagatgcagcgcacgaccgatagggagctgtagctagagatcgatcgagacatgatacgtaccaccacacggtcgcggccagcagcaccagcaagaggaggaggaggaggaggctgtcgccgccatggtcccaacaactaggaacctgttgttgcaccatgacgtcgacggcaagagcagccgcggcaggccgtgctaccacccggccggccaccagtactacgtcggcatcgccgcccaactggaggcctcggcggcatccgccgcgtggcagcaggaccaccagagcaagccgtcgagatcccctcggctgctgggcatggcagacgacgacgagcagccggacgcggcggcagggcccagcacgagctccgcatcaccgggcggcgccggcgcaggaaacggacgaggaggagactggctccagcttggcctagccgcagccgcggcgtcggcgtcgtcctccggcgacaacagcaccatggatccggatcccccggctcccacggagctggagctttccgcctatgacaagcggaacgcctgcaggatgaggcggccgccgttgttcccgctgccgcttaggagctaccacccgccctacggctacggacggtatcgaccggcggcggcagcagctagccggtccatgccgttcatgcctccgtccaggtgctccagcagcgatgccataataagagtcatcagcccgccgcggcggcggacggaggcgcccaggctgtggctgacgcttcaggcagctcccaaccaaagtagagagcctgttttgcctcagatagcaaagagctacctaagaatcaaggacagcaacatgacggtggaggtggtgatgaagtacttggccgagaagctaggggtcgcgcggtctcggtctcggtctcggtctcatcaggggcgtccatgggcctgtgcaggctgggc

SEQ ID NO: 29741 - DNA, 3289 bp, Zea Mays
tgttagagacgttcttttaataaaatgctgtctcttatatttttttattattctcttataatagtccttttaagatacaagacatttacgtacatgccctgataacgtgaagcgagcaagcctgggctgcagccgatgggctgtatcacgcagctgcagcccaaacagctgaccgattgccgcggacccgggaggccgggacgagagagacgagcgggagcagccagcacgacgcctgtccgtctcccactctccctccattcccctctctctccttctgcctgtgcccgcgtggccgcgtctgtacctgtacggccaccaccatttccatctccgatccccgcgaccccccacccagccccaggcgcccgggctagatccggcccacgcgtctactcgccccctccggctccccttctccctaatcgccgtcgccgggggtgcaggcacagcggctgcttccgctcccgctcccgaggggggaggcggcaggcaatggcgcggcgggtgcggccgtcgcacctggtgctggcgctggcggcagcctacctcctcctcatctccctcaagttccgccgcgtgctggacctggccgccaccgacctcgcggacgaccctgccgccgccgccgccgccgccttctcttctccgtcctccgccgaccacctgcccccgcccgggtccgcttccgccacctcctcctcctcctcgcccccgttcccggtccgccccttctggcaccgctacgaccgtgtgtccctccccgacctcgcgtcccgcaaccgctccgcgctcgaccgcatggccgacgacgcctgggcgctcggcctcaccgcctgggaggacgccgccgccttcgcaggggacccctgggcgctgctcgccgccgccacctcccgcgcctccgacgccgccaagtgcccctccgcggtctcccagcgcgcgcggggccgggtcgtcttcctcccctgcggcctcgccgcgggctcgtccatcaccgtcgtcggcacgccgcgcgcctcgcacagggagtacgtgccgcagctcgcgcggatgcgccagggggacggcaccgtcatggtgtcccagttcatggtcgagctccagggcctgcgcgccgtcgacggcgaggacccgcccaggatactccacctcaaccccaggctcaggggggattggagccagcaccctatcctcgagcacaacacctgctacaggatgcagtggggcgccgcgcagcgctgtgacggcacaccacccgacgacaatgacgacaaaggtcctctgcttcttgttgcttcttagcatgtcatgtttctgttttaactaaaaatagtacgagatggtttgcaatgacttccgttcgactatggcaacatattcttaactaacagacctggtagtaattacggtaacttttgagtcgcgattgccccttcacccaattagcttctactgaatttgacatttatggccactatggatggtttggtttcaatgcataggagtagatagcaaaccaccaacaattctctgcacgttcacacacttgcattttttacttcgtgttcctgttacataattgataaagagctgtctgcgggactgctctgtttatgtggtctaatgagagactagcttatttggctaaaagctacagtttcatcccccccccccccctccgacagtcgatggattccccaaatgtgagaagtggatacgcaatgacattgttgacaccaaggagtccaagacgacatcatggttgaagagattcatcgggcgtgcgaagaagcctgcaatgacatggccattcccctttgtagaggagaggctatttgttctgactatacaagctggagttgaaggtttccacatttatgttggtggtcgacatgtgacatcttttccttatcggccggggttcactcttgaagatgcaacagggttatttgtcaagggtgatgtagatatacattcagtttatgccactgcacttccttcgtcgcatcctagtttttctcttcaacaagtccttgagatgtcagaaaagtggaggtctcggccactaccaaaaggccccgtttcccttttcattggaatactgtctgcatcaaatcatttcgctgagcgcatggctgtgaggaaaacatggatgcaggctccagaaataaagtcttctgaagccgtggctcgattctttgttgcactgaattcaaggaaagaggtcaatgtaatgttgaagaaagaagcagaatactttggagacattgtcattttgccatttatagaccgctatgagctggttgttcttaagacaattgctatctgtgagtatggggtccagaacttgactgctgcaaacatcatgaaatgtgacgatgatacatttgtgagagtagatgtagttctgagacgcatcaagttgaacaatggtgacaaaccattatatatggggaaccttaacctcctgcacagaccattgaggactggaaaatgggcagttacagacgaggagtggcctgaggatatctacccgccatatgcaaacggaccaggctatgtgatttctggtgacatagcaaaattcatcgtgtcacagcatgccaatcagagtttaagactgtttaagatggaagatgtaagcatgggcctatgggtcgagaagttcaattcaacaaatcctgtccaatattcccacagctggaagttctgccagtacggttgcctggagaactactacacggcccactatcagtcacccaggcagatgctgtgcttgtgggataagttggttcgtggtcaggcatcctgctgtaactacagatagcagagtgaagctaaggattgctggacgctgtcctctcttcatcataccccagccaggtttaggtcggttggctggtattttctttttcgacacaatcgtagtgtagtaggtgttgttgctcctccgtcgctggctcaaatatgagctaaatgcatgggtgtgcggtaggagattgaagatttaggaagccccaaccagttggttattgttttttacacgatctgtattggtccaattgtggcgttggcgtccttgttcttgtaattgatccaattttgatgtagtaggccagattagagggaatattccagatcagatgtacgtctccgttcttttcttatagtaataactagacacaatttgccctgatctttgcaggatcctgctgctgaagatcttcagcattcctttgttttagtcactttgtgttgactttagttttagtaatcttgtggcagg

SEQ ID NO: 29742 - DNA, 2515 bp, Zea Mays
tccccctccccctccccctccgacccatccccgccgagaactccatttcccggctcgcaccgaggccaaggttccctcgtcccttctccaggcggcgcctacgccttcccgccctcctccaagtccaatgcctcgcggccaccggccccgccgcgcccgcgccgcggtggcacgcggcactgtccgccgcggcggggctgtacccggcctacgtcgcagccggcgcctccgtggccttcacgcggcccgaggcgttccggtggttcgtggcgctggcgccggggtcctacaccgctacgctcggcttcatcatgctcgccatgggcctcacgctccagctcagtgacttcgccgccctcctccgcgacaggcccctcgccattttgttcgggtgtgccgcccagtacaccataatgcctgcgtttggcgctatcattagccacgcgctggggcttcccccgtcgctctcagctggcctcatcctgctgggatgctgtcctggaggaactgcatccaatgtgtggttcaggtgactttagttgctcaaggcgacgttccattatccgtcgtgatgactgtctgcagcactcttgctgcagtgttccttactcctctgttaacgaaaattcttgctggtgcttatattcctgtggatgccgttaagctctctctcagtactttgcaggtggttgttgccccaattctattaggttcattgatacaaactgcattcccatcagtagctcaatttctgagtccttttgcacctctgatggcagtcttggcttcatcacttctagcatccagtgtcttctctgagaactttgtgcgcctaagatcgacaattgccgatgcatcccctgtgaatggaatgttctttggggatgtagggactgtcatcttctctgtcttcttgctgcattttgctggtttctttgtcgggtatgcagcagcagctataggtggtttcaaagaaaagcaaaggagagcaatatcgatcgaggtaggaatgcagaactcgtccctaggggtagttttagcaaccgcgcatttctcctcgcccttggtcgcgctgcctcctgcagtctcggccgtcgtcatgaacatgatgggtagcacactgggtctcgtatggcaatataccagcacttccgtgtcagagaacgaaaccagtgcgtgatctactcttactgtcgccatgtgcttaatctaatgtgtcgtatctaccaccaccaccactactactacccgaatatacctttcgagtacttttgatcatgttggggaacggggtcgctgatgatgaccctggaatggaaaaaatcttgctgtcttaattactggaggacccaggttacctgtctgaattatgtgggtggtgaatgcccaggctacatatgggtcccttttttcagcactgcaaatagagggaaaacccattttgcatgtgacctggtacattacaatgctgtgctgtgcctgcaaacaaagccccgcgcccactgcttccacctgtatgtgcgtgctcgtgcaatggcatcaggcaaaggtcgcaaggccaagtgccatttgcacccatgcgctcttgtggcagtagtgctaccgactaatgatgatgaccagagctcgcgactgccccacagagagaggtttgccgaaccgcttgatgagattcattcacggaaccacgaggagcaggcaggcagggaaaagcagatctcgccacagctgcaggatcatgatcatcgcctggtgttttcctgggatctaaaccacgctgcttactttttaaaggtctggatctggtcaacagtcaaccgagttgtgggatcatggttgccattttattttatttttttggtttgggccagcttttcttcttgcagctcaacggcgacgacctggagcgttcagctttgcctttgaatgaccggcactgtagcacgtccagatcaggtcccgttgttctgaatcctggctagcagcttagcatggtacggtcaaatgaagctgtcatgtgcgcccgtaacgagtcaaagtagatgaacatgtgagtgcaactaaacctgtccgttgagatgaacatgtctacgctacttttgccgaggctgacggcgtctcccgctcctgttcaagtggagattaacaaagttgctcacacacactgatcggggagggatcaaagtagtatatgttcaatctggctggttatttggtctgtgaatcatgtgctgggatttaactagtctctctgtctcccagttgcggttgatcagctccttcctattaatgttccagccacgctgagtcacagctgctggctgaacaccgggcatcatccagtggagttctttttgtggacgaagtcaaagatgacaatgagacgtgattagtgcggacgcacgttctcattgaaaaattaacggctttcactgtcatttcgtatttttattttattcctgtaatggttgcactatgtccttgttgtgtatatatatatattgttggccattcc

SEQ ID NO: 29743 - DNA, 708 bp, Zea Mays
accttggctttaaaactcgccttgcagcagccccattgctgctcgctcgaaacgatggcctccgatctgtcctgtcgcacacatattaggtgcaacacccgtgtaattgaccgagccccaccaagaacaacttgcgcgcccaatgtctcctactattaatacttgtcgaggagctgaagaagcactacgggttgcggcgcggggggcgccatactccgggaccacgagtccagcaactacttcagggctctcagtgcgctggccagggcgccaccgcggcgccggaagcaaccggagatcgtgtggcagttgcccggcgtcgagcggctgcagcagtattggtggccggggatcgccggcaccgtcatccccgcaccggtggccgtcctcagcaacaaggagctggtgtccgaggcataggacttcacgctgcgttccttgggtttgctcgcttgagcaatgtaacattatttggttctttggttggttccgcacgaggtacatagagaatgcacagcttcttttggtgtttgcgttcgtgtaaaaactgtaataatcatgcatagcgtaggacggtaggagcgtgtctggtttggtgtcctgatccgcggctgctcaataagacaatgggctttgtcttgggttcctgcgaaggaacggatgagttaacatgtaaacttgtttcaatgaagccttagaattcttaac

SEQ ID NO: 29744 - DNA, 2956 bp, Zea Mays
ctccacccctccccttcccctgccactctccgcctctggcctagcgcccccgcccgctcgatccgcctagtaggtaacggcgaggctcaccgcgtccgcactcgcccgtgaatccgtgatttctcccaccttcctttcagcgccgctctcccaccttcctttcagcgccgcccgccgtccttttcgatcagtatttaaaaatcaagatggttaacttcgggaagaaattgatggcagatcaaattccagaatggaaaggctccagcagggggaaaaagatcgtcgtcgggttctgaaggatttctcgaagatgcttgatgatcagagaagatcgtcctgtttctgttggaacaacaaggactattggcaagcaggattgagaagttaggaaagcaaagggcaatactacaagagcagccagatatatctggcattgctgagttacgagaagcttatagggaagttggtatcaatctcatcaaacttctcaagttcgttgaccttaatgcaactggcattcggaaaatcttgaagaagtttgataagcgttttggctatagatttactgattactatgtgacaagtagatcgaatcacccttactctcagctgcaacaggtctttaagcatgtggtaatgcactaactccagatttagtatcattcattcaaatgtattgcaagtttacttgtacttgatatgttctcttgctatggccttgcctttacaatccacactcgtcagtataccttaactgttctatgcaaccagggtgtaggagctgttgtaggagctttgtcacgtaaccttgctgaactccaagaacgtcaaggaagctacttatctatttatgatcagccatcttctgctcttaaggtttatttgccttgtaaactactgatgtgatatcattttaagaatattttcctgctcattcaatagtctgtgcctcggtggtatacttgaaacttgcagctgaccgtttttggttttgatcccctgcaggaccccatcattgatatgataaattcttcagttgataagttgacaaggtcaactaattttcttcgctttttggggcaacatgccatgattgtggatgaggagtctcctagcactgcaggagaggaagaaatagaagatcagaaataccatttcatgtcccttatgctgaacctggtgaacacattcctttacatggtcaacacgtacatcattgtgccaactgcagatgactattcagtgagccttggggcagcttctactgtttgtggtgtggtcattggttcaatggctgttgcgcaaatattttcctctatttacttcagtgcatggtccaacaagtcatatttcaaaccgcttgttttcagtagcattgttttgttcttggggaatatatgctatgctatggcatatgatatgaagtctctaacggtccttattatcggccgtttactctgtgggatgggttctgcaagagctgtcaatcgccgatatattagtgattgtgtccctgcaaggatacgcatgcaagcttcggctggatttgttagcgcaagtgcacttggcatggcctgtgggccagcgctagctggtttacttcagtggaaattcaaggtctacatggttacattcaatcaatcgactctaccgggttgggtgatggcagttgcatggctattgtatttgatttggctatggttctcattcaaagaaccgaaccgtgctaccgaggtgaatgaagccccacaaaatcctgcttctggacaaactgttgatattggacgactagagaatggaattgcacagcctctgctcaaggattccgtggataaacaaaatgaagatgaagacgaagttgatgatattgaagaaactgcagatgattctcgcaaacctgcaacatcaattggctcagcataccgattgcttaccccgtcagtgaaggtccagttgttgatatacttcatgctcaaatacgcaatggagattttgctttcggagtcgagtgttatcaccaatcactatttcagttggaatacaagcgcagtggcaatatttctagcaatcctagggttgacagtccttcctgtaaacgctgttgttggaacatacatcagcaatatgtttgaggacaggcaactcctcatggtgtctcaaattacgttgctagtaggcattatcttcagcttcaaagtcacgagcacatactatgtcgtccagtatgttgtctcagcactggtcacatttgtttctgccgaagttcttgaaggcgtcaacctttccctcctatcgagcgtgatgtcgtcccgcctctcccgtggcacgtacaacggtggtctcctctcgacggaggctgggaccctggccagggtggtcgccgactgcaccatcaccgcggcggggtacctgggcgtggggaagctcctcaacgtcaccctgctaccgtcgctggtgatatgtgttgcgtccatcgcctgcaccttcctgacgtacaactcgcttttctgatggagcttcgcgacgtatttgtgtcgtcatgattcgttccaaatcaaggcagctgggagaccgccgttgccattgcccgaaggggctgttgtgttattatattatatatgtgcgtcgatttgattgctgtaaattgacaaaatgatggcagccactggccttgccctgcaaaattttgatcgcttatgtccgtgacgttgtcaatgctatgttgtgttgacgtgttggtccaaactgtaattatgctactctcgactgatctgatctccgctgcgatgcggttttgagagtggagtcgtacgagagtggatcggcgtttttgtccattgggcttgattggatttatgagataaatagtttgtcggctaattttagtaccttttcgattattagctgaagggctactaaattgtttgttcattagtcatttgagattactgatagg

SEQ ID NO: 29745 - DNA, 6696 bp, Zea Mays
ctttctccgtcttcctttggtcggtggggtcgactccgcctcctcacccgcaaaacccctcgtgttcgcgagacgatcagacgaggcggtcagggagggggaggtagaatagggtttcggcagggccgtgccgggccgcctcctgctgaccttcctcctccagcgccgtgcaagcactcccgtccctgccaagccctagctagggtagctggtgcagcggattccaggacccacaaatctcttcttctcaacccattgccggtggagcgtggctgaggtagtggcctcgggttgttggggttcgggctcgccggcgattttgggggacgagttcgctgccggtgccgcgggcgggggcgtgattcgcacctcggaggaacaaacggttgaactgacccaggtgttgatctgctgctgctactactgatccatggctaatacccggtcaggaggaggaggagatgcccctccccccccttcttctcctccagctgctgcttctgcaactgccacaaggaagcttgccgatggaagggagaccaggaacaccgcagctgccagtgctcacacaccaaacctcaggaggtccactcgagaaaacaaaggaaagcacaaatctagacttgctgacacaccaccccttcacagatctgctaaaacgcccaccaaggatgccactgcaattgctacccccaaatccacacccttgccaaacaaccccaaagactcaacaaaaaagccctccagagttaggaacacaagtgtttcaccttctccttcaaaacaagaacctaatgaaacctcaacgcccgcctccaccaaaagaaaaacccaagatgatgctctgactgcctctacaccgtccaagaagcagaaaaggctcctgcatgcgaagagctacattgcactcttcaatataggagaagaatctgtgcttgctaccctcagggaggatgaggaaaaagcttctgaggtgcaaccggaaggagatggtgctgttttggtgcatgaagaaagtaatgcaccggaacaacccaaccaggaagcttcaaatgttgttgctagtgaggtcttgggaggtcactcttctgacttgcatgaaattgaggtgatattggagggagatggattgaagattggatcccatcagtctgatgttgttttagagcgttgcattcttactgagacgcgctcactaaataaggcagtggaaagcatccccatgttggaaactggagagcaagctactggtggttcaaaccagaaacctctactagaattgccaaatagcgcttgctctactgctcatcatgaagaggccagcaagtcggtggaagatggtaattctattgggattcaaggtgcatgcacttcaaggaatactgaagctatccaatgtgatgaaacatggtatgatgacaacatttgtgttgtttgcagaagtagggaaatctcagatatcctgaagtcttgtggtggaaaaggatgtaaacgacattaccatctttcgtgtatggatccttccttggacgtgtccctaggaatatggctttgcataatgtgtatgaaaaagaggattcagtttggtgtatattcagtcagcgagggaattgaatctttatgggatgtcaaggaaggagtggtgaacagcaagcaatatttcgttaagtataaaaatcttgctcatgtacataaccagtgggtttcagaaagtgatatagttgatagcaccccgcaaggttctgatcttatctccaaagttagcaagaagattcataaagaaaagacaataaggtggaagcaggaatgggctgaaccacaccgtctgttgaagagaagattgcttatgcctcaaaaagaagccgaagttttttttaattcactaggtgataaatttgtatactgtaatgtcgagtggctagtgaaatggaaggatctgggctatgaacatgctacatgggaactcgagtcctcatcctttttatgtactcctgaggccgaggagcttaaaaggagctatgaggaccgctttaaaactgcaagaaaagcatctgatccttcaaaagtagacaaggctaagggggggatatttcagcaactcgagagactgccagatggttgccctcctggtttagacgatgaccatttgagatcacttaaccagcttcgtgagttctggcacaattcttgtggtgctattttcatcgatgatcaggagcgagtaattaagaccattctttttgtggcatccatactgcctcacatctgtcaaccactcctcattgtgtctactactactactctctccttgtgggagactaaattcaatcgcttggcagcatccatcaatgttgttgtgtacaatggagagaaagatgtacgcaaatcaatacaagatctggagttttatcaggatggttctgtgatgttgcaagttctcttgtcccaccctgatgccatcttagaggacatcgaagtgattgaacgaattaactgggaagcagttatagtcgatgattgccaaaactctagagtttcaaaatggcttgaacaacttaggagacttcctaccaattttaggatggttctattgagttcctcactaaaggaaagtattgctgagcacatcagtctgctgtcttttctcaaccctgaagaaaatggtacattgagtgtttcaaatggtgtttcttttgatacagctggcactctagttgttctgaaagaaaaacttgcacgttatgttgcctttgagcggaagacagattcatcaaagcttttagagtattgggttcctgcccgcctttcaccagtgcaactagagatgtactgttacatattactatcaaactccccagcccttagatcacattctaaaacagatagtgttggtgctcttcgcaacattcttatatctcttcggaagtgttgtgatcacccttatcttgttgatcaatcgctgcaaagcacacttaccaaggatcaccctgtaactgatatccttgatattggagtgcgttcatgtggcaagttgctgcttcttgacagaatgctccaacagatcaggattcaaggtcttagagttcttattctttcgcagtctggtggtgaatctggcaagcctatgggtgacattttggatgactttgttcgtcagagatttggttatgagtcatatgaacgtgttgaacgtggattgctactgcaaaagaaacagacagcaatgaatatgttcaatgacaaaactaaggggcgatttatttttttaattgatagtcgtgcatgtggtccaagcatcaaactatcatctgttgatgccatcatcatatattgtagtgactggaatcccatgaatgacttgagagcccttcagagggtcagcatggagtcacagtctgaacctgtgcctatttttcgtttgtactcgtcttttacagtggaggaaaaagctcttattcttgcaaagcatgaccatattttggatagtaatattgtgaatataacccctagcctgagccattgtctgctcagttggggcgcatcatttctcttcaatagacttgaggagttgcagcaacatagctactcaaatgtctctggtgatgagcttttcatggataatgtagatttggagtttttgacaaaattactcagcaaggttgaactcagaactgaatcaggcaatacagccatatcacaagcttatctgtgtggatctttctattctagggctattgttgtagcgggtgagagggagggaattccatcagttgatggtgacctgccaaagttctgggcctactggttaagtttacttaatgggaggtctcctcagtggcagtatatatctgagccagtacaaagaagccgtagaaagataaataacatggaacaacaattgaaaaacacagacaaacagttgaaaataactactgaagaaactgatgaagccagagtaaagcgtagaagaattggtgaaatcatggattcatctgcaatagactcacctggcaaaaacaaggacaccatattgccaggaaacaataccccacctagttctcatcaaatatcagttgaagatacatggcaggaactagagcgaagcaatcttcatgccacacaaaaaggtctacacgttcaactcaagccagagatttcgaagttatataagttgctgcaactgccggaaccttcaagtgacgaccttagaagtactgaccatgttgaggagaacacagttggctcacaaatacagggtggtacaagcaaacatttaggtgatgctgcaatggaagttgaaactggaaacaggaacactgctttggctgattcacctcactttgacaaaccagctttgactgctccatccaggcaggcaacattgctggtttctcgagaaaccgagatgctgagcaatcttgtggaccaatgtgcacaacagagtttagtgtcagcacaacctttgcaggatgagtcggaacaagcagatttgtctagtgcagcatcaactcaacccttgcaatctgagaggcaacaattaatctctgtttccaataatctgcttgaaagagcacagcttgatcagagtcaaccaaattatcagacagatgcggcacctggttgtgcgcagtctacagaactctttccagtgacgtcaatgatgtttaatcacgcacctattgattctgaaccactgaaaaatgagttgcacaaattacgattacacatggacacactcaataaagtccatgaaatgaaggtttcttatttttggtcacttttccttcctttatatatgctgttccagtatcacaatgtctaaccaactccaatttggacagaaaacccaacttcagaccgcatgtagccaagaactagagaaggtaaagagaaaatatgatttgttaattaaagaacatgattccactcatcttcagcaaaagaaggcacttggtgatttttatgagaaagttcagcgcaaccaatcgctggctgaggattttcgggccaaattcatatcactgtctgcagcacaaggtgcagcaaaaggccatacccctccagttcgtcacacacctcaggctacccaagtggtgtcctccacatcatcaattgccctgtcatcagcttgtcgaccaccagtgccgaggcctagggttcaagctccacaggtggaccaaccattattgtcattgtcgcagttctcccgtccgtctttgcaagtggtccaacctcccaacctggaactaggcaatcttttcagagcaacgtcaacgactcttagtcatatgccacctcaacgtgggagctatggagttcagagtgaattggctcctcgctcacctgctcctcatcttcagttcagatcgccacgggcacattccatggcacctggaaatcagcagcaatcgccagcaattagtgtggatgcaatgtcctcaaggacacaaccagtgctggcggcaagcacatccccatcagatatacatgtgggacccctagcagcctcagccttgtcaagtttacactctgttctcccttcaacctcattaccctcaagcttgcatcctagtcacctggcacaacgtgtgccaccaactcctaacccaactttacaagccggggcaccgaaaggctcgaatgcaacaatgccttccatccctacaggcatgcagctgccagattctggttccctatcgctggatgcatggcttacagctaatcttgggttgaatgatgcgtctacagctcctgctaaggatacagccagtcttgggttgagcagtgatgcccctagggcagctcctgatacaaatacggccagtcttgggttgagcagtgatgtgcctaggggtacggctcctgctacaaatacagccagtcttgggttgagcagtgatgtgcctaggggaacgactcctgctacaactacaaccagtcttgggttgatcagtgattcacctagggtgattgctcctgccagcagtaattcgcctggggcgattgcttctgctacaaatggtggttccgagatagatgtggtatgcctgtcagatgatgaatgatgctagcacgtgtacaaggctgacagttatagatgactgcttgaaaggactaggcattattttacggctcccttgagtccgttctgacaaggtgggaatgttgtttgtgctgtgaatggctggtaacagcaatgacagttttattaagttcattgtaaatgtgtattatgacaaatgcctgccaacgtttgctgtaaatcgctaacctctggggaatgtggatattaacctctgagatggagttgggtttcaagcgctatgaggtttctgtacatgtttgtcattgattagttccctgaggtgttcgttgtaggccggagtgctagctccgtgtatcgttttggttctacgtatgtttcttttttttagtttgacttaaaaaaacagtagcaacaaaaaacagtagcaacatctccatgatagttattatgtataataaatgctgaaattttcttgtatatatttgattgaaacggcgggagtatgtaacagagcaatttagaccaaggcggtcacttcaacgttgtattgtatttctcttcttggtgaaatacggcagcactgtcctatgttaagttttatatctatatagctagctatctatgtatctgtatttatacctgttctatat

SEQ ID NO: 29746 - DNA, 893 bp, Zea Mays
attctgcgcacctcctcccagtgatcccgttcctattctgctgttactttgtctccgcaggccccacattctccgtctcgccacggtcgcggtcgtggtctcgctccggcaaacccaatggccgccgccgtccccaacggccacaccgccgccgccggagacgacgacgcaccacccgccgcttcgtcgtcgttggtgttcctgggcacggggtgctcgagcgcggtcccgaacgcgcggtgcctgatccagccccccgacccaccctgccccgtctgctcccagtccctttccgtcccgcccgagttaaaccctaactacaggtgcaacacttctcttttgattgactattgccaagatgaacgtgcacataagtatattataatagatgttgggaagacattcagagaacaagttctgagatggtttgttcgccacaaaatcccttgcgttgattctattcttctgactcatgagcatgcagatgcgatcttgggccttgatgatgttcgggtcgtacagccatttagtcccacaaatgatattgatccaaccccaatttatctctctcaattcgctatggacagcatctgccaaaagttcccctatttggtcaaaaagaaattaaaggaaggggaggaggttagacgagttgctcaacttgaatggaagataattgagagtgatattcagaaaccattcacaacttcagggctagagtttgttcccttgccggtgatccatggtgaagactacatttgtttgggtttccttttcggaaggaaatcaaaagttgcttacatatcagatgtttcacggtttcccccaagcacagaatatgttcgcagtgataggagtgtgcaccgtggtgactggtgactcagtctaggttt

SEQ ID NO: 29747 - DNA, 1073 bp, Zea Mays
ttgcaataatgcctagctcaggggttatcctgaggaaggatggcttctatctgcaagaatattttcatcgggagcatggtgggatcttactgcaaagttccctataatgctcttttcatcctaaggaacacaaacaatcctaaggatggaagtacttaaatcgggacttgggctaggaaaaggtgatgttctacctaggttagttaaggattggatgcgcatgtaggcctgttgatcaaggactatcttaactagccacatgccctagaaatgggacagggtaagcttgaacccggctattccatacatgaaaagacaatcgcgcactgggagtggagagatgacgagagtgacacgtaccctcctggcaaaggactgcctaaaaggggtggtgtgctctcgggtggcgcggacctgttcatgcagttgaggatccatgggaatggtagacatgcaaggtttacgagaaacatatgtcgtgtggttagagatcttgagctgagtaaatcgattcgaatcgccgttatatccccggagagtggagacttgatctccgacctacaacctaagtcagaatgtgaacctcatgaataaaaattatgttgtattgatgagatgcaaatagagtctattaatatttaatctggcgttaaaatattgaaagtaaggactcactttagtaagctatttctgcaaaagtatctatgttgattcttgctaaagcctctccttgattcccaaatccagcatatccttgagagtcttttctttagtcgggtaagtcttgttgagtaattccatactcagggttttattccctgttgtttttcaggttttaactttgtgctactgttgatggtgttaagtgcctgtgggctcggccttcttataagtctaagtaacccttctatacttcttactgaggatggtcacttaagctagcatatatttcaaacttataaacaatttataatagttcaaaattattcctttgaatcactttttgtaatcactccgatcatgtacattataaaacttgatgtaacatataaaatttggtaataagatttccg

SEQ ID NO: 29748 - DNA, 254 bp, Zea Mays
tctcaccaatcatagtggcatcgtagcacatataagatcgaccgcgatcggagaccaaacctctcaccaaacacagtggcaccatagcccatatgagaacaacaacgaccaggagtccaggaccgagccttagacttgtgctttggcgtgaaacaggtgtgaagatttttttaatcacagtctaaaatttgcttccatatggagtcgaacacaggacctaaagagtgctactcaaactatctaaccaactcagc

SEQ ID NO: 29749 - DNA, 281 bp, Zea Mays
gcaattcacgtacacagcagttacataaatcggacatcatcacacagtgctcggataataacataaagagggtaatagttaattatcatcatggtgtccaagacatccacatattcattaacaattatcaaactgcggaaatgaaacgtagatgaacacagccttcacacgcagccgactaggggtttgccgctaacccacgcctagaactcatcgtactcttggaactcctggaagtcctcctccacgacttcatcttctcctgagcagtggttgcaaca

SEQ ID NO: 29750 - DNA, 2890 bp, Zea Mays
gctgcggctagtaaaaaaaagcagcgccgcgcctccacctcgactccaggccaaggcagccagcctacccagacaaccaaacgaacccgcccggagcagcaaagcataggcgctcgagcgctccctcctgagctcctccgcctcacggtcacgcctcgtgtccccccaccccctcctcgtcctccaccggccgcctcacgccgtcacctccgctcggcgagtctcggctccgaccccagccgccacgtgcgacctcccctactcctgactcctgagagatctgcggggctcggcatggggtgaccagatcgggccgctgctcggtgctttccagctgaattctgcccgcagctcgtgtcggaggcagcggagatggcggaggccggcgtggcacgcggctcagggagtgctggcgatgctttgttcagggaactctggcatgcttgtgctgggccgttggtcacagtgcctcgccaaggcgagctggtttattacttcccgcagggtcatatggaacagcttgaagcgtctacagatcaacaacttgatcagcacttgcctttgtttaatctaccgcacaagatcctctgcaaggtggtcaatgtagaacttagagctgaaactgattctgatgaagtttatgctcaaattatgctgcaaccacaaacagagcaaagtgagcccaccagcccagatcctgaaccacctgagcctgaaagatgcaacattcattccttctgcaagaccttgactgcttcagatacaagtacccatggtggattctctgtcctcaggaggcatgctgaagaatgtttgccccaactggacatgactcagaatccaccgtggcaagaactagtggctaaagatctccatggaaatgaatggcatttccgtcacatctttcgagggcaaccaaggaggcatctacttacaacaggctggagtgtttttgttagctcaaaaagattggttgcgggtgacgcgtttatcttcttgagaggtgagaacggagagctgcgagtcggggtaaggaggctcatgagacaactaaataacatgccgtcttcggttatctcaagccacagcatgcatcttggagtcctagcaactgcatctcatgccatctccactggaactctcttttctgttttctacaaacccagaacaagtagatctgaatttgtcgttagtgtaaacaagtacctcgaagctaagaatcacaagatgtctgttggtatgaggtttaaaatgagatttgagggtgatgaatcccctgaaagaagattcagtgggacaattattggtatgggatgcatgccagctaactcaacatctccatgggctaactctgaatggagatcattgaaggtccaatgggacgagccttccgctattctgcgtccagatagagtttcaccatgggaagtagaaccccttgatcgaacaaatccacagccacctcaacctcctttacggaataagcgagcacggcctcctgcttcaccttcgattgctccagaacttgctccagtttttggtttttggaagtccccagctgagcctgcccaagctttctcattctcaggactgcagcgaactcaggagctataccattcaagccccagttcaatgttctcatcgtcgttgaatgtgggattcaatccaaagtacgagggtcccactccaaacaccaaccatttgtactggacaatgagagagacaagaactgaatcctactccgctagtatcaacaaagctccaactgaaaagaagcaagaatccactacttctggctgcagattgttcggtatcgagataggttcttctgcagtgtcacccgtggttactgttgctagcgtcgggcatgatcctccgccacctgctctctcagtagacgctgaatctgaccagctgtcacagccgtcccatgccaacaaagcaacggatgccccagcggcaagcagcgatcgctctcctaacgagacagagagccggcaagccaggagctgcaccaaggtaatcatgcaaggggtggcggttggccgggcggtggacttgacgaggctagatgggtacgatgacctccgccgcaagttggaggagatgttcgatatcccgggagagctttccgccagcctcaagaaatggaaggtgatctacacagatgacgaggacgatatgatgctggtcggggacgatccatggaggatggtaaaaaggatatacatttattcctacgaggaggccaagtctttgactcccaaggcgaagctgccggccatcggtggtgacaccggcgtcaagccggacccaagcaaactgccaccagaatccgacgtgccacagagcgactccgacaacagtgctcccgttgctgctgataaggactgatggacgctagctcggccgtaccttccctttggatgttggccatgggaggcaagtgcagtgcccatgctccttgagactgctaagagttgatcatctgttccatctgcctcggcttggaccagcgaggatggccgggagggagtgcatgacgttctgtgcgtgtttcgtttgccgtgtttggtaggagccatggcttgttgccggctacttcggttctgtagactgttacactgactgctgccgtctcacctggccgtcggcgcgggccgccccctctcacctctctagtaatatatactagggcttatgtacacagctgttttggtagtggcatatgtatatcgtcggtcatgttgcttgcgacatttagcatcctccgtagctgctatttcctctcctgcattttaatcctgtcttggtatcagatgctctggcgcaatatgtgttccagcgacatgcccttttcggcgcgtgcttcccttttcggttgtggaac

SEQ ID NO: 29751 - DNA, 2946 bp, Zea Mays
ctcttcaagacccgattccactcgcgtgtctgcccgccggccagacctcgaggaaacaaggccttacttccttgattacatggcgtcgccggacgaccccgtgctctccgcttgcaaggacctagtggacagagttatggcagtgttgttgagccagcaagatcaagcctttgaaacgaatggcttaccaaaggcaaaatcagcggtgaaaatagtggaggacacatttagaaaaatgcaagaccctacaaatactgttgcagtctcaaggagccacgaattaggagacagtgttacgtgtaaaaagaaaccggatgattctgctcaggcagttaaggttcgttgcccttgtggtgactccaagccaaatgattccatgattaagtgtattgatccacaatgcaacatatggcaacatgttggctgcgtcgtcatacccgatactgagaaatccgcggacaatatttctcctgaattaccttcctgcttttattgtgaagtgtgccgacttagcagggctgatcctttttgggtcactgtgaaccatctgttactccctatcttaataggaccctctactgtagcagcagacgggtcatacactgtacagtataccgcaaaaagctttcagctttcaagagctaatagagaaattctgcagcaagctgaatgcaatattcaggtttggtgtatccttctcagtgacaaagtaccttttaggatgcactggcctttacactctgacatgcaagttaatggtatttatgttagggtggttaacaggcaacccacacaaaagttaggggccaatggtagagacgatggtccactattaacagattacctgaaggagggacctaacaagatttctctatcaagaaatgacactcgtactttctgtttgggtatcagaattgccaagaggagatctctagaacaggtcctaaatttggtgccaaaggaacaagatggtgaaaacttcgatgacgcccttgcacgtgtgcgtcgctgtgttggtggtggagctgaggcaaataatgcagacagtgatagtgatatcgaagttgtggctgattttgtctctgtgaatcttcggtgccctatgactgcttcaaggatacagatcgctggtaggttcaagtcctgtgctcacatgggctgctttgatttagaagcttttattgaaataaaccaacgttcccggaagtggcaatgcccaatatgcctgaagaattactctctagagaacataataattgatccttatttcaatcgcatcacttctttgatcaaaagctgcggagatgatacatctgaaattgatgtcaaacctgatggttcctggagagttaagggcagacctaaactgaaggaccttacacagtggcatctaccagatggtactctctctctgtccacagatacagcagccaaacctggaatgtgcattgtaaagcacgaggtcaaagaagagccattgtctgaagaggtgggatgtcatcttaagttgggacttaggaaaaaaagcaatggccagtgggaaattagcaagagagtggatgctgatctggtgccgtcttctggtaacgaccatgaccattcaggacacgatgaaaacaaaaactgcatcactcactcaagcaatattgatgatacaaacattgcagatgaaggttataatttagagccagcaacaaatggttatcccatgacccatgtccatgatcttgactcttcatccgcagacgaaaatggtcctccagcatcgacagggcaggatatagtagttttgagtgactcggatgatgatgctatcatggtgttgtctcccggtgctgtgaactgtggctcgatgcataacactggaaatctgtttccacccaacacacctgaaaatttaggagtgtgtagtggagaaactggtggatgccccaaggagacatcattccttgcattaaaagaagattttggtgatccggggttgtcattttgggaaagtcatggtagtccccgagatgcttctacttcccagatccccgatgccagtacaaaggcagtagataatccaggtgaagtggacaactaccctgccaatgatcaatctaagcaagggcaagtttctggggctgattttggagtagcagcaaatccggtgccattggaagatgggcatgatagcgcactgcaaccttgttcaatgagtgaaagagatagtgccatgggtcttgctagcctgggagcggatactcaatcatgtgttgatgtccattctgacaattggacatctgtcagcattagtggccgtgatgaagttttaactgctgccaaaattgcatctaggaaaaggagcaatcctggagacagaatagaagatttagatgcttcacttgtgggaagcccaaaccaagatgagtgcagcggagggagatgttcagttcgaccgagattgatactagagatttcctcagattctgattagcacacatttgtgttggctgatgcctgcatgacttggagaaaaggaagggggtggatgtgatgctgtctaacgcggtcagcgaactggcaagcagctagaggcctctcctctatcctgtaattggagatcccatctctgttaggtggtagaacgtgacaccaggagcaacatatagagtggcataatagagctgaaccatatatacatgcagtgtaggcaattttgtaccatatatgtcatgaaccgaggtggcagttagttgatgtaaatatgctccctctctgtttttctatattattggctgaaaggagaggggaggatgcatgcttagtccggcctggttatttatcatttatttatgatatataatgaaaacggagtaccaggtaggtcgcagcggtagagaggtgcaaatctaatctaatcttgtgtcagacagggtcttcaaatcatatctttacttatgt

SEQ ID NO: 29752 - DNA, 1707 bp, Zea Mays
atggactttgtgagacaagatgctcttctcttgcttgagaatgcattggaaggctcaggtggtggtggtgctgctgcagcttatcaagaggcttttcgtatcatcatgcgaggtgtaagtgataaatcgttcattgtcagagcagcggcagcacgttgcttgaaggcatttgctaatattggtgggcctgcattggggatggctgatttcgattcttctatgtcttattgtgtgaagggtttggaagatagtgtatcttcagttagagattcatttgccgaagcacttggtgccatacttgctcttgcagtgaatccagatgcccaggtgaagaaaggcgggaaaaaacaaactgcttctgcaaagaaaattgaagatggtgtgcagaagcatttgattgtgccatttgtcaaagcaaatggagcaaatgcaaaggaactccggattggtttgactttatcatgggtgttctttctgcatatgattcatatgaagtatggcaccccagatagcgaacttcaaaattatgccatacaaacgatggaaattctccaggggaatgattcccttgatccacatgcgctggcatgcgttctgtatgttcttcgagttggtgtcgcggatcagatgactgagctgacacaacgcgattttttgctatttctgggaagaaagctggagtctttgaactacacagctgcaacgagagtggcaacactacgcattttgtgttacctattgagaagcgttggtgaggttccagctgaattcaaggatgttcttgataacacagttgttgcagcattgtctcattcttctgctcatgttcgtgtggaggcagctttaacattgcgtgctttagcagaggttgatcctacttgtgtaggtggtttagtttcatatggtcttacaacattgcaagctctacgagagactgtatcatttgataagggcaaaagtttgaaccttgagctcgactcactacatggacaggccactgtgttagctgctcttgttgcaatatcaccaaagttgcttcttggttatcctgcgaggctgcccaagtctgtacttgaattatccaaaaaaatgctgaatggtttcagtcgaaatccagtggctgctattgcagagcgtgaagctggttggttgctattagcttctcttctagcatccatgccaaaagaggagctggaagaccaggtgtttgatgttcttttgctatgggcgggtccttttactggaaatcctgaatcttaccttcgtcatatacaggattgggcatcagaattgcgggttctgtcagttgcagttgaggcgcttactgccttcataagaagttttgtttatccatctatcacaactactgattgtggaatcttgcttaatcctgtacttgcctaccttggcggagctctatccctcatatcttcgttgagatctaaacaagtgcccaatgtaaggtctgcgctggacctactcacaactagaacattgatggcttattggtccctttcgaatccagtggtatataaaactgagcaccagcagatacttcagctatgctcaagtccgttcaggagaactgtgtctcattatattaagaaggtaaagcaaggtctaaaaatagaccccgagcaaggacttccttaccgaggtctaaaactcagcaacctgagaagatccatcatccattcatccatctaa

SEQ ID NO: 29753 - DNA, 7505 bp, Zea Mays
acggaacggcaatgtcgcagcttggattagctgcaactgcctcgaaggccttgccactactccctaatcgccagagaagtccagctgggactacatttccatcatctgcattgccgaggccctcaaaccgaaggaaaagccatactcgttcacttcgtgatggtggaaatgaggtatcagatgccaaaaagcacagccagtcagttcgtcaaggtcttgctggcattatcgacatcccaagtgacgcagtttcggaagtcgatatttcacatggacctaaggatcctagggggccaacagattcctatcaaatgaatgggattatcaatgaaacacataatggaagacatgcctcagggtccatggttgttgaattttgtgcagcactaggtggcaaaacaccaattcacagtatattagtggccaacaatggaatggcggcaacaaagttcatgaggagtgtccgtacatgggctaatgatacttttggatctgagaaggcaattcatctcatagctatggcaactccggaagacatgaggataaatgcagaacacatcagacttgctgatcaattcgtagaggtgcctggtggaacaaacaataataactatgccaacgttcaactcatagtggagatagcagaaagagtaggtgtttctgctgtttggcctggttggggtcatgcttctgagaatcctgagctgccggatgcattgaccgcaaaaggaatcgtttttcttgggccaccagcaacatcaatgaatgcattgggagataaggttggttcagctctcattgctcaagcagccggggtcccaactcttgcttggagtggatcgcatgttgaagttccattagagtgctgcttagacgcgatacctgaggagatgtatagaaaagcttgtgttactaccacagaggaggcagttgcaagttgtcaagtggttggttatcctgccatgattaaggcatcctggggaggtggtggtaaaggaataagaaaggttcataatgatgatgaggttagagcgctgtttaagcaagtacaaggtgaagtccctggctccccaatatttatcatgaggcttgcatcccagagtcggcatcttgaagttcagttgctttgtgatcaatatggcaatgtagcagcacttcacagtcgtgattgcagtgtacaacggcgacaccagaagattattgaagaaggcccagttactgttgctcctcgtgaaacagttaaagcacttgagcaggcagcaaggaggcttgctaaggctgtgggttatgttggtgcggctactgttgagtatctttacagcatggagactggagaatactattttctggagcttaatccccgactacaggttgagcatccagtcactgagtggatagctgaagtaaatctgcctgcagctcaagttgcagttggaatgggcatacctctttggcagattccagaaatcagacgtttttatggaatggactatggaggagggtatgacatttggaggaaaacagcagctcttgctgcaccatttaattttgatgaagtagattctctatggccaaagggccattgtgtagcagttagaattactagtgaggacccagatgatggtttcaaacctactggcgggaaagtgaaggagataagttttaaaagcaagcctaatgtttgggcctacttctcagtaaagtctggtggaggcattcatgaatttgctgattctcagtttggacatgtttttgcatatggactctctagaccagcagctataacaaacatgtctcttgcattaaaagagattcagattcgtggagaaattcattcaaatgttgattacacagttgacctcttaaacgcttcagacttcagagaaaacaagatccacactggttggctggatacaagaatagctatgcgtgttcaagctgagaggcccccatggtatatctcagtggttggaggtgctttatataaaacagtaaccaccaatgcagccactgtttctgaatatgttagttatctcaccaaaggccagattccaccaaagcatatatcccttgtcaattcaacagttaatttgaatatagaagggagcaaatacacaattgaaactgtcaggactgggcatggtaggtacaagttgcgaatgaatgattcaacagttgaggcgaatgtacaatctttatgtgatggtggcctcttaatgcagccatgtgatttatgcagaagaagaagctggcggtacacggcttcagattaatggaaagacatgcttgttgcagaatgaccatgatccatcaaagttattagctgagactccctgcaaacttcttcgctttttggttgctgatggtgctcatgttggtgcggatgtgccatatgcggaagttgaggttatgaagatgtgcatgcctctcttgtcacctgcttctggtgtcattcattgtatgatgtctgagggccaggcgttgcaggctggtgatcttatagcaaggctggatcttgatgacccttctgctgtgaaaagagctgaaccatttgatggaatgtttccactaatggacctccctgttgctgcctctagtcaagtacacaaaagatatgctgcaagtttgaatgctgctcgaatggtccttgcaggatatgagcacaatatcaatgaagtcgttcaagatttggtatgctgcctggacaatcctgagcttccttttctacagtgggatgaactaatgtctgttctagcaacgaggcttccaagaaatctcaagagtgagttagaggataaatacaaggaatacaagttgaatttttaccatgggaaaaacaaggacttcccatccaagttgctaagagacatcgtcgaggaaaatcttgcatatggttcagagaaggaaaaggctacaaatgagcgacttgttgagcctcttatgaacctactgaagtcatatgagggtgggagagaaagccatgcacattttgttgtcaagtctctttttgaggagtatcttaccgtggaagaacttttcagtgatggcattcagtctgacgtgattgaaaccttgcgtcatcagcacagtaaagacctgcagaaggttgtagacatcgtgctgtctcaccagggtgtgaggaacaaagctaagcttgtaacagcacttatggaaaagctggtttatccaaatcctggtgcgtacagggatctgttggttcgcttttcgtccctcaatcataaaagatattataagttggcccttaaagcaagtgaacttcttgaacaaaccaaactaagtgaactctgttccagcattgcaagaagcctttcagatctggggatgcataagggagaaatgactattaaggatagcatggaagatttagtctctgccccattgcctgttgaagatgctcttatttctttgtttgattacagtgatccaactgttcagcagaaagtgattgtgacatacatatcacgattgtaccagcctcatcttgtgaaggatagcatccaaatgaaattcaaagaatctggtgctattgttttttgggaattttctgaagggcatgttgatactagaaatggacaaggggctattcttggtgggaagagatggggtgccatggtcgttctcagatcacttgaatctgcatcaacagccattatggctgcattaaaagattctgtacagtacaacaactctgaggtcaacacaatgcacattgtgttattgaatgctgaaactgaaagtaatataagtgggacaagtgatgaccaagctcaacataggatggaaaagcttaccaagatactgaaggatagtagtgttgcaagtgatctccaagctgctggtttgaaggttataagttgcattgttcaaagagatgcaggtcgcatgccaatgcgccacacattcctctggtttgatgaaaagaactgttatgaagaagagcatattctccggcatgtggagcctcccctctctgcacttcttgaattgggtaagttgaaagtgaaaggatacaacgaaatgaagtatactccatcacgtgatcgtcaatggcatatctacacactaagaaatactgaaaaccccaaaatgttgcatagggtatttttccgaactattgtcaggcaacccaatgcaggcaacaagtttacgtcggcacaggtcagcgacactggattaggatgtcctgaagaatctctgtcatttacatcgaatagcatcttaagatcactgatgactgctatagaagaattagagcttcatgcgattaggacaggtcattctcacatgtttttgtgcatactgaaagaacaaaagcttcttgatctcgtcccattttcagggagtacaattgttgacgttggccaagatgaagctactgcttgttcacttttaagatcaatggctttgaagatacatgaacttgttggtgcaaggatgcatcatctttctgtatgccagtgggaggtgaaactcaagttggactgtgatggacctgcaagtggtacctggagagtcgtaactacaaatgtcactagtcacacctgcaccattgatatctaccgagaagtggaagatacagaatcgcagaagttactataccattcagctacttcgtcagctggtccaatgcatggtgttgcactgaataatccttatcaacctttgagtgtgattgatctaaagcgctgctctgctaggaacaacagaacaacatattgctacgattttccgctggcatttgaaactgcactgcagaagtcatggcaatccaactgttctagtgttcctgaaggcagtgaaaatagtaaatcctacgtgaaatcaactgagctggtgtttgctgaaaaacatgggtcctggggcactcctataattcccatggaacgtcctgctgggctcaatgacattggtatggtcgcttggatcttggaaatgtcaacacctgaatttcccaatggcaggcagattattgttgtagcaaatgatattactttcagagctggatcattcggcccaagggaagatgcattttttgaagctgtcaccaacctggcttgcgaaaggaagcttccccttatatacttggcagcaaactctggtgctaggattggcatagctgatgaagtgaaatcttgcttccgtgttgggtggtctgatgaacgcagccctgaacgagggtttcagtacatctatctgactgaagaagactatgctcgtattagctcttctgttatagcacataagctgcagctagataatggtgaaattaggtggattattgactctgttgtgggcaaggaggatgggcttggtgttgagaacatacatggaagtgctgctattgccagtgcttattctagggcatatgaggagacatttacacttacatttgtgactgggcggactgtaggaataggagcctatcttgctcgacttggtatacggtgcatacagcgccttgaccagcctattattttaacagggttttctgccctgaacaagctccttgggcgagaagtgtacagctcccacatgcagctgggtggtcctaagatcatggcgaccaatggtgttgtccacttgaccgtttcagatgatcttgaaggtgtttccaatatattgaggtggctcagctatgttcctgcaaacattggtggacctcttcctattaccaaacctttggaccctccagatagacctgtcgcatacatccctgagaacacatgcgatccgcgtgcagccatccgtggtgtagatgacagccaagggaaatggttgggtggtatgtttgacaaagacagctttgtggagacatttgaaggatgggcaaaaacagtggttactggcagagcaaagcttggaggaattcctgtgggtgttatagctgtggagacacagaccatgatgcagctcatccctgctgatccaggtcaacttgattcccatgagcgatctgttcctcgggctggacaagtgtggttcccagattctgcaaccaagacagctcaggcattattagacttcaaccgtgaaggattgcctctgttcatcctggctaactggagaggcttttctgggggacagagagatctctttgaaggtattcttcaggctgggtcagcaattgttgagaaccttaggacatataatcagcctgcgtttgtctacattcctatggctggagagcttcgtggaggagcttgggttgtgatcgatagcaaaataaatccagaccgcattgagtgttatgctgagaggactgccaaaggtaatgtgctcgaacctcaagggttaattgaaattaagttcaggtcagaggaactccaagactgtatgggcaggcttgacccagagttgataaatctgaaagcaaaacttcaagatgcaaagcatggaaatggaagtctaccagacatagaatcgcttcagaagagtatagaagcgcgtacaaaacagttgttacctttatatacccagattgcagtacgctttgctgaattgcatgatacttccctgagaatggcagctaaaggcgtgattaagaaagttgtagactgggaagaatcacgctctttcttctataaaaggctacggaggaggatctctgaagatcttcttgcaaaagaaataagacgaataattggtgacaacttcacgcaccaatcggcgatggagcttatcaatgaatggtacctggcttctcaggccacaacaggaagcactgctggatgggatgatgatgatgcttttgttgcctggaaggacagtcctgaaaactacaagggatatatccaagagctaagggctcaaaaagtatctcagtcgctctctgatcttgctgactccagttcagatctacaagcattctcgcagggtctttctacactattagataagatggatccttctcagagagtgaagtttgttcaggaagtcaagaaggttcttggatgatgatatgataccaacacatccaacacaatatgcgcatgctacatgttatttttcaagtacatacatagaaggatattgcttggccttgattgatcatgtctgatctaagtcgatcattattttcttgaaacttcctttcggacgtggtgctatggttgatgaatttggatgtgtgcgttctgccaggtgtaagcccaaaggtttatacagaccgagttaaggttaggaagagcacgagtgaacttgttctggttttgcagtggttaaggcagaaagttgtttcactgtagttctgagatgtattaccagcggcgctgtaattttagggtgtataatgcggatgctagtaaacaattgagtggttcattaaattttgaactcgaataatatgtttctgtaggcacatgtgacgtaccactacatgaaataaatgtcgctgaactagggcaccagagttttggtaggactaaggttttgtttggttatgggataaggtgagcatctccagcgttcccaaacttgaatttccc

SEQ ID NO: 29754 - DNA, 1354 bp, Zea Mays
cacaatgcacaaaccgaccccgcccagcaccagcagactccctcccacacatcgagaccacagaccagcggcggcgacccaaccaaccaagcacaaagcaccgcgcgacaagacgacaaggctcccggaaaagagagaaaaaacaggcgagagaaattcgttaaaaatcctcccggtcggccacttttattaccagcactctagcagcaagtcgtcgctcccaccccacctcaccatctccactccaaacaaggggaaggcgagcgacagacaaacccaccctatcgcccctcctctgtctcctctcttgcccacccgccccaatgtcgccgcccctcgagccccacgactacatcggcctctccgccgtggccgcggccgcgccgccgaccccgaccccgacctcctcctcctcttcgtcctcctcgccggccccccgtctcacccttcgcctcggcctgccgggctccgagtcccccgaccgcgaccgggactgctgcgaggacgtcgccgccacgctctccctcggcccgctgccggcggccgaggccgcgtccggagctgggcccatgtacgtgaaggtgagcatggatggcgcgccctacctcaggaaggtggacatcaagatgtactccagctacgaggacctctccctggcgctcgagaagatgttcagctgcttcatcgctggtcaaagtggtctgcataaatcatcgagcaaagacaggctcactaatggctcaaaggtggatgctctcaaagatcaggagtatgtccttacatatgaggataaggatgcagactggatgcttgtcggtgatcttccctgggattattttacctctatctgccggaagctcaaaatcatgaggggctctgatgctgttggaatagctccacgaaccgtcgagcagacaggtcagaacaaataagctttggcctttgcctgcatccaaggaagacatctgagctagctgggagactatgttgaaggctgaagcctgaaatagttgccgggaatcgtcaaaacccgtcaagtgtttagtgtagttttcacgtgtccttgagacatgtgcatttgtatgtctgtgacgtgatccgttagatcgtgcaatcgtaggttgctgttcttgtgccctttgaaggccagacagatcagggagctctctgcttccttagtgcacttgctttgcagcattccttgttattctactctgaaatcatacatcatgccacaagaaccgatggttcgtgatgtcaagagagctgccctaattgttccattgtaacctcgtaattgtgttcttccgcaggagaaattggtgctgcactcagcttcctaccacatcaacac

SEQ ID NO: 29755 - DNA, 639 bp, Zea Mays
agtcccagaggctacggcggctaccttctcacttctaggttcgctctgaatccagcggcgcgaagagcaccgcgctcctttccggctcgcaccgaagccctaataccgtcttcttccgtccggcgcggactgctgggttcccgttcccgcatcgcggactgctgggttcgccgtttctgcacggtgcggacgccatgtcgggtgtcggcccacccccgtgaagcggttttgccgcccatgatcccggaaaaaacccaatcgaggcgtcaagtcgatccctgtccccaggcgatcggcggcggcggatcgtttccgttgcagacagcaggtcctagagcgtcaacggctggcctctggatgcgatgtcccaagaatgacgtactcccctcacctacgttttacgggggccaccctgctgcgttgatttcctccgagaacggaaggttaggagcaaaatctgggagtttcccagaccaattttttctgacttccagtggctagcaggtttatgtaattttgagtttccatcctcagataatgggtggactactgtagtactgcctaatgtagtaatgttggcatgtactactacctagtaccataggtttacttgacattctgtaatgttctcgcatttac

SEQ ID NO: 29756 - DNA, 228 bp, Zea Mays
ggagccaagaaccagtcgtcgcgggagagagagactcgggccgagaggggtaggaaccgtcgcgtcttggcttgggttgtgccttgtgcttgcgggattacccgcgccgcgccgcgggtccccatcgagttgccgggcatgggcgcccccagagcttctgggcgcgtcatcagtactggtggttagcgccgcgccgtagaacggacctgtcaacatcttccttgccgg

SEQ ID NO: 29757 - DNA, 2554 bp, Zea Mays
cagcaccccagcggccgccagcgctcccgctccttgctcgcctccacccgcggccaccaccgccctgcggcccccgccgcttgctagcctccaccgcgccgcgagtcacgccgttcatgcaccggctggtcctggagcacgggaggacgagcatgtcctggttcggccccagccccaaggtgaccatcgtcgacccggacctggccaaggacgtgctgtccaacaagttcggccacttcgagaagctcaaggtcccggcgctgtccaagatgctgggctccggcgtggccagccacgagggcgagaagtgggtcaagcaccggaggatcctcaaccatgcgttccatcttgagaagctcaagcgcatgctgccggcgttttctacgtgctgcgaggagctggtgagcaggtgggcggcggagtcccttggctccgacggctcgtgcgagctggacgtctggccggagctgcagaacctgacgggagacatcatttctcgcaccgtgttcagcagcagctacagcgaagggagaaggatcttccagctacaggtcgagcaagcttcgcttgtcatgaccaacattcggaagatcatgatccccggctacatgtacttgcctaccgcgaacaacaggaagatgcgcaggaacaacagggaggtggagtcaatcctgcgagagataatcgggaagaggatccaggcgatggaacaaggcgagggcaccaaagacgacctggtgggtctactgctggagacaaacatgagagacgacatggggatgacgatcgaagacgtgatcgaggagtgcaaggtgttctacttcgtcgggatggagaccacgttggtgctgctcatgtggacgatggtggtgctcagcatgcacccggagtggcaggaccgcgcgagggaggaggtgacggctctgttcggcagggacgacaagcccgagtatgacggcctaagccgcctcaaagtcgtgaccatggtgctctacgaggtgctccgactgtacccgccggccacctccgtcgtccgacaaacgtacaaggagatggaggtcggaggcgtcacctaccccgccggcgtgatcctggagctgcccgtgctgctcatccaccacgacccggacatctggggaggcgacgcgcgcgagtttaggcccgataggttctccgagggcgtgtccagggcctccaaggaccccggcgcgttcctcccgttcggttggagcccgcgcatctgcatcggccagaacttcgcgctgctggaggccaagatggcgctctgcatgatcctccagcggtttgagttcgggctcgcgccatcctatgctcatgcgccgcataccatgataaccttgcatcctatgcacggtgcgcagcttaagctcagagcaatatgatctcgacacgatgggtgtcccatcgttgatgccattgttatgtataaccttacaattcagataggcattcggccctgttaatgtctgaaataagtatcttcgcgttggcattttgtaatgtgcttttcacgtaccattggtgctttattgccttttgtatataaacatgtggatatatgtaactcatacattacacaaacaaacacaaacacaccagagccagagctatagggtggagctataaactgtggctctacttttgtacacaaaactggctccacatgttcttccaatcctgcaactgcgtttttcgcatccccgtttgattgcaagaacgggactgctaagcaagctaagatttcaatggcctattccttcatacataggccattgaaccggaagattttgtcggtattcggtaactataggatcatgtggttgttggtcgagttggaccaattatgctggctcatttgttggatgttttgacaagtcgattctagcttccttatgatctatgttagatttggtaatgcataccagttagtaaagcatttatgatgtacattgttatacatagagctttacatcacaaaaattatcagtttccctcagttacgatatgcatttagtatttatcgtattttgaaaattaataacctattatactatgataggcttgacttcatgtttatctaaataacttagtgcgatgatgcttgaaaacttatcttccattttgccagatcaatgaataaaaggattattcatatcaatgtccatgcaccttctcagaaaatccttttgtgatgttggtgttggtttcctggacctgtactggtacatatgctaagtcatccacaaatctgacccagaattgtaccgttctttttatagccatgtttggtacttgtttgagtgctccatagttcgcaagtttttttgttatgatgtattttgacatttgaatctcagacatgcttaggaactactgatttgaatttatgggctaacagttccagtatttcaaatagaaagtatgctatatcaaataagttgatgatacttttggtactggagaatgaagctagactgcatttgatattagaagtctgtttgtctgattgcagttgattataaagaagctagag

SEQ ID NO: 29758 - DNA, 766 bp, Zea Mays
atttaattctccaaatcataaaaaatcatctccattcatgcatctaaattacaaaaaaatcatcatattcattctggtgcaacccaaggtcttggtcttgccttccccttcctctagacttgcatgttccatgagacgcaacaaaaaaaattcatcaacattatgaaagcactatactttagattacataagacctcaatgacagaaaaatattccttctttgctcattttccccatcaaactctggaagaccggccacagacacagaaagctagcaaacatgattactcttccgtagcatcaccgatggtaacatcagtttttggtctcaatggagtgaccttcgttgacaatacctctgcaaacaatagcactcccaaccttgtatatctttgcacttagacgctactgctggatacaattggtacatgttaatggctctataagggaattgtgtccattcatgattaatgactagaatatcaggaaccctgttgcacgcttcgggaactatgtccattcataatcaactgcaactatgcagtaagggtaccaaaacgggttccagccaaaaaacaatagaaaccactccaactaatccacatttcacatcttcttctaactgagtaactctagtcttcaggaagaacaacaaaaatttcagcatccagccaaaagaatatttctcagctgctacaactaacagaaaaatttgccactgtgcggagagtctttggtttttattttttgtactttattcgtcatg

SEQ ID NO: 29759 - DNA, 322 bp, Zea Mays
gttgagtttctggaacattgagcgagtactctgctactgttggccacacatgttgttctgctattgaatttttgcacggatggaatgagaattgggtcgccaaggacgagcaattctgaggtgttacatgaatatgccaattttcaaacttgaggctgcgacacaggaatgtatagtagataactgaatcacgactctcgaagctttttctcattggagcctactgttccctccgctatgactgaaggccccaccatacaatcagataaagcattagaaatgtgtcaagagagttgagaatgatgatactggtcaccaaaac

SEQ ID NO: 29760 - DNA, 2357 bp, Zea Mays
gtattttataactaatgggttgttcgcttccagctgtaaacactatagaaacagggcctcttgaattctgttcatggttcggggatcaagaccattaggccagactatttcaaagaaattttcagacatgagatactccaatatttcctggccattccttctactgctatgttttgtttcgatggcagatgcagagtacatgaagtacaaggatccaaagcaacctattaactctagaatcagggatcttatcggtaggatgacccttgctgaaaaaattggccaaatgacacagatagaacgccaggttgcatctgcaaatgtcatgaaacagtactttataggaagcatcttaagtggtggtggaagtgttccttctccccaggccagtcctgcaatttgggtgaacatggtcaatgaatttcagaaaggtgccttgtcaacgcgtctaggaattccattgatttatggaattgatgctgttcatggtaataacaatgtctacaacgccactttattccctcataacattggacttggagctacaagggatcctggcctcataaaaagaattggtgaagcaactgctcttgaagtgcgtgcgacaggcattcaatatacttttgctccatgtattgcagtttgcagagatccaagatggggtcggtgctatgagagctacagtgaggatcacaaggttgtgcagcagatgacagatattatccttggtttgcagggtgagatcccagtcaatcataccaagggagttccatatgtagctgggaaggataaggttgctgcttgtgctaaacactatgttggtgatggtggaactcataatggaatcaatgagaataatacaatcattgatgagcatgggctgctaagcattcacatgccaccatattatgactctatcataaagggtgttgctactgttatggtttcttattcaagcttgaatggtgtaaaaatgcatgccaatcatgacttagtcactggataccttaaatccaagctgcattttagaggtttcgtgatatctgactggctaggagtggaccgtatcacctcacctcctggcgcaaactatacttattctgtgcaagctggaattaatgctggcattgatatggtgatggtgccatacaattacactgattacattaatgatctcacttctctcgttcacaagggtgtcatcaatataagcagaattgatgatgctgtgaagcggatccttcgagtcaaatttacaatgggcctgtttgagaaccctttagctgatcttagttttgcagagcagcttggaaagaaggagcatagggaactggctagagaagctgtcaggaaatcacttgttctgttaaaaaatgggaactctcccgatcagcaattcctacctctccctaagagagctagaagtatcctggtagctggaagtcatgctagcaatttggggtaccagtgtggtggatggtcaatccaatggatgggggacagtggtaatatcacaactgggacaacaattcttgatgcgataaagtctaccgttgctgactcgacgtctgttgtctactctgagaaccccgatgacagtttcatgaagcacaatgacttctcattcgctatcgtcgttgttggcgagccaccatacgctgaaacagttggcgatagcaccgacctcactatgctagaccctggtccagacacgatcagaactgtgtgtgctgcagttaaatgtgcagtagtcatcatttctggtcgtcccattgtgattgagccgtatgttccattagtggaagcgcttgttgcagcttggcttccgggaaccgaaggtcagggtgtcgcagatgtactctttggagactacggtttcacaggcaagctcccgcacacctggttcaagtctgtcgaccaactgcccatgaatgtgggagacctacagtacgatccactctaccctttcggcttcggtttgatgataaattcatcattgccagggttctctggtgttgacaatctgggatataggaagcaaagagtgctatttgctgtgctgtgttctctactgtcattggttctaatcagttaatgaattgggcgtagatagtatttcaacacatagctgcccttttgtagttctcatatgattagagtgttactaatctagctttagcgattgttagctgccaaatgagtcactggacgtcaatcaatctattatctatctatctactagatgattccccgcgttttgccgagatgctgccattgattatattcctcctgctctgattatcactttggttaccttgtgcaaattgattgttcatgatgatccaactgaggtcccc

SEQ ID NO: 29761 - DNA, 1062 bp, Zea Mays
ttctatggcggcagcaggtacattacctagtgcagcggatttctcgagggactacgacggggcctgcctccagatgcgcatgtcctacagccccgccgcccacttcttcctcttcctcgtgcagtggaccgactgcagcctagccggcgcgctcgggctgctcaggatcctaatctacaaggtttatgtagatgggagtaccaccatgtcgacgcacgagaggaaagcgagcatcagggagttttatgctgttatctttccctccctgatgcaactgcccaaggggatcagcgacgtggacgaccggaggcagaaggcggcgtgcacggagaggtaccggaggagggacgaggacgagggcaagaggccggtttcggaggccgacatcgaaagggaggaagagtgcggcatctgcatggagatgaacggcaaggtggtgctgcccagctgcagccatgccatgtgcatcaagtgctaccgccaatggcgatcaagatcgcaatcctgccccttctgtcgggacagcctgaaacgagtgaactccggggacctgtggatgctcaccgactgccgggacgtggtcgacatggcgacggtgacgagggagaacatcaggcgtctgttcatgtacgtcgagaagctgcccctcgtcgccccggacaacatcttctacgcctacgattctcatgtaaaatagctggagctagctgtagtgtagcagcacaccatctgtgctgtgctgtgctgtgctgtgttgtgttctgagagtgatgacgcatgatttatcgattattcatgcagaggggtagagggtgttcctcgtcctagctaggacgtggctaaacgcttggaccggggtgcggactctgacgacagacctttttcagtctatctaactgggtgtacagtctgctcaggtcctgtaaatataatgtctgtgcatatttatggcttcaaatgccccgttgtttttcagctggatatatttgtgtctccaactgttctgctttttattttcttgcttactgccaagctgtgatgctcaagttttctggatggaat

SEQ ID NO: 29762 - DNA, 268 bp, Zea Mays
gagtgaaccggacgatgaaagcacgcaggaacatttcccccttcatggcggcccggttccaacaatggcggcggaagcttcccatctctctgttctttctcgctgcagcggtgggattgcttatggcgttctcgaatataggttcaaaattgaggattcagaggcatggagattcttatagtgtctaggaacaagtatgaggcaaggatctcggcctgtggttgcgacggccatgaagattttggcgcaggttgcaaccggaccccac

SEQ ID NO: 29763 - DNA, 500 bp, Zea Mays
ccaaactagagttggagagcaacctcaaaggcaggggcataagtgatcatgggaaagggacaatgcaaggctgctggtggctcaaagacgtacgttctgaagctggacatgcactgccaatgcaatggctgtgtcaagaagatgaaggacgcggtgaaggagatgatgagcctctcgcaaggttgggacaacagcaacgcggcaccgtactagtgcaaagtggggcgaagccgtgaagtgacgcggaagtcgggtgtgtagcagcgcgtcaaccacgcaagtcaaggagggaatcaccacaaaaaaatatagaatagtttcagtttgtatccaccttgattggttatccgcacccttttatcttagatcatcgtatgtattgactttatttgagattatgtttggttgattgtatgtgtgagtcatagtctacatggtgcatacaaaataagtcattttgatattattaacatgcatccatctatatgatgcttaaaatt

SEQ ID NO: 29764 - DNA, 2543 bp, Zea Mays
ttttatctcttttatgtgtttccccgtttcgttgttttcggttctcctttgcctttgtttcccttttctgttctttgggggttgagctctgaggttttcatacggggtttcatctctagcctaccccaacgtgcttgggacaaaaaaggctttgttgttgttgttgttgttgttgttgttgtataaatagaatgtatattccgtctccaaagtccaaagcagttgttcctcgccgtctcggggtctcggcctctcctcggtctctcctcccagatcgggccatccaggtgctaccgctcttcgccccctccacttcaccgccgccgcgtagatccgtctccgcctcctggaagcgctaccagtggaccaacgccgagccggcggagttagcggcgttagggttgcggttgggaattgattgcgggggacgcagcggtggcgcctggcatggcgggggcgcccggggtcgggccgggtgcggggggtgggggcggcgccgctgcggggctcaagacttacttcaagacgcccgaggggaggtacaagctgcagtacgagaaggcgcactccgcggtgctgcactacagccacggcggcaagaccgtctcgcagttgacagtggcatacctcaaggagaagcctgctagccagggctctcagccatcaacaccaagcgccagcagtgggatgcggtctgcagcagcaaggctgctgggcactgggaatgggagcaaggcacttagctttggtggcggtaatggtgcaagccgagctgttgctggaagcagccgtgtaggaggcggccttggtacacctacaggccttggtggatcacaggggggcacaaattatgatggcaagggtacatatattgtattcaatgctgctgatacactattcatcagtgatctcaattcccaggagaaggatccactaaagtccatccatttcagcaactcaaacccactgtgccatgcattcgacccagaggccaaagagggacacgacctgatcattgggatgggatcaggggatgtctattcaatgtcgctgaggcaacagttacaagatcctggaagaaaacccgtggcagctctacattacaataagggtgataaagatgtctcacccaatggaagtcgttgcacttctgtcgcatggggtgccagagcgtgaaggcattttcgtttgttagccatttctgatggaaatttgtacgtgtatgataaaaacaaggatgggaacacagactgtacgtttccagctgtcaaggatcagtctcagtttatggttgcacatgcaaagtcgagtaagagcaacccagtcgctaggtggcatatatgtcaaggttcgatcaatgcaatttccttttcaccagatggcgcatacttggcgactgttgggagagatggttatttgagagtattcgatttttcaaaggaacaactaatatttggtggaagaagttattatggtgcactgttgtgttgcacttggagctcagatggaaaatatctattaacaggtggtgaagatgatcttgtgcaggtcagtggagttgcttttgattcatattggtccccaccaagttctgatggaaatggagaaaatgtatatcgctttggttctgttgggcaggacacccaactacttctgtgggacctggcactggatgagattgttgtcccactacggcatccttcaagtgcctcacctacgtttagcagcgggagcccttccacacactgggacaatgcatgccctccaacaggtgttcttcaaccttctcctagaatgcgagatgtcccaaaactatcgcccctagttgcccaccgagtacatgccgatcccctatctggtatggtgttcaccagtgaatctatcctcaccatctgccgcgagggcctcatcaaaatctgggttcgaccagagcagagcgaaaacaatcagcaatcgaattcttcagaatttgctttaggccctgcttcgaaggatagggcgatcacatcttccaataaagcaagtagctccagctttaagaagctgccgcctgttcttgtcacatgatgaatcaacgggatggttcttgtggatatttctgcttcacgtggcattagtggtggatatgaatcttactccatggttgatggggatgaaactctcatatggagtctgcagactgcaagtaatgagggtgagcatttgatggttgatgttcccaggaagcagggccagcgttgccagtttttttggcacgaaagagtaaatgggagctcttgtacagacacatacttaatgataaaattgtaaaaactcactgtccgtttcataatattcaatagccaccgaaagatgattggacgaccatgttatcgattttagctggtgggttgatagtatccttaaactttggtacttcggagacttgtaattatggaccataatatctgaggaatgcttcagtcttacctggtgtaagttgtgttactatttccttctgccttttgtcaattattagatctagtttggcaactccatttttc

SEQ ID NO: 29765 - DNA, 2169 bp, Zea Mays
gccaggccacgctcttccctttcgcttgcccctgcccctctcccctatttctctatttctttccccctctcgcctcgccgcgcctccccttctctctctctcccccctttcccccactactagccgcccctccctcctcctcccttcaacacccccgctcggcgccgcttcgcgccggtctcattcgcccgccattccgccgcgcgccgccgccagggcgccgcgtcccgggcacgcgcgcgtgcggtgcgggcgctggcgcgggcgccaggagagagagggagggaggtagcgaccgcccctgcccccggccccccggggatgctgccgtgatcgccgccgtgcgcctggagccggggggatggggcgggtcgggctcggcgtggcggcgggctgcgcggccgccacgtgcgcgatcgccgccgcgctggtggcgcgccgggcggcggcgcggtcgcggtggcgccgcgccgtcgcgctgctcagggagttcgaggacggctgcgccacgccgccgccgcgcctgcgccaggtcgtcgacgccatggtcgtcgagatgcacgccggcctcgcgtccgacggcggcagcaagctcaagatgctgctcaccttcgtcgacgcgctccccgccggaaatgaagaaggcacatattattccatagatctcggaggaacaaactttagagtgctgaaagttgaagttggtgatgggtctgtggtcactcgccgtaaggtcgagcttcccatccctgaggaattgattaagggagttattcaactttgttgccgtgaccctaaaggagttcgtagaagcagaagatggtaaagacgaacaaagggcacttggtttcacattttctttcccagtcagacaaacatcagtatcttcagggtccttaattaggtggaccaaagggtttttgattgaagatgtggttgggaaagatgtggctcaatgcttaaatgaagctcttgctaggagtggactaaatgtgcgagttactgcactggtgaatgacactgtggggacgttagctctaggtcattatcacgatgaggatacagtggctgctgtgataatcggtgctggcaccaatgcttgctatatcgaacgcactgatgcaattattaaatgtcagggtcttcttacaaactctggtggcatggttgtaaacatggaatggggcaatttctggtcatcacatttgccaagaactccttatgacatctcccttgatgatgagacgcaaaatcgcaatgatcaggggtttgaaaaaatgatatctgggatttatcttggggaaattgcaaggctggtgctgcatcgaatggctctagaatcagatgtctttggtgatgccgctgataatctatccacccccttcacattgagcacaccacttctggctgcaattcgcaaggacgattcaccagatctgagcgaagtcagaaggatattgcaagaccatctgaagataccggacactcctctgaaaactcggaggctagtcgtcaaagtctgcgacatcgtcacccggagagctgcccgcctagccgccgctggcattgttgggatactgaaaaagctgggtcgggatgggagcggcattgcctcaagcgggagaacgcgagggcagctgaggcggacggtggtggcgatcgagggtggcctatatgagggctacccggagttcagggagtacctagatgaagccctggtggagatcttgggggaggaggtggcgcggacggtgacactggaggtgacagtggatgggtctggggccggcgctgccctcctcgccgccgtacattcgtcgaatagacagcaaggttccatatagggagaagggaagatggtgatacagcccctctgtgcaaatgtaaaaagggatattatttgatatctatattcatatatataaaatctggtcttgtgcagagaaatacctgttctcctatctcaagctcttatcactcttctgccttgctcttgtggatgtaggcgttgctgtgtactaggtttacctttttttttcagtgtggaagggaattatgattctttgtaagtccgagttgctgatgaactgatcttgtgaccaaaatggcaaaatgtcatgagtcatgacaagctgagataaccattttttttttctaatgttggacgca

SEQ ID NO: 29766 - DNA, 1466 bp, Zea Mays
caataattttatccacatgtttccattaaacagggtggattatctttgtcttcaagagctacgcgagctgcctggccatgtagcaccgatattacaaatggtgttgcgcaggggatctcaatgcaaagagcagttaattcctcgtatccaacaggatcaggtaatgctttccaggttggtggagctacagaaactgtggttgaagagcttgttagccctcttgtagcaaaccgtgtccaagaaatcaacatgcagggctcatatgcttctcttaccagggaaactactgaaacttctatgcatactacccatgaatatgatcccactcatatcactgaaaaaagtacagggaccgtcatggaagaacgtcctgatcctcctattctagcaaacagtgtccatgaacaaatgcagcgagtccaacctgctaacggtgcacaatcttcaaatgttggcaagatcaatcagatggaacagtctttcattctaagcggtgaaaatgaaaaaccatttacatacatatacagcatgcttattgactggggtaggcaacaggacacaaaagcctacattcaaggaaaaatcaagggtctgatcacttctgtaaaaaaatttcaatataaacaacgcaccaagtacgagctttatgtatatatagatgatgggagtttcatttcagaggccttcattgacagtgatattgtgaataacatgcttggcctttctcctggagaggttactgctgcacttgctggtgaattagagtttgcatcacccagtgaagtgaaagaaactttgaaaggatttcagaagtttttggtgaagtttgagggtatgatgcttatcgagttaaacaagaactctcctgttcctgttgttcgtgagttaaatgaaggttgctcaagttctactgcatggcttctgctcggaaggctgaaaacaatttcttctcagaagaagaccatccaaactcaggatattatggacaccactccatgattgtttcgatcctctaaaccccagcggccgattataatctttcaatgctggtgcgggtgacacaatgatgtggcatggaaggagtgctaccaaaacattctcattgagcctagaagctttcgtccatctcattcattttcgtctcattttaataaccgtagaaaaaggtcctaaatgattggcggagtagaaaggctgacggagaaagtctgacggtgagatcctgaagaccacaaccgtaatcgtcggatggctgcaatgtcagaataagtatgatagaatccgttctcgaatatttgtccgtgcccgctattttatttttggaaaaaagcgacaaataaaaaaacaacagagggagtaatttgtagtagcattaagataattgagtcctttattaatcgtgtcgatgtctaaaggaacttcggtctcatacagctagtgctatccatggccacagaacgtacacg

SEQ ID NO: 29767 - DNA, 1562 bp, Zea Mays
ctccctccctcactcactcccgaaccttgtagaatgcactagaaccccactgcggccttgctttgtttgggggcggaggttgatctcgtgcgctttgctccgccatggtgtcccgcggttgtttagctaagtgtctgacagttcataagaggtacccttttgggaaggtcctcaccatggatctatcccaggcactgacctcatccagtgatgatgaaaccagggcacttggtacattgcttgatatgttcagcagttccttttcacttgatgatatagctgatgcatatatcaaagcaaatggcgatgttaacaaagctggagatttcttatacgaccttcaacattcattgcctcataccaaagatgttgagtcaagtgtcgaggctaacctttcccatactgacaaggcagttgaagaaaactgtatggacaattcaagccaaccaagaactcttctccgtactgagcaggcagttgaagaaaatcatttcgagaattcagatcacacaaaaatgcctgaaaatctgcataagtctagtgctgcatttggtactgtctccagcatgttaagaaaagagtctatcagggctacaacaacagcgagtagagcatcaaaaaaaggcaaacctcttagggttgaactgccagagtacatgcgggatgattttaaggtgacatctgatgaatctgactctgcaccgaggagagagactttgaataacagggatgttgaggagtttctgttttgcatgcttggtgaaggatttaagctcagtaaagaattgatccatgaagttctaggcagctgtggatatgatattaagaaggctgctgatgctttcagggagggtaaccagaaagaagtcgattatcttatacaggaaggcaagcgctattatcagatggctcgactcgctgatgagaaatctgctagggagattatcaagcccagggaaacagagtcaaaaaatgaattttgtcttgatctgcgcaaacaagatgcaggaaatgtatctaatctcttgagactccatcttaaacagttggcaaacattccatcttttgattacctgagagttattattggtattgacgacagcagtttcaagatgggacaaagaagaagaaaggtgatgaagtatgtggaaaagaattcactccagtggactgaagaagaacctcgctctgggaacatcctcatccggattaatcaggtggaaaatcggcagggataggttcatgtatacaaaggtggcgtgacacaaggtgacagaagatggatcgtagatcttaataagtgccgttttgaatcaaggtgatgttctttcggcacagggagtcatgtaattgctgcattgctgacgtaatgtaaccagcaatgcagcaattaactcgaaacgtctgcaatgtatgcacaaaaagaataccattcatggcaacttgaacatgtggacaatggtttctgatatctcaagggtcctttgcagtttcgaaactggtttcttctttctaggttcataattcagaaactgattttcaatttagcatcttgaacgcag

SEQ ID NO: 29768 - DNA, 2564 bp, Zea Mays
atctctctctctctctgtctcccaccacctatcttccctccccatgtgggcggcctcgagctctgcttaggtctcacagctgtgctctcgttggttgggtgatccgccccttgtcggctcctttcaactcgagagctccgggacagcgagatctgcgctgtcgccgccttacctttcttacgagctcgcgtgcaggcaggcactgagcagtgagctcccccccgtcttcctcagcctcgtttcccctctcgttgctggatctggctcgcaagatccaatctttcgtgccccctttttccaaagatcctcgcttgggtggttcttcctggagattgctgggaggatgcagcacgaccagaagaagaaggcaccttcagagatggattttttcacagagtatggcgaaggcagcaggtacaagatagaagaggtcataggcaaaggcagctacggcgtggtttgctctgccgtggacactcatactggcgaaaaggtcgctataaagaagataaacgacatcttcgagcatgtgtctgatgcgacgcggatactccgggagatcaagctgcttaggctcctgcggcatccggatattgtggaaataaagcatatcttgctccctccgtcgaggagggagttcagggatatatatgttgtctttgaactcatggagtctgatctgcaccaagttataaaggctaacgatgacttgaccccagagcattaccagtttttcttgtatcaattgcttcgaggattgaaatacatacatacagcaaatgtatttcatcgagatctcaaaccaaaaaatattctggcaaatgctgattgtaagctcaaaatatgtgactttggcttagcaagagtagctttcaatgatactccaaccgccatcttttggacggtggtaccgagcaccagagttgtgtggatctttcttctccaagtatacaccggcgatagatatatggagtattggctgtatatttgcagaattgttaactggaaaacctcttttcccggggaaaaatgtggtacatcaacttgatataattacagatctccttggaacaccttctcccgaagcaatatcaaggattcgtaatgaaaaggccaggcgctacttgagcagtatgaggcgaaaaaagcctataccgtttacgcaaaagttcccaaatgcagatccacttgcactatgtttgttagagcgaatgctcgcttttgagccaaaagacaggccaagtgctgaagaggctcttgctgatccttatttcaagaatatagccagtgtggatagagagccttctgcacaggctgtcacaaagcttgaatttgaattcgagaggcggagagttacaaaggaagacataagggagcttatatatagggaaattcttgagtatcatccaaagatgctgagggagtttcttgagggaactgagtcaagtggtttcatgtacccaagtgcagtagatcattttaaaaagcagtttgcataccttgaagaacattatgccaagggatctacaggaactccacctgagaggcaacataattcattgccgcggccgtctgttgtctattccgacaaccgatcacaaaccacagccaacatcaccgaggatctttccaagtgtatgctcagagaaaatacacagaagacacatccatattctgcttctgttgcaagtaaatttccaccacatgttcctcaaggtgatgttgcaaggcctggtaaagcagttggttcggtgatgcagtacagcccatgtccagcgcctgctgccgagcgatatgagcaacgaagaatcgctaggcacccagcagttgccccaaacaatatcccttctggaagctcataccccagaagaagccagacctgcaagagtgagacaggtgatgccgaaagccatatggatgcgaaccaagctcggcagccaaagccatatgcagcgaacaaactacctgctaccgttgatagtcgtggtggtcactggtaggatttctgcggtgcaccagaaagccattccaaaccgtttcttaacatgttatcagtatcgattacttctgctgagtgctacattattctgacaaatccagaaatgtagttctgtacagatttgtgttctttttccggatacctgaataccgaaagactgtacaactgtagtttctgattcctactccttgtcgctattcaatcgctaaaggatctgtccctggtggagaagaaccggcagattcaatgcaatgttcttgactgacgtcatggattttgttcttcaacctggtagctctgaagacgaattgaatagctgctagtttctgctaatcatctacagtcaggtgcagagtgttctgggagctagttctgaatatcactgtcacgctgtaatctgcacgtttctgagctcctaacttctaagcatgccactaccgtatccctttgtaatttaatcagctgtaccatccagtactctgtttacatttgtagaaacgctctgcaaagaagctattatgtgggagtttctttgctattattataaatgttctgttgttataaa

SEQ ID NO: 29769 - DNA, 2791 bp, Zea Mays
gatggtcaaaatactcaagctgcaggtggaagaaaacgccgaaggccgagttgcggtctatgatcttctgaggaaatggatggacaactgctaccgtggcgtaccggtcggtgggataggttcaggaagcatagggaggagctacagagggtacttccagcagttccagatattccccgtgaccaacgaagagaaacctgtcctagcaaaccagttctcggcatttgtttcgcgcccgaacgggaacaagtactccacggtgctgtcggcgccaaccgctgaccttctcaagggagtcggcaaagccggcattggatcttgggactggaggttgaaggaggacaggtgcacttaccacgccctgttcccaaggtcatggacggtatatgatggtgaacctgaccctgagatcaagatcacctgccgtcagatatcgcccttcataccgcacaactacagagagagcagcttcccggctgcagttttcacattcacggtacagtccgttttgtctgttcttttcaaggcaggtgaacaactctgggagctcacctgcagatgtgacgctgctcttcacctgggcaaattcagttggcgggaagtcggaactgacaggaaaccacgtgaattccaaaatgacggagcacgacggcgtccgtggcgttctcctccatcacaggacggcgggagggcagcctccggtgacgttcgcgatcgcgtcccgagagaccgacggtgtccgcgtcagcgtctgcccgtccttcacgatcgcgtcgggcggcccgtccagctccggcgagcccacggcggcggccatgtgggacgagatcaagaagcacggcgcgttcgggcacgccggcgccggcaacggcaacgcggcgagggcggcggcttccaaggccgggtcgtccgtgggcgcggcagtggcggcgtcgacggccgtgccggcgggggcgacgcgggtggtgtccttctcgctggcctgggcgtgccccgaagttaagttccccgccgggagcacgtactacaggaggtacaccaggttctacggcactgatgccgacgcagctgcagagcacctagctcatgatgcccttcttgagcatatgaactgggagtcccagatcgaggagtggcagaagccaatcttgcatgaccaaaggctgcctgaatggtatccagttgctctgttcaacgagctctactacctcaacgctggaggcaccatctggacagacgggcaggctccgaagagggccggcttcgcttcgtcgttgacggccaccgagccgttctccatcgacacgctcctcccagtcgcagcgggcggcagcgcggtggacggcgtcgtgcgcgcggtggcgtcggcgacggagcggtcccactccgcggcggcgttcggcgcggcgctactgcgcggcggcgaggacaacgtggggcagttcctgtacctggaaggcatggagtacaacatgtacaacacctacgacgtgcacttctacgcctccttcgcgctgctgtccctcttcccccggctggagctgagcctgcagcgggacttcgcgcgcgccgtgctcctccacgaccctcgcccccggcgcaccctggacggcaggaccgtggcgcgcaaggtgctgggcgccgtgccgcacgacgtcgggctcaacgacccatgggtggagctgaacgcgtacatgctgcacgacgcggcgcggtggaaggacctcaaccccaagttcgtcctgcaggtgtaccgcgacgccgtggccacgggcgacgccgcgttcgcggaggcggtgtggcccgccgtgtacgtggccatggcgtacatggaccagttcgaccgcgacggcgacgggatggtggagaacgagggggtgcccgaccagacgtacgacatgtggtcggtctccggtgtcagcgcctacacgggcggggtctgggtggcggcgctgcaggcggcggcgggcatggcgcgcgtcgtcggggaccgccccgccgaggcctacttccgcgcgaggcgggacagggcggcgcgcgtgtacgatgccgagctctggaccggcgcctacttccgctacgacaacagcggcggcggcggcgccagcgagtccatcatggcggaccaactggcggggcagtggtacgcgcgggcgtgcgggctggagccggtggtggaggacgccaaggcacggagcgcgctggcgaccgtgctggactacaacgtcatgcgggtcaagggcggcgccatcggggccgtgaacgggatgcgccccgacggcgccgtcgacgcatcgtccacgcagtccaaggaggtgtggcccggggtcacgtacgccgttgcggcggccatggtccacgagggcatgacggaggccgcgttccggacggccaagggcgcccacgacgccgcctggggcaacgacggcttcgggtacgcgttccagacgcccgaggcttggacggaggacggcggctatcggtcgctgcactacatgcggccgctcggcatctgggcgatgcagtgggcgctgtcgccacccgagctccacagggatctcaggacacccgaggcgcgatcctcggaggagccgtcgccggcggacgctgccctcgggcaggcgcagttcgacaaggtggcgagcatgttgaggctgccggaggagcagcagcccaagggatacctttgggccatctacaacctcgttaggcaaattgtgctccccgcatgaggattctcttgctccaagcagccgcactcatgaatgcaaattgagcccgttattatata

SEQ ID NO: 29770 - DNA, 330 bp, Zea Mays
gtgcttgtggcataatttttacaggttctctagaggatatggttgctggagtgacttggccgtccaccttgccaccgggttgggcagtcgagtgggaccctacctcagcagaagaggagcatgaggagtgatgggccaggtttccccgtcctccctttgtttaccgttagttaatttccgcttcatcaagaaccatggttactacttttgcaaaactccgatgatgatgtaataacattatgtacttctttaatttatgtttttatgctttattgtattttctctatgcctcgccttcgagtgagtatgtggtacttgatcctattactg

SEQ ID NO: 29771 - DNA, 2367 bp, Zea Mays
ctcccgcccctctaaacccagagcctaaaaccccggaaaccctaaccctagagaaaaaagggcgccgccacccaccctggccaccggggcgcgctcatttgttccccgccccttttgcaggtggtttcgttcaaacccaatctattttttcgcgagcgcgcgcgtgcggcgttgtgagaggaggcgaagaagatggctccattcggcgacggcggtgtcggctgtggcgatggaggggaggcgctgcgtgggtgggaccctctgcgcagtggcagcgcgccgccaacgatggagggcgcggcggcggcagcggcggcggcggagaggagggtatttggcggcggcggtgacggcgcgtcgttcttctccgggatcgacgggctcatgtttggcgcgaggatggacgaggtcagcaggtgccgcggtgccgccggagctcaggaacattttggcaattctacatctttatctgttggaccatctggccaactgtttaatggtgcaggagactgggatgaatggcagtttggaccgagcacagttcatagtggtggtgctatggcaaactatgcatttgatatgaatctcctttggacagatatgaatccagacaatgctgaatatcacagaaatatccagaatcacttcatgtcaaacattgaaaacatgaatgcttatggtaatagggatcttgatgcttcctccatgtttgattctgatatttcagatgctttatctgggttgaggctgtctaataattcagtaatggatcaaaggaataatagggaagagctagcagatgaaatactcgagcgtcaaagagatttctctaaaactgttgatgaaacccgatcatctttggttggtaatgtttttcatgcacctaggtcagatgtgcatccatcacgaatatatggagatggtattttacggaggcagaccagtgcatgtgcattagatggttccaatgtttcaaggatcaatcgccatcacataaagggtgttgatcgcccatctttggctgaccagctagctataatgcaatcaggcaactttcctagagggaccaatctttctcgcaatgtgtctgtgactaacatgtccaaccccatgagcaacagatacaacagcaatacagacctggatttggctaggagtcgaatgacattttttaaggagatacttgcacaacagtatctgcaggaggataatctgtcatataacgatagtaggatctatcatgatgagccttgttttccctgttcaagaatgcaaagatctggatctcatttttattcaaactcgcggtgcattctatcccatggtgatcggcaatcacggctcttgtccctcaataggaaggcaatgggtagaaatattggatcacatgcctatcatgataatacattatcaaactacctggatgtgctttctttggataatgcagatagaaacggtgctgattcagtggaactgattgatttagtgggtcacgttaaggaaattagtatggatcaatatggaagccggtttattcaacaaaaactcgaaattgcatcactggatgaccgggaaaaaatatttccagagatattatccaatgccattgctctaacaactgatgtttttggcaattatgttatccagaaggtatatctgtctatcctactttgatatctctgtttcctgtgtaatcctgacattgagattacgatgttctcagtttttcgagttcgctacagaaaggcagttaatccaattggcagatcaactcaaaggtcacattttggaactcagcctccagatgtatggttgcagggtagttcagaaggttttggaggtagttgataaggatcgaaagattgacattgttcatgagctcaggaatcatattctgaaatgtattggtgatcaaaatggtaaccatgtgatccagaaatgcatcgagtgtgttcctgaagaccgcattccatttgttattgatcctatactttcacaaattcttgttttatgtacccatcaatatggctgcagagttattcagagagttttagagcattgccatgatcctgtgactcaaagtgctaccatgaatgaaattgtgcagcaaaccttccatctgacagatgataaatttgggaactatgttgttcagcatgtgttgaaacatgggaaaccagaagagcgttcggccatcattcaaaagctctctgggcaagtggtcatcttgagcaagctaaagtatgcttctaatgtcatcgagaaatgtttggagtttggaactcttgaagaacgtgatagccttattggggagatcatttcttctggtcaaacatttcagtttcataggagccttgtggaatattc

SEQ ID NO: 29772 - DNA, 883 bp, Zea Mays
cgcccgccgcttctcccctcccctccccgcgtccgccgattctcgctcgctctccttgcaactccagtgctgctcactgccactgccagcagatcgagctgctccgtctcacaaaccctcttgctttgctgctgcacctgcaagtctgcaaccgcgcacacagagatgtcgacgacggtgagccgtgcgtccctcgaccagaagctcgccctcgccaagcgttgctcccgagaggcgaccctcgccggagccaaggcggcagcggtggcgactatcgcctccgcgatccccaccctggccagcgtgcggatgctgccatgggccaaggccaacatcaaccccaccggccaggcgctcatcgtctccacggtggctgggatggcctacttcatcgccgccgacaagaagatcctgtcgctggcgaggcgccactcgttcgagcaagcccctgagcacctcaagaacacctccttccagggcaccggccgtccccacccagccttcttcaggccgtgagacgagacctccgtccagagctagctacctacctctttttccagtttgccaatgcaagcaccaaatgcccaccgatgcatgcctgaataaactactgtaattgcgaggctgctgaacgtcgatgcgctagtataactactactactacgaggctagctgcgcgctgaacacagcgctgtaaagtagtgttggtgtgctaaattcagaatgtgtaagtttaatttatgttattaccagttaaccaactttgtgtgtgctattttcttgtaaaaaaataaagtggttagtggccatgtatgttggctttgcaggggaaaaaaaatttaaaacaactgaaaccttgcagaaaaaaaaattaataataccc

SEQ ID NO: 29773 - DNA, 3276 bp, Zea Mays
ctttttggttcgggtttcgttttcccactgccgctcccgcctcctctctgccctgtttccacatttgaccgatcctcttcgattcgatttctacacccccagagcttgccaaacccctcgtctcccaaccctagagagcagcagcagcagcagcagctaccgcatcccttgccatggcgccaagctccccgtcatccgctaggcccacgcgcgcctccggccggaagcgctccgccatggccgaggagatccaccagaaccaggaggaggaggaggaggttgtggctgcgtccaccgccaagcgcagacgcaaggcggcgtcttccgggaagaagcccaagccgacgcccaagcaggccaaaccggccgtggcggggatgaagaagaagggggagaccgagaagacggagcccgttgtggacgacgtgtgcgccgaggagcccgacgaggaggagttggccatgggcgaggaggaggcggaggccgaggagcaggccatgcaggaggtggtggccgcggtcgcggccgggtcgcccggtaagaagagggtggggagaaggagcgccgccgcctcgggcgaccacgtgcccgagttcatcggcagccccgttgctgcggccgaggcgcacagcaactggcccaagcgctacgagcgcagcactgccgcaaataaaccggaggaggacgatgagctcaaggccaggtgccactaccggagcgctaaggctggagaaaatgaggctgattacattggtcgcattactgaattttttgagggcactgatcgatgccactattttacttgccgttggtttttccgtgcagaggacacggtcatcaattcgttggtgtcgattaatgttgatggccacaagcatgaccctagacgtgtttttctttccgaggaaaagaatgacaatgtgcttgattgcatcatctccaaggtcaagatagtccatgttgatccaaatatggatccaaaagctaaggcccaactgatagaacattgtgacctatactatgacatgtcttactctgttgcatattctacatttgctaatatctcatcagaaaatgggcagtcaggcagtgaaaccgcttcgggtatttcttctgatgatgcgggtttggagacgtcatctaatatgccagagaggacagcaacccttcttgacttgtattcgggctgtgggggcatgtccactggtctttgcttgggtgctgctctttctggcctgaaacttgaaactcgatgggctgttgatcttaacagttttgcgtgccaaagtttaaaatacaatcatccacagactgaggtgcgaaatgagaaagctgatgagtttcttgctctccttaaggaatgggcagtcttatgtgaaaaatatgttcatcaagacgtggattcgaatttagcaggttcagaggatcaagaggatgctgacactcttgacaaggatgaatttgttgtacagaagcttattggaatacgctatgatggcactggaaggaaaaaaggcgtatattttaaggtccaatgggaaggatatggtcctgaagaggatacatgggaacctattgataacctgagtgactgtccgctgaaaattagagaatttgtacaagaagggcgcaaaagaaaaattctcccgcttcctggtgatgttgatgtcatttgtggaggcccaccatgtcaaggtataagtgggtttaatcggttcaggaaccgtgatgagccacttaaagatgagaaaaacaagcaaatggtgactttcatggatattgtggcatacttgaagcccaagtatgttctcatggaaaatgtcgtggacatactgaaatttgctgatggctacctaggaaaatatgctttgagctgcctagttgctatgaagtaccaagcacgccttggaatgatggtggcaggctgctatggtctgccacagttcaggatgcgtgtgttcctctggggtgctctttcttccatggtgctccctaagtatcctctgcctacatatgacgttgtagtacgtggaggagcacctaatgccttttcgcaatgtatggttgcatatgatgagacacaaaggccatccctgaagaaagctttgcttcttggtgatgcattttcagatttaccaaaggtcgaaaaccatcaacctaacgatgtaatggagtatggtggttcccccaagacagagttccagcgctacattcgacttggtcgtaaagacatgttggattggtcgtttggtgaggaggctggtccagatgaaggcaagctcttggatcaccagcccttacggcttaacaatgatgattatgagcgggttaagcaaattcctgtcaagaagggagccaacttccgtgacctaaagggtgtcaaggttggagcaaataatgttgttgagtgggatccagaagtcgaacgtgtgtacctttcgtctgggaaaccactggttcctgactatgcgatgtcattcatcaagggcaaatcactcaagccattcgggcgcctgtggtgggacgagacggttcctacagttgtgaccagagcagagcctcataaccaggttatattgcatccgactcaagcaagagtcttgactatccgggagaacgcaaggttacagggcttccccgattactaccgattgtttggaccgatcaaggagaagtatattcaagtcgggaacgcagtggcagtccctgttgcacgggcactgggctactgtctgggtcaagcctacctgggtgaatctgacgggagtcagcctctgtaccagctgcctgcaagttttacctctgtggggcgaaccgcggttcaggcgaatgccgtttctgttggcactcctgcgggggaggtagtcgagcagtaaaaggatagcggagcaaccctggttggtattttgattcgagcccatccagtagcatgtttaccaataaataatcattggtcgtgctgattcttatggttggagatgaatgtatgtagggtgtactcgagctcgagtgcttgttgtactgtaggttgaggtttctcatccattggcctgcctatttgtggatgacgtttcatttcagattagcaatgtgcttatttaaggtttcgtcatgtacctgtattctacaatccactattgtttccaaagacagcatttgatccttgttcaacgcgagcagattttcgtccaccaaagctgtgtagggatcgaaatgtcaacaatgaattgagtcattcaatcatttgtctaatgttaatgtgtcctttgcatttat

SEQ ID NO: 29774 - DNA, 724 bp, Zea Mays
ccctggaaaattccttcaactgctatattttggctggaatgctagcttatgctggattgcagaaacgtaggtgggagaagaagatgaaagcggaggagagcggcaagaattgataccacgcggctcgtccagggtgcttctcttcctaaataaggtccaaactttatccaggaggtttgcaggacggctagattctgacgcgtcatttccttgtggattccttctctcctgtgatgcgactttggacgcactatcctgattgtgatgctttccaacacttgtgccactggatcgtgatttcagtgagccccaacttctgcagcactagtattttgttgagacaaatcagctataagcatgccatctgcccaataaacttgttcatcatgtaagatcaatgctgttagtttttgtccgagtttgtgcttgcgtttgattacacttacctgcagaagaatgattgtctgaaaagtttgtccttgtgtaataagtgttgaatgttggaaatcctaaccctctcaaggattgggagattaatatatagaattagttggatgggctaggcccattacaataggggcgagatagtaaatacacagtggaggactgtaaccctaactggtactctaacatctcccgcagaccgcagtcacaattctatcatgtacatgtgttgagactgaactgaaagtctaggaatacactggacgacagtcccttggtg

SEQ ID NO: 29775 - DNA, 2283 bp, Zea Mays
ccacgacggcgcgccgcactctgcccacgacctcgacctcctcccccatgaccacgacctcaaccgctctgccagctccgccacttacgcacgcacgacctcaacctcgcctgattcagcgcatagaagagcgtgtggcgtcgaggtcgagcgtgcggcgccgaggtcgagcgtgcgtcaccgagggagaggaaaaccactgagcgttatttcctaagcctcctgcttgatgtctccaccgtccctcaacgcaattgccgccgcccgggatgcgctccacccccgcccgctaatcgtccccttgcaactgccgccgcggccgccaatcggcccccaagaaccaaaggttcgagctccgcaggtggcaagctccttcttcatccacgccctccctccgccttgagaaccagaggaaaccagagtcaccaaaactacgggcaagactgtacgaagggaaacatagtactcccacgaagaagaagtgctgcaactgcaggaactccaaatgtttgaagttgtttcgagtggcttcgcatcgcaggctgccaagcccaccgagaagcaggtcaaggttgcaaacatactacttgctcatgttggatgacatggaagcagtaggttgaccaaggcaacagctgagatagctcgtgcagccaaccgatcatggcttgctcttcttatcgatactgcatgtgaccagttttcatttatcctacaaagtctgtttgatctcgctatggagcacaaccgcaataaggactcacaatgtaagagcttgaccttgctattcatgctggttcgtcttgctttacatttgcctgggtatcatttggttcacagtgaagtaaattataattgtttagtaaatatttcattttattttgttctacatgttcatcaaaaggtaggcaaggattgcattttctctactgcatatttagtcatctgcattccccaacttatgctgtaaattttgctaccaaattatgctgtagattttgctttgcgatatctcagtaattgcaggagcataatttggtagctaatgtgttattgttttggtcttcccaatgacgactgttgttggcacttggcaggatgattttgtacgtcgtttgtgccaaactgttttagttttgaccaggtttatatgaaaaatagttacacaagtacattgtaaaagttattttataattaatatagtgatactaatttagtgttctacatgttgatattttttactatactttagtcaaccctaacttcgttttgacccaagaattttggaatggacagaatggttctttcattaatccattgttttgttttatatgttgatcagcccatcacaatgcctttgacagtgactttgctttttaaggtgcagtcaatacacatggcatccatcaaattacagaagaagttatttgtagttgcaaagagaatatcaaataaaatacttgttgagcttaagtttcttcatcaaatcatttttgggaggcttcaaatgttctatgaacacaatgataataagatgagctacccagcaatggctcaacttctgtcaaatatactctactacaagagaaattgattgggataacatctctactactatgaagaatctaaggggtaggatgtctcccctggttcaattgaaagtagatgagaagagtaaggaacacaaaaaatacctaaggaggatgttgtatacctaaaagttggattgcaacttgagtatgataggggaactacgatggggaacagttggagtaatgatgctgcactataccatggtttggtgaaaggagagaagatgaaggtgctggtacatcacaatcaatactagaagcaagacagacgcacccactattgttactgaaggtcaagatgcacaagatgatctgacaacaccacatgcacctaagatgtccaaaaagattactccaaggaagaaaagcaattgaactaccttatgtatattcaaaattagtgtattatccactatgttgtgtcaagaactatgacttcaaaattagtgtgtcatgaactatgctgtttcatgaactatgtcttcaaattctgggaagtggagtgcagtttcttgtataattttgaacatgtccatgtgcacctactctgctaattgtgtcatggactgacatgaattatgtcatgaactctgccaactgtgtcatgaactgggaagtggagtgcaccaaccgtgtcatgaacatgtccagtttactgcaactctgccaatgataataaaatgtccagttt

SEQ ID NO: 29776 - DNA, 1525 bp, Zea Mays
tatataccttgtcattttctgaggaccagatgttcgtatacttcatccaaggtaaagctgaaggtgttctctttgaagatgcaggagatggatatgcattcacacagggagactatcttttgacatattatattgctgaactccactcatcagtggttactgtcaaaatcttaaaatctgaagggtcatggaagagaccaaaacgaaatctgaaaataaatatattgcttggtggaggtgctatgataagtacagatggtgttgatggtgaagtaatacaccttacaatgccttctgaatctgtagtgtcaagcttagttgcaaccagcgaatttgagcacaagaaacgaatggagatgattcagcctatacctgatatagaagagccatcggggcaggaaggtgctgagctatcaaaaatacctgttgatttgaaaagtggagactggttccttaagattgtaccatggattggaggccgtattatatcgatggcccatattccttctgattcccagtggcttcacagcagaattgagataaatggttatgaagaatacagtggggctgaatataggtctgctggttgcacagaagagtacaaagtcatcaggaggcaccttgaacaatctggagaggaggaatctatttgtatggaaggagacattggtggtggtctggttctccagcgccagatatccattttgaaggacaacccaaagattgttcagatcgactccagcattcaggcaagaagtgtaggagctggttctggtgggttttcaaggttggtctgtttacgagttcatcctacattcaccctgctgcacccaactgaggtagtagttgctttcacggccatcaatggttcaaagcaagagatctccccggaggcaggagaaataacattcgagggagacctcaaacccaacggagaatggatgctagtggacaagtgtgtcgggctgagcttggtgaaccggtttaatcccagggaggttagcaaatgctttgtgcactggggaactggtgatgtgaacatggagctctggtcagaggaaagaccggtgtctaatgagacgccgttgaggatttgccaccagtatgaggtgcagcaaacaacctaaacacctgcccgaagagcagaaataaaaataccaatttggaggatacttcagttgcttgcacttgttttacggtctctgtattgacggtcgcgcaccataacttccatggtattttggagtcgtgtcgttagtcattaccctcttggaggactttgggtctgctgaaaacatggttactcagcaatatctgctactgttcacgactgacattcaaagggttactcagcaatatatggataaaatttgtgttaaagataagttgtgtcgtgtgggttgagttatgtgtgttgtgttgtgctgtaccttcttctatctattaatggaaagatacgtagatctcctgcgtattcgagaaaaaaaactatatggataaaattttatgaaacatcgtaagtgtg

SEQ ID NO: 29777 - DNA, 1973 bp, Zea Mays
cactgctcggccgccgcctgcaatcactgctagtccgcaggcaaccgagagcccgagaccgcccaggtgcccaccactccaccagccaaccctagagcctctccagtctccactgctcggccgccgcctgccgcagcccgccgtccactggtcccgcctcccggcgtccgctccacgcctccactgctcccggcgtccgctccattgctaccatcgtccggcgttctgctcctgcgccctccctttgattcgttgccagttgtagtgtccgggcagatttgagctgtggcagcaagcaaggattgacgaagcgtgcgttcccatcgcaccaccatgggctacacagagatcgacatccacccctctgggagcggcaagatgtgatagatattagtatgaaagataaaaactagaatgctatgcctgtcagaggagctttcttcagtttcagaacacacctctccatctttcggtgcttggtggatcaccgtctaaacgatccaccaccagaaccgcccaaccccaagatagctccatctcagtcgttgtacccgttcaatggcgagctggtggcagcgatgtaggagatgatccatgccgaggtgcacaagtacatgttagtggacggcacctgccaaagatacaccgtttctactggtacacattttattttttatggtgagaattaattttgtagcttgcgcaaaaccaaaggttgagtgatttgtcaaggcagaaatcagtataatgatagtttttcagttggagaaaacatttaagacaacattttcatcgtttgttctccatatggggcttgtttcacgccacttgaaggaagaagggaatggtggtgttaagttcggacaatacatctacacatcttggagcatcggcatcaatgttctcaatcttctcaaatttcaaattatactggtgcgagctgcaatcaaagttaaggcattagtcatcatttgcttcacctcttctggacaggctgcaaggtatatactacacaaatgaatattgtttgtacatatgctatgcaatttgctagtgataggataaaccaaactgcactgtactgatcacatgggacgacacatgctaaaatcaatataatagtaacttgctcggaccaataatgcctaaccactagaaatgttgtaattctgtcactagtaattctgacataatgaggaagtccctcttcgtggtcggagaaattgggggcaatgactacaacctacctcttcactagagtgccatttgaaaaggtccgctcattcacaccaagtgtcattcttcactagagtgtcattcttcactttatgattccatggtttgaatgaccaatcatttatgatgtccgtgctcgactgattccttgtactatggtattcaatataaggtattcaatattttcattcatgctgctgaggatgaggtttatatcttatcttgtttatgtttatatttatatgagccatcaacttaatgatgattaaccttgattgcaccagctgaagttggtgcataagttttgcctcgcactaatttgatgtacttttttctagggtgttctggacaaagaaagcttgtaccttaaaacaagaggatacaagaagctggagtggttgtctaaaggcttttgaactgcttgaagcattagtgtagctttggtgattttgtgactgatcagctctggagcagctagagtgatgtagttgtgggcttttgaacaatagctggagtgatatgaaacattagtgatgtggttgtgggcttttgaactgcttcaagctggagtgatgtcgctgtgttgcttttgtgactgatcatctctggagcttttgtgaatgatctaactagctatatgtaaatgatctagttgtgaatggtattataattgtgatgattttgtgaatatataattgtggtgcttttgtgtttatgtgatggatctatgactggta

SEQ ID NO: 29778 - DNA, 2603 bp, Zea Mays
agaaaatatagaaagagaaaacagttgaaacctccatacctgagtattgacgggtcggtggatgtggctcacgcctcggcgacttcagccggcggccaggggcgttagacggcggcactgtacgtggtccgcagctgagcaattggcagatgtagtgataagctgatccgtcgtctcccgtcttcccgacccgggtcccgcctcgcccgtcgccgccagatccgacgcgctggatcgccagcggcctgctgctgtcgatccgacgtgcggcagtctgctcttcctgccgtttccctgcgcttggggtccataatagcacgcatctggccggctcaagagcatagtggatctgaccggaggaggccgctgctgctgcttctccctcaccgatggcgagggttcgggacaggacggaggacttcaaagaggctgtccgagtcgccgcactctcccatggatacacggaggcccaattggccgcgctcatgtcttctttcatcatccggaagccgtcgcccaagtcaccgttcactaatgccgcaatcaagacgcttcagagcatcagggaactcgagaggttcatagtgaagcataggagggattatgtggatctgcatcgctctaccgagcaagagagggataacattgagcatgaagttggtgtttttgtaaaagcatgcaaggaacagattgatatcttaaagaacaggatccacaaagaagagaagaatggaagtggaaagacatggcttggcactagggatgagagttcacgggtggacttgatagctcatcagcatggtgtggtatggttattctccctgccattgctgtaagtttaagattttctgcttgattaatttattgttccagggagcacatgataattaaatagttcgcagtagaactgacccgattttgttccatttagaggatgaggcaaagtaattccttagagcaactccaaaagtttctttatattcttccataatgataggagtatatattttggtgaaaaacttcccctccaacagctacttcaactggaactcaaaaaattgcaatccttattttttatttcttgctctccaaagatagagagtaaaggtacctttccagactccagagtgctgaacaagacatagagaagttgtttagagggtggagatatatagagtgatttttattggaatgactctctaaataaaaaataagagagtaagtttaagaaagactgttgaagatgctcttacgttacctgttacgatgctacatgtattatgagcaaagatctccttttattagagccaattgaacaggtggtcctgttgaggattgatgttttcaacattttctttccaagtttttaagtaagttgggtgtatatttcactagctggtagtaggatatcagaacccaattgcttgatttcatttggtaagatgaaaaatatgctgtgtgatttttagaggacagaatagattacccagtcgaaacaagtgaacttgaataatatctactttcatttttttcggggcttcatcaggtaacagcatttacaggcaaacgcttacctccatttgtctttattgttttgtttttctctatatccaaatcttagtggcagtcagtcatcagttctaaagtctgaactacgttgttttgcagtagttttaggggtttccttgtgcccagctccagtaagctgtttgttttgtgccaactttattaggttctaattttgagtgagcgtctacactcggtaactgcacaatttgatcatcttcggtccattcgttttcaagatgctattaacagagcaatgccaaggaagaagattcagaagagaccagaaatcaaacctgctgaaccatccaagtccaatcttgttctaaaatctgatgtatcaaaggttgtagaccatgaagtatctacaacacctatgagagttcaagaacagctattggacgatgaaacaaaagccctccaggtggagttgacaagtcttcttgatgctgtccaagaaacagagacaaagatgatagaaatgtcagcacttaatcatcttatgtcaacacatgttctacaacaagcgcaacaaattcagtatttatatgatcaggctgttgaagctacgaataatgtggagcgtgggaacaaggagctatcccaggcaatccagcgcaacagcagcagtagaacctttctcctactcttcttctttgttcttactttctcgattctttttcttgactggtacaacaactgaattagtctataaagacgtcgtattgttttgctcatgcgaaatgatcaaattatgaaagctgtctatttaaagtgctgatcttttacgtactatgttacttcccaagcatactgtcctatgtgttgttcatctcaatgcgccgggatttgtcattttatctgaaacttgttgagcaattggcgatctgaagaaacaatgctgggtgtatagtgtactactgatattctggtattgttcctctcaagaaacaatatgttcagtacgtgtcgaggtgctgcaatttctatttgtttctgtcgatttgtgcagcacttgttaccagggggcaacgtcg

SEQ ID NO: 29779 - DNA, 2985 bp, Zea Mays
cgttacacacagttcctttcaggcttcacccgttttgctctcgagtctctcccggttcggatccaaattcagcaatccgacctgagaccaagaccgcgcaccacgcggctcgccgccgatggcgaacgccgacgccgacgaagcgccgctgctctctgtggaacacctccgtccaggatcctgcagccgcgagctcgagctgcgggagttccgcgaccgctacgtgatccgttcgctcgacggcgccgccgctttcgccgtccttcgctccggcggctccatccgccctctctccccaggtgaagccgtgtagtgacgcgaagggttgtggcgtgcttccggatttgtgttgtattgattgattggtgttctcccggatttgtgctgttttgattgatgttatggctcgtcaatcggcgtggtgttctggacgtggtttaccatcgtcttttcgtgggcagaggaagccgtagctgagagcgactgcaaggtttccagaatatacggcgtggtcggcaccataagattgctcgctggaagctatgtactcgttatcacttctcagaaagatgctggctcttatctgggctcccctgtgtaccaagtgaactcaatgaaattcttatgctgcaacgaggctatcaagcacttgactccacaggaaagaagggatgaggcatacttcatgtctctcctgagaattgcagaaactacttgtggattgtattattcatatgacagggatttgacactaaacttgcagagggcatccaagttggctgctgggagggtacataaaccactatggaagcaggctgatccacgttttgtttggaacaaaaatttgttagaggaacttattgaagctaagcttgatgagttcatcatcccactgatacaaggaaatatccaaaaaatgatagttccatgtcactgtttatgtatatatttggtttgcatgcataatgtggggcctataccttgccatcatccaaccatattagaaggatatatttcaaaaagttgcaatgcattcccattgttttctatacttggaggacgaacatgatcaggaagctggtgtcctttaactcctatagacccatacgttttcagtcagcacaatttaccttgaaggatagaccagtgaggataacattgttctcaaggagatgcaacaggcgtttaggtttcttttctttttctttttttcctttttccttttttccttttcttgaaacattagtatagaacacaatgatacttctaaattgtaatgcgctcattgcaggaacaagaatgtggagaaggggtgcgaatcttgaaggcgccacagcaaattttgtagaaacagaacagttggttgagtatgaagatctcacatcctcatttatacagcttcgaggttcaattccacttctctgggagcaaatagtggatttaagctacaaaccacggcttagcattattgaacatgaagaaactcataaggttgttcaacgccactttcatgatctttcacaacgatatggcaagataattgttgctgacttgactgataaagcaggagagctgcattctcatttcattaagaggagaaaaaaacaagggagaggctgaaccatctcgttttaacagttgttctatttgtccatcgagcgacaacggttcatctaatctgttgttacttgcagcgaggtgatgaaggagatttgagcaatgcatttgctgctgaaatggacagaattcctggtgtcaggtatatacattttgatttccatcatgtttgtcgtggaggtaactttgacaatttgcaagctctctacaatcaaattgaggaagctattcataagcaaggctgagcagatattttcttatgaacactaaaggagagattttgctggagcaaagtggtgtagttaggtccaattgcattgattgcctggaccgtacaaatgtgacacagagtttccttgcaagaaaatcattggattctcaattgcagctgatgggagcattattgtcatctgaaagcatttctctctctgataacattcatgatacattcaaaaaattatgggttgagcacggtgatgagctgagcctggagtatgctggctcttatgctttgaaaggggatctagtgagatatggaaggcagacattgcctggactaattaaagatggaatgagtgctctttcaagatattatttgaataattttcatgacggagtgcggcaagatgctcttgaccttattagcggttattatacagtcagccaaggcagctcttctccttttcataatgtatctgccggtggcttcagcaatcatagttggtgggattaccgcgacaactttcactctcagtcaagttggacggaacgcgcagcacttgatctcctccattatctgtgcgggcttaacagtcggagtagtagccttggtgaaagccaatgggaaacagttttgctctaggccccgtctgtgtggtctaatctaatccttggtcttttccccccttccctttcatattgccctttgttagaaattgaatgtaaaaggattagaatgttgttttattcgttgcaagagtaaggttaaataaggaggcaggatggcctgccggtcccgtaatctgaagctgctaatttgtaagcctatagtttggatttgcacattctatttgttatactttttatgtatccatgaatagaaaattacgcctcgaaattccaaatttgtaataaatccgagagaccacatatttttttagtgtgactggttggtagcgacggtcttggcgtcttgcatagttgctgacacagaaaagacacctccgtccctctgtctggtacagtgagggtggggcatcaaaaacacaaagatgctgttcttatcaggcacagatgtttgccaagtataattccacgttgcgctatacagtcgggtttgctcgtatgcatttatgatctagatactta

SEQ ID NO: 29780 - DNA, 3279 bp, Zea Mays
gggctcttgttggagatgctctgaggtcagttcctagtgttacttttgaattataccgaatttgtttcaccgcggcatattaacgaccatggccatcttgtttcttcactggaagattccacaagaaatggtcgatgtacatcaaggacacgggcgcaggaagccttttcactgtgaagttgcttgcccctactctaagatcgccgcttctgttcagtgtgatgactcaagtggtgatgaaaagctgaactttgctcctgataatgagcctatccagaaatggcaccggtctttgagctctgacagtgttgtgcagacactccgctgtttaaggaggaaacctgcagttgcattcacctactttaaagatacacatagccttggttttcaccatgacttctcaacctactcagagatcatacaaattttgtcccattcattccaggggaagatgctggtatccttgtttcgtgagattctcttgggaactggtagtggtggccctgaaatcttaccgctcattgatcacttgagaaaaacatgtgccacttctcacgtcgggatgattgaaatgggagtgaaattagatgtacatggattctcatcatttataattggcctttgtgattgtggaaagtttgatctagcttataacatggtaagaagatatgctgttctacaagagatatcccaagagagggttccaattgaagccatggcttataatatggtaatcgatggactatgcaaagaaatgaaactgaaggaggctgaaaaggtcttggagatcaagaccagacatggatctgcccctgatctatatagctatagctatctcattcatagtcattgcaaaatgggtaacctagagaaggcatggtatcatgttgaagacatggtatcccatggcattgagataaattgttacattgttgcttaccttctacagtgcctcaggaagttaggcatggtatctgaagtaattgtgcacttccagaaatttagagatttaggggtccatcttgatggcgtgctttataacattgctatggatgcttattgcaagcttgggaacatgaatgaggcagttaagctactgaatgaaatgatggctggaagtttggtaccagacaaaatccactatacatgcctgatcaatggttattgtctgaaaggagaaacagaaaatgcctggcaagtatttgaggagatgctgaaggcaaatataaaaccagatgtagttacatataacatattggccagtggatatagcaggaatggccttgttatgaaggtatttgacattctagagcacatgatggatcaagggctcgaacctaattcactcacctatggtatagctattgctggtttttgtagaggaggcaacttgagcgaagcagaggtgctgtttaatatagtagaagaaagagggatagataatatcaatgtgctgtacggttctatggtttgtggttatttgcactcaggctggactgaccatgcttacatgctttttcttagagttgctaaacaaggaaatatggtggatcgtttgtcatgttcaaaattgataaacggactctgtagggatgaaaaggttggagaggcttcaactgtatgtaaaatgatgcttgaaaagaatgttgtccctgatgtaatttcatatagcaaacttatatcagcttattgtcagacaagagatatgcacaatgctcgcttatggttccatgatatggttgaacgaggactttctgatgttattgtatacactgtactgatgaatggttattgcaaggttggtcggttgcaagaagcatgtgaattatttgtccaaatgataaatttaggaatcaagcctgatgtagttgcatacacagtgctattggatggccacctaaaggagaccctacaacaagggtggcagggcatcgctaaggaaaggaggaccttttttcttaggacaaagcataaggtgttgctgaactctatgaaagatatggaaatcgaacctgatgtaacctgttacacagtattgattgatggacggtgcaaagcagaatatctagaggaagcacgaggattgtttgatgagatgttagcaaaaggacttatccctgatgttcacacatacacagctcttataaatggatactgtagccagggagaaatagctaaggctgaagatcttttccaagaaatgatagctaagggaatgaagccagatgtactgagcttttcagtattacataagagaaccttgagacatgaaaaggctcattaatatttatgtgtactaatggttatgttgatgaatgtcagtttgactgaaggtgaaggggcgtcctgccaacaaaagggaaggcgaacacctggattgaaagactgctctctcagttcagcattgggtcgtcaaggagaacaaaatgatggtaccttcagcgtgaggatcgatgactgtcaatggagctgtgcaaacacaatcgtggcaaagctggctgtggcactggcgcctatgccatttatgagggttttgcttgaccgttttgtggctgcaactagtggtgtgttcccagacaaccaagagctacaagacagaggtaagctctcgggttccgtcctggggcaatggggagctgttgatgatcctgagtccatgctgcaccacatccattgggcagtaatgaggtgattccaatcgttaagagtcaagcataatgttgtgtgatagatctatttgcggtgtttgacatcgaggctggggaagttggaaaatggacacagatcgcagagctcggttaaacaagtggcctgtgcctgccatgttggtatcatccaaacagtctccatgtctgcattatactgatgactggaatgagggtgtgtccaaggaggagctggactctgagatcccacctggcgaggagtcgatatacggatacataatgggaatggcagatacatgtagtctgtagaatccatcaggatttccccttgataggtctcaggtttcactctaatattgtgcattgtccctcaagatgttaatacagcaatttcttgtttagtgctcataacattactccagtctccaggcgtagtgcttggtgtagagacataaaacagataatgcagcaccagtttgtggcttcaaattccgaaacaacagctttgtggaagacagaaaagaacactagtttttggcgaactgttgattcatttcagaatccaaagattggatgacctatttcgtatttcaaaaatgacatccaaatgggc

SEQ ID NO: 29781 - DNA, 3694 bp, Zea Mays
cccactccgtatttttcaccagcgccaccacggtaaagtgcacgctgttcctgcgggacattactacaaaaccaatcccccgtcttgcgaggtcgcgagtctctccaactccgtccctctggcctcagcacaacgccagaccgcctgcctgtgcttgcagccaggccggccagctgcctgcctgcctgttgtcgtctgcggcgcgacggcggccgcccggtcgaccgcccgcattgggatccccagagcagcgcttggcataggggaatgtcccgggtcagccaccgtcgcctctgcgctgcgaaagccccgcatttacttgccacctagaagggggcacccctcgcgagacccagcgccagacagagccagcaatggctgctgctgctgctcctcctcctcctatatagcggggcccgtgccgagcgctcgatccagttcttctgatctctgacttctgagcgaggagtggacgagtggtgtgccgtcgtccggttcccgttggtttggcgatgaggcgcgctcgcggtcgccgcgggctgctgcttctcctcggcgtggcgctctcggcggctgcgctgctccgtggctgcgcggggcagcaaggggaggacggctcggacgcccctgcggcggcggcggcggagacggcccccatggaggagaaggagcgcagggcgctgtacgccgccatcgagagcttcgtcggcaaggggtggaacggctccgggctctacccagacccctgcggctggtctcccatccaggcgcgtccctgcccttcctgcgctttccctttcgcatcgatctatgttaccgtgctgttcgattttctggcccgcgtatgttcgttcatcatgttcgttcttcagacgcgcgaagctttcctctttggttttttcggctttgcccgtcctcgtcacacgccctttctcggtgctcccctgctgcctgctttgagctccaatccaaaaaccgtttgcgagcgaaaggaggagcaagtcggtagcctccgaaatgaaattggtgccctgtttggggatgcaggacgcacgccaagtcgccaccaaatctcctgctgtaatttcccgtgttaaaaccttcctcgtctcgcttccagaatttctggccttccggtagcctctgctgtttttgtcttgtgttcgtccttcgtcgcactcgtgccctgctcctcaactgttgcttcgagattgtggcactgttttgctgtgcgccgctgcacattcagttcactgttggacgagacctctgcttgatccccttgtgtcttcgcatctcagccttttgctcgatatggtaggaggatctgatctcttgggcaggaactttccactcacatgaaaagaacctcccatgatttgaaatggcatgctccgcccaagatttttctcatacagtactactactctctagtatagattttagtagtaccttgacatcttcttccttttgctcgcgcccgagaaggaatcagtcctactactccataggagtttttgctctaacaattactggaatttaccgcatatttatcttccttcacacggtacactggaatttcattctggttgttacagtaccagtaaagttaagaaggggccaaatttgtactaggtgcacctttaagaaatgtcgccatcttggatcatcctcatccatgtctgttattactgctagtagttactgttgagcttgtgtttactttccgagtaggacactctcagattgcagcgtgcttgcctgcctgttaaaattaaggggattcaatttcagtggattgagcagatgtggttcttggatgccaaaaacctgtgcagggggtgtcatgtgatctcttcaatggcctgtggtacccaacagtgatgagcattggcccagtccttgacaactcgctgcagtgcggccccgacgccaagttcagcgcccagctgttcgacctgaggcgcctccggacgctgtctttctacagctgcttcccggcgagcaaccccacggccatcccgaccggcagctgggagaagctggcggggacgctggagacgctggagttccgcaccaacccgggcctgaacggcgccatcccggcgtccctcggccgcctggccagcctgcagtcgctggtgctcgtggagaacaacctgacggggcccgtgcccgcggagctgggcgcgctgtcgaggctgagacggctggtgctgtccgggaacgggctgtcggggccgatcccggtgacactcggtggcctcacggggctcctgaagatggacctgagcagcaacctgctgcagggcagcatcccgccggagctcgcggggctcaggagcctcacgctgctggacctcaggaacaacagcctcaccggcgggctgccccagttcgtgcagggcatggcgtcgctgcaggacctgctgctctcgaacaacccgctgggcggcggcctgccgcagtccggctggggggcgctggcgggcctggccacgctggacctgtccaacgtcggcctcgtgggcgccataccggggtccatggcggccctgacggggctccggttcctggcgctggaccacaaccgcctgacgggggccgtgccgcccgagctcgcccggctgcccagcatcggcgcgctgtacctgaacggcaacaacctgacggggacgctggagttctcggccgggttctaccagcgcatggggcggcggttcgcgtcgtgggacaaccccgggctgtgctacaacgtcgcggccgtggacgcggcccacgcgccgtcgggcgtggtggtgtgcaaggacctgcaggagcccagcgtgggcggcggcgcgcgggacggggacggggacggggacgcggaggaggacgggacgaagcccgaggcgggctccagcctcgtggcctcctcgtcgtccggcatgccggttggcagtgtcggtgggctccggtacctggtggtggttcggggaatggcggctgcggttcttgggttggtgtccctcctacaatagcaagcaagcaggttcagaagaagaacacggagaaacttgaagtaatgctaggtaggttagcacgaagtagtttctgcgcgttctctgtgatcttttggcatttgtttttggctgctggtggcttaccatcgtcagatggtgacggaggaaggagggaacatggatctggatggtgtgagccacagattacattacagtagtagagtaaactatgagagttcttgtggactgaaggtgtgtagtggtggatagggtagcttctccggggttcttttgtgtgtaattagcctgtgtcgccctgtggtgtcatgttacaacagcaagtggaaatctaagctggttcgtccgttgttggagaatcagaaaaaaaaaaattgtcgtgcttcattcacatcacatggatacacagtttcctgttcttggagcagaagaactggaaagatctctcgttatctctatttgctatagaaagaacatagcggcggtatctgcagacgatacaaatggaagaagagcgggcaagcagcacgacaggatggagcggcggcgccgccgcatatgtccggctgccgcctgccggcgatctcggtgtctcctgctgccttttgcctttgcgtgttctcgagtctgaaaataaaatcaaaaatatggaccgagacgctgattgcgcaggg

SEQ ID NO: 29782 - DNA, 1971 bp, Zea Mays
atgcacgctgcggatttcgccttcctcaagcaccctaagatgtgtgcgctgccgccccaaccccacttaccaccccaccgggcacgccatgacagggagccaccacagccggtggtggctgatgcagttccagtgcgcgctcatggctgcaccgcccatgtcgatccccatcaagaagttgtcctggaagaagagcacccgcatccgttggcctccaccgacgccaccacctcgcctgtgaaccagttctcgttgaggtcccagccaaagagcaagttgatgcactatcaaaggaattgtttgcgctttcaaccgtcacaggatctttcaaggcagtgtaaaacttgtggccttcgatttaaatgccaagaggagcatcgtgctcacatggactggcatgttacaaaaaataggaattcaaagaaccgtaagcaatcttcacgtaaatattttgtcacggtggaggaatggttaagagctgcagaaacagtaggaaacgatggagttcctgcttttgtgccctcagacccagtcccagatagaaaggaagagagagaaattgctgttcctgcggatgaggagcaaacagcctgtgcattatgtcaagagccatttgaagatttctacagtgatgagactgatgagtggatgtatagaggtgcggtctacatgaatgcaccagacggtaatattgatggtctggaaaggtcacggttgggacctattgtccatgctaaatgtcgatctgggcccagcaatacttagggtgggcatggctggtgagtatctatctatttccttgtgctataacaaacatctatggactttaaggtggacataatgttttttagagctagtttgggaacctcattttcccaagggaaattgtatcttgaggttaaccccactgtaaatagaggatagtctccttgctagtatttggctgtatgcaacatgtttttggctacgattatatatgttatctgactaaataaaaatgctggatgtgagttgttgttcattatttttccattgtttgtagttagtgttcaatattatatgaatatatacttctgtcatacatttggacccattcttttttgtttggttttcagttctgctgaaccattttgcagatccatcatatggattttcagaatgtctgattctactggcatactcccacggtccaagaaagaatgcaattctagcagtggatgacttgatagcttttttttccgttgcggctgtaggcatgacctgtaaactactggagactcagaatttggtatggttagattttttcctatctatggcttcgttaacagccaatgcacagaatgttaatgtgacaatagtgcataactgtaaaatttttctgtaattcagtgattggaagttagtaatcggcacaacattcactattgtcatattgtgcttttgcccctgtcattttgtccttccatagttgcacagtgctgctttttcattacagccgtagtgtgatctatacttaagcttcatgtttagggtttctgcagcacagttgttgtcaggacagcggtttatggagccatggtctcactggacatgggaaacaatatatttcaatagtcctgctttcttcctcgttaatatcttgtgcaggatacataccagttctctatgttggttggtagctttggaagggaccgtgcaagatgaccaagagtgctggccactatttatgcctaagtattgaaagggactagatactgtcattaccttattgccaatttttttagtattttcctttgtaagttgagagcattgtttgtgactattattcttggttgcttgtatagttccatcttgctgatatgtttatactccaaaatgtgggtcagaatgtcttatcagactttattctttattctggttggtatatgctccggcaaactattcaatggaacaatttgggaatattttttc

SEQ ID NO: 29783 - DNA, 5542 bp, Zea Mays
ccaccccaaaagcccaaactccggtgccatcagtgtattctctaatcacctcctctcctccctccgctccttcgtcctccccgcgaagggaggggtgtgtcctgtgcccgccaccgcgtgggatgctcacgcttcgtctccgccaccgcctctccggttgatccgccgctgaggagaacatcagaactgattgaagaacagggttggtaagtggagggagcgagatggggttcgacccactggagtggtactgccagccggtcaaggatggtgtgtggtcgcatgtggttgagaatgcgttcggcgcctacactccatgtggcactgacacccttgtagtctgcatctcatacctcgcactctttggagtttgcttctatcgtatatggaggacgacgagggactacacagtgcagcggtacaagttacgttcaccatactacaactacctgcttggactgctcgtggtgtactgcatagcagagccgctttatcggatcatcactggtacctccatcatgaacttggatgggcagcctggccttgctccatttgagattgtctcattgatcattgagtctgttgcttggtgctgtatgcttgtaatgattctgcttgaaacaagaatttacatcaatgagttcagatggtacatccgatttgtggttatttacatgatggttggcgaagctgctatgttcaatcttgtgctctctgtgaggcagtactacagttcaagttcaatcttttacctatactgcagtgagattgtatgccagttcttgtttggaattctcatggtggtttatctgcctagcttggatccatatccgggttataccccgatcaggaatgaagtgttggttgataatactgattatgaacctcttcccggcggtgagcagatttgccctgagagacatgccaacatatttgccagaatattcttttcatggatgactcctttaatgcaacaaggatttagaaggcccattacagataaggatatctggaaattggatagctgggatgagactgaaactttgtatagccagttccagaaacgctggaatgatgagcttcaaaaaccaaacccttggctgttacgagctcttcatagtagtctttggggaaggttctggctgggtggatttttcaagattggcaatgatgcttctcaatttgttggtccacttgtattgaacctgttgttagagtctatgcaaaaaggtgatccatcttggagcgggtacatctatgctttctcaatctttgcaggagtgtcacttggggttcttgctgaggcacagtactttcagaacgtcatgcgtgtgggtttcaggttgaggtccacattgattgcagctgttttccgcaaatctttgcgactaactaatgatagtcgtagaaagtttgcttctgggaggattaccaatttgatttcaactgatgcggagtcccttcagcaagtgtgccagcagcttcacagcctatggtctgctcctttccgcattgttatttccatggtccttctatatgcacagcttggtcctgcagcattagtcggtgcactcatgctggttcttttgtttccaattcagactgtaatcatcagcaaaatgcaaaaacttactaaagaggggttgcaaaggaccgacaagcgaatcagtctcatgaatgaagtattagctgctatggatacagtcaagtgctatgcttgggagcaaagtttccagtcaaaagtgcaggacatccgtgatgatgaactttcttggttccgcagggctcagttgcttgctgcgctgaatagctttatcctgaacagtataccggtcgttgtcactgttgtttcatttggtgtatattctctactgggaggtgatttgacaccagcaaaggcgtttacttctctttcattatttgcagtcttaaggtttccacttttcatgctcccgaatctgataactcaggtggttaattgtaaggtgtcattgaagcgtctggaagatctcctgttggctgaagagagattacttctgccaaatccacctattgatcctgatcttccagccatttctatcaagaatgggtatttttcatgggaatcagaggctcagagaccaactttatcaaatgtcaatctggatgtacctgttggaagtttagttgcaatagtaggaagcactggtgagggtaaaacttctctcatatctgcaatgcttggagaaataccaccagtatctggatcaggtacctcagtggtcattcgtggatcggtggcttacgttcctcaagtttcctggatcttcaatgctactgtacgtgacaatattttgtttgggtctccctttcaacccccacgatacgagaaagcaattgatgccacttcattgcggcatgaccttgacctactcccaggaggcgatctgacagagattggtgaaagaggagttaatattagtggagggcagaagcaaagagtttcaatggcaagagctgtgtattctgattcagatgtgtacatatttgatgatccactcagtgcattagatgcccatgttggccggcaggtatttgataaatgtatcaaaggcgaactgcagcataaaacccgggttcttgttaccaatcagctgcattttctgccatatgtcgataaaatactgctaattcatgatggtgtaattaaagaggagggtacttttgatgaacttagcaacagtggggagctcttcaagaagctcatggaaaatgctggaaaaatggaggaacaggtggaagaggatgaaagtaaaccaaaggatgttgcaaaacaaactgtgaacggtgatgttacaatagctgatgaaggttcacagaagagccaggatagttctagtaaaacaaaaccaggaaaatctgtccttattaagcaagaggaaagggaaactggggttgtcagtgcgagggtcctttcacgttacaaaaatgcactgggagggatatgggtggtgtccatactcttcttttgctatgcactgactgaagttcttcgcatttcaagtagcacatggttgagcatttggactgatgagggttctctgaaaattcatggctctggttattataatttgatctatggaattctttcctttgggcaggttctagtcacactctcaaattcatactggttgattatatcaagtcttcgggcagccaaaaggcttcatgatgccatgctccgatcaatattgagagctcccatggcaacatctcgcgaggtgaagcgtctggattccattaccaggtctcctgtgtatgctcagttttcagaggctttgaatggtctgtccacaatccgtgcctataaagcctatgatagaatggcaaatatcaatgggagatcaatggacaacaacattaggttcacacttgtgaacatgggtgcaaataggtggctagctattcgtctggagacattgggtggcatcatgatatggtttacagcaacatttgctgttatgcaaaatcaacgagcagagaatcagaaggcctttgcttctacaatgggtcttcttcttacttacactctcaatattaccaatttactcacagctgttcttcgtcttgctagtcttgctgaaaatagtttaaatgctgttgaacgggtcggaacatacattgagttaccttcggaagctcctcctgtcattgaggatcataggccaccccctggttggccatcatcaggtgtcatcaagtttgaagacgttgtgcttcgatatcgaccagaacttcctcctgttcttcatggcatatcttttgttattaatggaagtgagaaggtaggaatagttggcagaacaggtgctggcaaatctagcatgcttaatgctttgttccgtatcgtggagcttgaacgagggagaatattaattgatgattgtgacacttctaagtttggaatttgggacttgcgcaaagttctaggaataataccacaggcaccagttctattctcaggttctgttcggtttaatctggatccctttaatgagcacaatgatgcggacctctgggaggctctggaaagggctcatctaaaagatgttataaggaggaattctttaggattggatgctgaggtttctgaagctggtgaaaatttcagtgttggacaacgacagctgttgagcttagctcgtgcgctgctgagaagagcaaagatacttgtccttgatgaggcaacagcagcagttgacgtgcggactgatgctcttattcagaaaacaatccgagaagaattcaagagttgcacaatgctcataattgcccaccgtttgaacacggtcattgactgtgacaggttgcttattctaagttctgggcaggttctggaattcgactctcctgagaatcttctaagcaacgaggggagtgctttctccaagatggtgcaaagtacaggacctagcaacgcagaatacctcaagagtcttgtatttgcaagtggagaagagaggtcccggagggaagaaatcaagctgcaagatatccaaaggagatgggttgcatctaaccgatgggctgaagctgcccagtttgcgcttgctagaagcctcacatcatcacatagtgacctccttgcattagaagctgccgagggaaataatattctgaggagaacaaaggatgctgtaatcactctgcaaagcgtactggaagggaagcacaatactgaaatcgatgaatctctaactcagtatcaggtcccagctgatcgatggtggtcttcactttacaaagtgatcgaaggcctcgccacaatgagcagattgggccgcaaccgtctgcagcaaccttcttataattttgagaacaacaattctattgactgggaccaaatgtagatgtagaattctggatcacaacagcattgtggagtaggctggaggtgtagttatttctggcggatttgattcctgcggtgtgtaaacgctgcagcaacacgtaacttgcgaataaggaacgagttttgccacagcaggacgatccttgtaccgtcgtccgcaagggttgtaatttctcagggaccgttacgacacgattgtatgtcaggttttgacagtttgagccaatgcaattcttctaatgaaaaagacaagtgcatgtgaatggttagcatctgcctatcgcctatcgggtatcatgtggagtcgtctggtataccgtcctacacggctacacctgagaacgaagcgaccttacccccaactatcaccttgtagcgatccgaagttgttcatcttcgagtttcagttctctaactccatcgtagctaagcgtttcagcaatgggtcaagagagagatttaactatttgtcaccgttaggaaggccacatatttgtttgcttgttttacgtggcaactgtacgattttttatcggaaacgctaactggtctattttattgatgtaccatgttaaattagcatgtcacggtggatcctagtcttttttccggagagacacctggaaagtcatttttaccttcgcattttca

SEQ ID NO: 29784 - DNA, 1461 bp, Zea Mays
ctacaggctacagcgtacagggtatccgtcctctccgtttactctttcctcaccatcacatcgccgctgccgcgacccgcgggccgacgagatgagagccgccgctgcggcctccttccatctggcacccgccacgaaaccggcccatcgccgcggctgcaccacagagtcctgttccctgaagcctgcgccgactgctcggccacctcgcctccgctcgctcgccggccgggcgcctcttgtctgcgcctctctcgggatatctcatgataaagggttcgacatttctgaccccaatgttgttggacagaatgatttactgattgtgggccctggtgttcttgggcgaatcatagctgagaagtggaaaaaggagcatccaagttgcaaagtttatggccagaccgcaagcaaaaatcatcacaacgagttaacagatcttggcatcatcccctcattgaaaggcaccactattcatcagaaggttccacatgttattttctgcgctcccccgtctggttcagatgattaccctagggatgtcagaaaatgcgtgcagattggcagcatcaaattggactggtgaaggatctttcctgtttacatcaagtacagctctgtatgattgcagtgacaacagcatgtgcaacgaggattgtctgtcagtgccaattggcaggagccctcgtactgatattcttctaaaagtggaaaatgttgttcttgaggcaggaggctgtgttctcaggctggctggactttataagatagacagaggtgcacatgttttctggttgaggaaaggaactttagacacacgaccagatcatatcatcaaccagattcattatgaggatgctgcctcccttgctgtagcaatcatgaaaaagggactgcggagtcgaatatttctgggttgtgacaacaagcccctttccaggcaagaaataatggatgctgttaacaatagtggaaaatttgacacgaagtttggaggctttactggtactgacggtccattggggaagagaatggagaattcaaaaactcgggctgagatcggttgggaaccaaagtatccaagcttcaccgaattccttggtatcagcagttaacatccttgcatactgttcagttagtctgactcagctgagtagcaaccgtgattagattgtaccatcgtttgaatttttatggcctgaaccggtgatggtgtacatctcagcctactttgggcctgtccccagtatttttgattttcacactatttgagctatgaaccagacagatgccaccccatcccatcggataatatatattgtcacgtgagtggatttgtcgatcatgaacctacgtggctacatatggtatactctaccgactatcgcgctgcaaattgatttcaacaaactgaaattgttgcagagaattgacagtcaactaccgaataaacgaataatc

SEQ ID NO: 29785 - DNA, 854 bp, Zea Mays
ttagtttttacccattggcatcgcccgtctgtactgtacaacatccgatccgaaacctagcaacacccccggacagacgggcgcgaactcaaaccctagaaacggtagccatggattcgggaggcggaggagggagcggcgcgcacaaggcggcctcgggctccgcgccctcgccggcgcctaaccccacggcgatgctttcggcgctcatgagcaagcgcgccaagctccaggaggagctccgctccatcgagcgccaggtttatgatatggagaccacctacctacaggagactaatcaatttggaagtgtgctgaagggtttcgaatcttttttgtcatcctcaaaaaacacctctaagctgacgagaggttattctccctgtcatccgttacttctccagcggttgatgaacatttggctggacgagatgatggaagagagtatggagcaggtcgttctaagggtggaagcacccctgcgaacgggcaaggcaaaccgaagaagggagggcgccctggcgggcgagacggcaagagactacggccgtcgaatgacccagacctggacgacgaagatgactactaactcctccatcatgtaggcctactgtagcgggttaacttcaatttagcgtctagcagcacatgattctttacgaattgcttcccttctcgtttgttttgcttggttgcatcttcgcttccttccccaactcttccgatttgtaatataacataggtcaatgaaaattagccagattgttaaaattttgtgcaaactttgttctcagacggtagctttttctggatttccgagttaatatatcttcgttacatccttgaatcctagt

SEQ ID NO: 29786 - DNA, 2385 bp, Zea Mays
cgctcctcgccgccgcacgcccgcaccgcaccatgctgcatctccttctgctgtcatgctgtgtgtagtgtgtaccacgaaacacaactccaatccagaatccacgcctcccaaagctctcctactctcaaacaccaccatagcatcggttcgccattaaaccggtcacctcgcctccctggcgctgcccctcttcctctccaccgcgttcgaatcccatgggtctctgtttcagcaagaagcagcaagagaagcgccgagacgtgcagccatccagtgacgccaagaagagcggatgccggaaatccggcagggacaccgtgcttgtcgccgatgccaagaaggctcctcaggcaaaggcgccagcacttcccaagaaggctgtagccaggccggaggaggcaacagctgacaagaggaccgtgttcgtcgtcaaggccgcggcagcggcggcggccgccgaggttgcggccgccgcgaagggaagacccgaggatgcgcaggcgaagagggcggcgccggaggaggagctgaggcccggcgctgtgggccgggcgccagtgcggacgtcgagctgcaccaaggaggagttggacgcgatcctgatccagtgcggccgcctcagccgtagctcgtcgtcgtccgggaaggcgccgtcgggcgagcaccggaggtacgccggatccaagcggagctacgacttcgaccacgagaggaggggcggtggcggcgacgtcgacgaatgcgattggggcagggagggggccgcggtggccaggccctcaccgcgccggaggtcgccagaacggaagcgctcgtcgagccacgatggccgtgctggcagcgggagcgggagccagagccggaggattagcaggtcaccggggcggcgagcggacgtcgttcccgccccggggagctccgcgaccggcgagcgaggcgcgaggcagcagccgggcaagatggtgtcggtcccggccagggagaaggggcgcgcgccgtcgcccgtgaaggctgcttcgtctggcaagaggtacccatcaccaaggtcaaactcgcccgcgagggcagcggcctcgggtaatgagaatgccggggtgcagtcgacgcacggtccctcgctgagccgcagcacctctaggaaggccgagcagtcgccgttccgtcgcaaccccatggcggaactcgacgagaacacgctcggcaaccaccaccaccataacagcaacggcaggcctctaaagaccgcggagcggacaaaggatcagatctccagctgccgaactgcgaaggagattgcggatgaggccgtggcttcggacaccaaagcagcgcctgcaaggatgaacgcgacccactcggtgagcattgtggccgagaacgtcaccaatccgaggccggggagccggtcgtcgaggcgctcctcacgcgacttcgagcacaatggcaacacctacgcatccctgttactggaggacatccagaaccagcagcagcagagcaccagcgctgccactgtcgctgcagcgccgaccttcgcgcttccggcgtgtgtgtcgaaggcctgctctatccttgaagcggtcgccgacctcaactcctcgtcgtccgagaacaagaacttcgagctggagaggtcggtcaacgataaggaatccgtcaacggcaggtacggcggaaagggtgcggtcaccctcgtgatggagtcggaggtcggcgtgaaggacgatctcatggagccgagcatgcacaagtacgtctcggtgcgtgacattcgtggggagaccgagccgcaggagtcagcagggagcaacagctttgccggcaacgcctggacgtgctcgtgggagcccaattccgtcgactccgcagaccggacctggacggcctcgcagtcgtacaacggcgacgaggtggagcagtcatggcagagcaagcagaagccgtcgtcatccaaggagcccagccacgttggttctactagcgatgttcaggtccagcgcgtgcggggtgctcaccgcctccgcggcagcagcagtgctgtcaacggccagtccgatgttcggggtgtctcggcgagttcgtcgatcgcttaaggatgcaactggaggttttaggagtcatatgctccagttggtcacggtatcaagctgttgtggcaagataggttgctgtttcagactagtgtttaagcgtttggattctttgcttagtttgatgatatactctcctcgttctttttttatttatcacgttttagttaaaaataaactaacgaaaacgaagacagtacattgtttagatgtgatcaagcagtgatattggcaatgtatactcttccgttcacttgctaatgcttagcgtcagcaaacatatctgcacgta

SEQ ID NO: 29787 - DNA, 1023 bp, Zea Mays
cgtctgaagcatgcatcatgcacatcaattatatatggactacgtacgcagatgataaatgaggtgcgggaactcctgcggccggcggagatgccgggcttcttgacggactccaccgtccgccgcttcctccacgctaggagctggagcgcagcgcaagccaccaaggctgtcaaggaaaccgtcaagtggaggcgccagtacaggccggacgaaatccgttgggatgacattcctggaagggagcatgaggtgaagagagcgtacatagctgactacctcgacaaggatggccggactgtggtggtaacagtgccggcgataaaggttattataattaaactgcttgctaccggctgcacccgcagcatggcggtacggagagggaaatattaaacacaagacatatgttgattcgtccctagacggctagaccagttcatcataaagaggagagaggacccattgcatcgcaaatcgattcatcatatcacacagagagtgggggccgggtgattcgtagatagcttcagcacacatctcaaatccattcatcaattaatcatacagagatccgaccagggttaactattccgtttttcataatttctcgctaatcacgggccgggaacgagaaaaccggacggttttcgaaattcccggtggagaaatgctgtttcctactagctgggttttttccaccaagacacgatgcttgcttctctggtttttcgacccaaattcttgcaatatgtataggcattggaaattaagaaacgaaattcgggtttcttggccgagatcccatgtttttcggcgaaattcgttgtttttttaccgaaaatgaggtccggtaatgaatagtattttttttatttacctctaagcccattgctaaccttaaagtgtgttcgagcagagccaaatttcagcgaaggagcaggtgaaactactagtttacaccttggagagctgtaccgcgggctcagaaaacgggcaagaaagtgtgttggacctcgatga

SEQ ID NO: 29788 - DNA, 4165 bp, Zea Mays
ccgccgtccgcgcgatgcgctcgcacgtgccaccgccccccggcccgcgataccgtgcctccgctcgacgcctgcccccgatccctgcgattccagcgccgtcgccgcgcgcgatgcccgtgcacgcacccccaccccaatccccgcctcagcgccgctcccccgcccccacccccgtcctcgccgccccgctccacgctcgcgtggcgtcgtcatcgctgcgctctgcgcccgctccgcccccacccccacacgcgcacacacacctcaccccgcgtcgtcatccacagcccctgcatcgccaccatggactcggggttgaactggtagcccgagggcgcgggaggtgccgccggcggcggaggatgaggcaggcagggcgagggcggcgacgccggaagctcctggaaatggctgcgcgcgcggtggtggtgagaccgctggtccgtgccgggaagcgagaggctgagcaaggtgagcgggtcctcctcctgcggacggctcatggcagtctgccggctcgaacccgccggagcgcgccacggggcggtaaatctggccggacccggagccggcgccgtggctgctgaggtcgctacggtgtatggttggaccccgaccacgaccccgataggctgtcgggcgagaggctcatcatcagcttgcccgggcgcgcctcggtctcggtggcgtcagtgggaaccggcgaaccggacacgacggcccaccgcctccctctgcttcctcccgtcgaagccctccacctctgacacggcgaccgaccactcctccgactccgactttgccaccacgaacagcaacgaggacactgccatcctcggcatgacgggcgacggggcattcgcaatctccttcgccgatcgcttcaccgccagcgccagcgcagcattgttcgtagagaagaggatggttcatggtagcaaaagtatggcggtaccagaacaagggattccccctaatgttgttgaggatggggaacccttcaggcacaccagtgtgggcacttacagaggagcagatgttctttagaggcatgttgtgttgtactcttccacccactctctgccagtctctacacaggttgtggtggaaaacactcgtgtgggatctagctggctcttgtgcaattggtatgccacagctgctcttctcaccgtgtgaggacgagcacagtaaaagctaagcatttcttgattcatcctcccagcttcgttaattactatcaatgatgttgctgcatatttctttggcatcttctttgggaaaacaccgctgatcaagctctctccaaagaaaacgtgggaaggctttataggtgcatcaatgacaacattgctttctgcatttgtgctactcctgctgaaaatgtactaaccacaccttccatggtggagtgcagggcctccctgttggggcacgagatcgcccacccgtcgtctacaccagattatttctatcataccatcagatagtggatggacaaccaagcgtgcaccgtttcatcatttctgattctttcttagatgactaagataagtgtgaggtctgtactcatattctttccttttcttttcaatgcaggtatgatcttatacgagtggagattggcaacaaagatataaagcttgaatacttagtggaggcatttacaacttcaaatgagtaacattccttgatctgaaatgtgtacaataatcctgatgaactactaaaacacttgccttaatctgaaatgagtacaataaaacatatataaggaaactcaaataagtaaagtcttgcttgtccctcacaccataacatgactgatgaactactaaaacacctgcgaggtctgtcagcgtagcctcctcgacaccttctgcttctgctaactccggtgcaaggtacgccgctgccatcccaatccctacccccaggcaagctttgttgattgctttctggttgttgatttctgagctagctatttagaagtcaaaaattgggtgaaatctgattaaccaaactacctggttagaaatcaaattggatgaaatctaattaattttgatatgtgtctcctgagttcaaggatgtcttctacaataattcagccaagaacaagaagcgctaattggaatccaaattgtttgatgtggtgatatgatctggaacttggaccatctttatgctttatggggctaagaagcataagacctgtccgaggcaattgtatctcaacataatcagtttgatgggctccaggagttatatcatcagaaatgtttttttagtatttctatgtaccagcaaaatattgactgaatatttctaaccaggtagatccttgctatacttgacaaactaaaggaggaaagggagcaacaagaaggaaaatatggggaggaagatgtggatggttcatgtatatcagaagaagaagatggtgactgggatgtagatgagccagatgaggaggacatcatttacgtaaaatagcccattgtcttctaggaacttggtcatcattcatccagaacacagcaggtgtgcttctactgatcgaaaatacatcttccaaataactatgaggacttaaccaagcaccattcaatcttcatttgcttctatagtttgggttgcgttctgcatacataatattgcctatcaaggtagatttgccagagcagacttcgatcttcttaatctacctgacagtttcttaccatcatttgattttattgatggacatgttaagcctgttctagggagaaagattaactggatgaagacagggatcgttgagagtgatctggttctaacagttagtccacattatgttaaggaactcacttatggcccagataaaggtgttgagttggatggtgtccttcgcacaaagcctcttgaaattggaattgtaaatggcatggatgtttatgaatgggatccttcaacagataagtacaccagcgtgaaatatgatgcaacaacggtaactgaagcaaaggctctcaataaagagaggttgcaagctgaagttggattgcctgtggactcgagcatccctgttatagtttttgtcgggcgtcttgaagaacagaaagggtctgacatactcattgcagccattccagagttcgtgggcgagaatgttcagataatcgttcttggcacgggaaagaagaaaatggaggaggaattaatgcagctggaagtgaaatatccaaacattgctagaggcatagcgaaattcaatgttccattggcacatatgatgtttgctgggtctgacttcattattgtcccaagtaggtttgagccatgtggtctcattcagttgcaagggatgagagtttctagctcgctttgttacagttcagatttgagtgcgcattcccatctgttcatcacctggaggacttgttgacacggttgaggaggggtgtcaccggattccacatgggttctttcaatgtcgagtgtgaaactgtagacctagctgacgtgacggcagtagcgtcaaccatcacacgggcctagaacagtacggcaccccggcgttccaagaaatggttcagaactgcatggcgcaaaacctatcctggaaggggcctgcgaagaagtgggaggaggtgcttctgggccttggagtcgaggggagtcaagctggcatcgacgacgcagaggagatcgctccacttgccaaggaaaacgtagctactccatgacgcttggtgcctcggaaacacgcgttggtgataggaagcatcttctaggatcctcctggccttgtggctggagtgagttgttcagtcagacacagtttcgcctctacaacatcttcctcctcctggtggtggtccgaactccgaagcaaattccagtgataaaggatgaactaagaggtccatgtttctattgctagaccttttgcctcctaaatagacgatgtactgcgcttgtaacaagaacctcactttcgtgtcaagtaatatcaacaggtttcataatggtagtgaactgcactggaaaaacctgtaaacaatgcaaacaggattcaaaactaaaacaaatctgctattaaaagctgttattcaaaattgaaaaaaacaaaacctgttaattcagtattataactcagcaaacataaataaaaaaaaca

SEQ ID NO: 29789 - DNA, 4986 bp, Zea Mays
cttcttcctcctcgtcagattcatcgtcagttcaggcttcagctcgtcaggcgagagagagagagagagatgcccagctgcttgctgtcgtgtgatttggagctcgattaatattaccatgattctgctgcacacaagggacgacgatgccaagcaggatgaggttcgcatgatggccaccgctgaatcggacgacgacgccatctgggtaccgcctgatgaggcagcagcagcagcagacagcatgatgcaagatgatgatgatgatgatgatgattaccatgccggaaccggagaggaggatgacgaatccgaggacgacgatgatgctaccagcagtatctgcaggtggcgccatgactctgatcatcagtccgccgcccacagggaggagcggcagaaagccatgctgagagccatgaacgggcagctcagaatgctcgccgctcgctttctagagtcggctggcattgataccagcagctggcttgatatcgtcatctccctgtcctgggaagctgcccttgccatcaagcctgatgttggcactgctgtaggcaaccaaatggacccttcctcatacatcaaggttaagtgcctagcatctgggacaccccgccaatgtgaggtcgtcaagggcctagtcttcaggaagaacgtcgctcataagcacatgcccaccaagtgtcacaatcccaggctgctgcttcttagtggactcctcggccattcccatgttggcttctcatcgttcagttccatagagcaggagaaagaccatctggacaagtctgtctgcgaaatgatggagatctgccgcccagatgtcgtcttggtcgagagaacggtttcacgcgacatacaggagcttcttctcaaggaaggtgtcactctagtgcttgacatgaagctcaaccggctgcagagggttgctcgctgctccggcgcccccatagtctcgttttcagaggttctcagcaagccaaagctgaagcagtgcgactacttccacattgaaaaggtgacggaggagcacagcctgattacctgcagcgctggagttggaagcaggccatctaaaacattaatgttcctggaaggctttcacaagccactgggatgcacgatattgctaaggggagcaaatactcaagaactgaagaaaatcaagcaggtcatgaactacacagtgtttgcagcgtaccgcctcgttcttgagacatccttcttcgaagatcagagactaatcttgaacaataaggattcttccaaagaagaagtttctgtcgctaggaaggccggaccatcgtcactaggatcagtacaggaaactactgattccaatgctctaaatccactcgacaagggcttccctaatcaagcactactcccttctgaaggactagtagtatcagcagtcccagaatcacccagaagattcattgatatactccgttatcataatatttatttgccggtcacttcttctcaagaggcaactgatcatcagatacaagacagtatccatatcagcccaaacgttggagtaccaattggttctgttgagagtgtggatcatttaagcgatccccaggaacaagcatcctctgaaaccaatcagcaaatggcattggacggcccttcggttagtgaaaaacatgagcagtcattggaaaatattaaaacatctgatacagatgaggtggacgatgtgttggagtctcagagcatacttattttgctgtctagccagtgtatcacaaagcaggttatctgcgagcagagccgtctatcccgtataagatactacgggaattttgatgtttccttaggacgctatttgcaagacattttgcagaagcagaatctcagctgttcctcatgtggagagcctccagaggctcacatgtattcctacactcaccgcaatgggaatctgactgttcttgtgaggcacttgctgcctaaatatcgtttacctggtgaatcagaaggaaagatttggatgtggactagatgcttaaggtgtgaacgtgaaagtgggatctccagatcatcacgaagggtgataatgtcagctgaagcacactacctttcatttgggaagttccttgaactcagtttttcaaaccactcaaccgctagaaggctgtcaatatgcgggcattcactcaataccgattgtctgcgcttttttgggttgggctccaaagttgcaatgttccagtattcctcagtcgaaatttacaatgcctgcaaaccacagcctactcttgagtttcacaatcccgatatgcacgagtggtacgggcaagaggttcttgccacaggagttacacttttctcggaagtcacaagcgcactacagaagctcaaggatcagtttcctgttaaagacctttcccaacttgaagagatgttgattaaagagaaggctgagttcatggatcttctactggaactttatgtgtgggactgccggctgcaccaacttgtagattgtacacttgctgaaaacgcaatagtggcaaatggccaaactgcagcagccgctgaagcagacggaatcggtgagcgcatgagcagcatagcaccttttgagaatagatgtatcaaggaaccagagaagttcattgaagcagggactgcatcagccttgcttgatgatgcatggaatgataagcattgcaatgatcagcacaacacaaactgtgagtgtgacgggggggaagaaaaatggatttggaacccagtgaatgagtccagattggctttcaggcaggaagtggaagttggatgtttggaaaggtttgaggtcgttaaccactactgtccaagtcatttatcccccttgcacaaacacagagaatctggcgaggagatggggggatctccacagttcacagtaggtccaggtggcagtatcttgtgtgtatcagaggatgagatatccagtataatatcacgagctcttgctgtatccgaggaacgtcggcacttactgatggatgctgtcgctgagactgaaccagcagataccaccaggagtaaaacaatggacaagtcttacagctctttatctgaaagttcatctgcttctctgtggtcttcggattctgaggcaagcatttcgtctgacgacctctccagctatgatacctcgcttcttctatcgtcctctctccatccagaaatagctgtcaacgggataacagctctcaaagggaggtactcggtcatctgtgtacactctaaccagttctacaacctccgaaggaaatgctgcccatcggagcttgcatacgttgcctcattgagccgttgcaagaggtgggatgctcagggcgggaagagcaaggcattctttgcaagaacaatggatggcaggctcatcataaagcaaataaagaagacagagtttgagtccttcataaaatttgcgcctgattacttcaggcatgtcaaccattctctggacacggggagccagacttgccttgccaaaatcttagggatctatcaggtgaagcagacaagacatggcaaggagatcaagatggatctgatggtgatggagaacatcttgtttggacacaatgtgtcgcggacatatgatctgaaaggcgccatcttttcacgttatgtctccgacccaaatgaccatgctggcactgtctacttggaccagaactttgtggatgacatgcgtgtttctccaatctatattggtggaagagcaaagcatctcttggagcgggcaatctggaacgacacgtcttttctcacgtccatcaatgtcatggactactctttgctggttggagtggacaggcagaagcgtgagctggtattcggcatcatcgactacctgaggcagtatacatgggacaagcagctggagacgatggtgaaagcgtctctggtggtgcccaagaatgaatcgccaacggtgatttccccaagggattacaagaagaggttcaggaagttcatgagcaagcacttcctcacagttcccgacgagtggagcacggagagtcggccgccggtggcctgggagtcctgtgcccacgccggcgagttgccgggagtgaagccccagcatccaagcccaatcctcctggcgtgcgcttaattcaatttcacattctgatgctggcgaatagtgtcacaaatggaaggaggaaacgatgcttgtacgaagttccagtttactaccctcaccacacacgcacgcacgagtacatatataattctctcttcaacaagtgaagagaaggcctagcaccattgctaaaccttttcttgcttctcgtccacaacaaggggaatcatctccgtctgattccttgcttgcgctgttcctagactccctggggctgcagcctgccgctgcgagatcagatgcctcacgtagccatagaaagtgcaaccaaccagggtgattccacacccgattgcattcattgcagagattggattccggaagatcgaccacgacactaacactgccaccgcgactttaaggttgcctgcaacgttgaacgtcactgctgttgttgaatggatgacgtagaagatggagaagttaaggcagaacgcaagcacccccgaacctaggatgatagtcagcgcaggaacgatggaatcatgtgtgtagaaccagttcattacacctcctccttcaagcaccatcgctggtagagccagtatcatggtggcaaagggtgccatgtagtacaccgtgttaatgctgtcaaacttgtatccatggagtagggactctgccaagatggtctttgtagacgtagccaggcagccaaccatggcagcacagaaaccgaaaatgttgaagctaagctctgtcaccgaagtcaggagtattccgccaactatagggaccagcgaagcccatatgcgccactcgaaatgcttgctccagactagccactgcagaataactgaaccaagcaggagatgatgatg

SEQ ID NO: 29790 - DNA, 2075 bp, Zea Mays
ctcgctcaggcgtcatgacggagccgaacgcgaggagccgagtgttttatccccgccgaagcccatccccatttgataccagcgagcgcagacatcgccggggacgccatcatcctcggctgcctccaagaccggcccaccgttctgcctgcactcccactcccaaaccccatgatgaacctccctttccggctccgccatctccgacgccttctcgctgccccgcccttaccaaccctcgccgccacacactcccatagcccaccctccttccgaccgctgcaccccacccgaatccagccgctgcggttccatctacccaaccccccagtgcggcggctctcctccgagcacgcaatcctccccacccacctccaggacgagcgcttcgccacgctctcggataggatctatgatgccgtgattaagacggggacggaatccaacgagggcaccgaggccgcgctcgacgcgttgggcgctgagctgactacccctctcgtcgccgacgtgctgcaccgcctccgctacgaggagaagctggcgttccggttcttcgcctgggcgtcccaacaggacggatacagccacgaaccgacgacttacaacgacatcatcgacattctctccggcacgcggtacaagagccgccagttcggtgtcctctgcaacgtgctcgatcacatgaagcgccatggctcgaggtcggtgccggttgagggccttctggagatcctgcgcgcctacacggagaagcatctcacgcacatgagaaagctggccaagaagcggcgggttcggatgcgtacgccgccagagactgacgcgctcaacgttctgctggacgcgttctgcaagtgtgggatggtcaaggaagcagaggcagtgtttggccgcgtgaagaggaagttgctgggtaatgcagagacgtacagtaccctgttcttcgggtggtgccgggcgagggaccccaagaaggccatgaaggtgctcgaggaaatgattcagatgaagcacaccccagagagtttcacctacgttgcagccatcgaatcattttgcagcgctggattggtgtcagaggcaagggaactgtttgagttcatgaggactgaggggttgacggtgtcatcgcccacagccaaaacatattcgattatgattgttgcattagcaaaggctgaccggatggaggagtgttttgaactgctttcagacatgagaacttgtggttgtatgcctgacgtgacgacttataaagatttgattgaagggatgtgcttggtgggtagactggatgctgcttatcgtgtgttggacgagatggggagggctggatttcctcctgacattgtcacgtataattgctttcttaatgtgctttgtagtcttcgaaatgctgatgatgcacttgaactctgtgagaggatgatagaggcacactgtgagcccagtgttcatacctataatatgctgatgatgatgttcttcgagatgggagaggcacatagagcattagatatatggcttgagatggacaaaagaggatgtcaacgtgctatcgatacctacgagataatgatctatggtctctttgattgtggagaaacagaatatgcaactgctcttctagatgaggttataaaccgtgacatgaaactttcatacaagaagtttgatgctataatgctgaggttatcagctgtaggcaaccttggtgcgatacatcggttgtcagagcatatgaggaaattttacaatgttgcgatgtcgagacgatttgcaatcactcagaagaagaagagcataggcctgagaaggaaatgagtgccgtggctattgctgctgttgtttcttgttagttgttactgaggatattcaggagcttattcaaaggtagttaatgtatgccagcacgtattgttggaacagattacagtggaagaagcactgcattttttttaatgtaaaaaataggagtgttgcataaccccattcatttgttgaattgaaccggtgctgtgaatatcattgcatttgcattgtagaagaaacatgtacaaggttggtacatg

SEQ ID NO: 29791 - DNA, 3373 bp, Zea Mays
aaatcggtctagccctcccaccttcccgcgaaatctaatagtcggcggcgcgaagcaggagttctggggaaatttcgccggccgggtgcgagcagagccgccgccgccttcttgcgtgggagatggtgaaggagcgggaggagcaagtggccattgtgcgcatggtgcttggcgagggtacaccggagatggacatcatccgtgctctccacatggccggcgacgaccccaccaaggccattaacatcctcctcgacctcaacaaggctgcgccacctctcccgccgtcgccgtctccctttccctgtccatcgccctccccttcgccggggaaacccgccaaagccctcgtcgactcaaccccaccatgcaaagcccctacccggcccatgcccacggcagagaaacctaagtccactacaagcaacggtggcagcgaggagcactggtggctggtggggagcgccgagatggtggggctgtccacctgcaagggaaggcgaattacctcaggggacgtggtcaccttcagcttccccaatgccacaaccgccgtgggcaagagccgtccgagccgtcccgccctagcttcctgctcctccgagatcatgcgcttctccaccccgagccacggggaggtgggtcgcatccccaatgagtgggcaaggtgcctccttccccttctcaaagagaacaagttaaaagtcaagggctcgtgcaaatcagctcccgaggtgcttaccattatggacactgtcctcttgtcagtgagtatatatatcaacagctcaatgtttcatgatcaaaagcaatcgtcacccaaagcagctcgatttgctccatatgactccacatttcaccccctacctgcacttttcaaattgataggacttgctccttttattaaggccgcttttactccagaagatctttattccaggaagcggccaactgaaacaaagagcagtatagggtctcctgctgcaaagctgacatccggcagattgaggttgtcttctgatggaaacgaagatgatcatggtgaagaaactgtttcagattcagatttggatgatataattgggatctcagacagctgtgcactagaggaaagggctccccctgattctctgatgtgtgatctacgctcttatcaaaagcaggcacttcattggatgctgcagcttgagaaaggtagttcttcccaggatgccgctacaacccttcacccttgttgggaagcatacaaacttgaggataagagggaactcgttttgtacttgaacgtgttttcaggcgatgctacaactgaatttcctagtacattacaactttctagaggaggaattctggcagatgcaatgggactggggaagactattatgacgatagctcttcttctttctgattctagcaaaggatgcatcacaactcagaatgctgctcagacccctagagaagctagtgggttgggtgaatcgcatgatgctgtgaagaagcttgctaaccctttctcttttagcaaacacaagaaacctaaggccccacttattggaggaagcaatctaattatctgtccaatgacactaattagtcagtggaaggcagagattgaagctcatactaagccaggcactgcgaatatatatgttcactatggacaaaacaggccaaaagatgcaagcatcattggtcagagtgatattgtcctgactacatatggtgttgtgtcatcagagttttcaatcgatggttcaacagaaaatggggctttgtactctgtacattggttcagagttgtgcttgacgaagcacacatgataaaatcttctaaaagtttgatatccctagctgcggctgctctgactgcagatcggcgctggtgtctcactggtacaccaattcagaacaatttggaggatttatacagccttttccggtttctgaaagttgaaccatggaggaactgggctttgtggaataaacttgtacagaaaccatatgaagaaggtgatgaaaggggcttaaagctactgcagtccattttgaagccaataatgctgagaaggactaaaaattgcacagacaaggagggcaggccaatccttaatttaccccctgcaaacattgaagtaaaatactgtgttttatctgaggctgagaaggatttctatgaagctctatttcgaagatctaaggtaaaatttgatcaatttgttgagcaaggaagggttctgcacaactatgcttcaattttggagttacttttgcgcctaaggcaatgctgtgatcatccattccttattatgagtcgtggggatacaaaagagtatgcagacctaaacaagcttgcaaagcgttttctgcgtggtggtaatggtgctgttaatggtgattcttgcatcccctctagagcttatatcaaacaggttgtccaagaattgcaaaaggatgaaggggagtgccctatttgtcttgaagcctttgaggatgcagtattaactccctgtgctcatcgtttatgccgagagtgtctcttatctagttggcggagtgcgacagcaggcctttgtcctgtctgtagaatgtcaatgagcaagcaggaccttataactgctcctactgataaccgctttcaaatcgatgtcgaaaaaaattgggttgaatcttccaagatatctgctctcctgcaggagttggaagctcttcgcagttcaggcgccaagagtatcgtgtttagccagtggactgcttttttagatctgttgcaaattccactttctaggaataatttctcatttgctaggctggatgggacgttgaatcttcagcaaagggagaaagttataaaggagttctcagaggacaaaggcattttggttctgcttatgtctctgaaggctggaggtgttggaatcaatcttactgccgcttctaatgcatttgtcatggacccttggtggaatcctgctgtggaagaacaagctgtcatgcgcatccatcgaattggtcaaacgaagactgtttctatcagaagattcatcgtgaagggcactgtcgaagaacgaatggaggctgtgcaggctcgaaagcagcgaatgatttctggagctttgactgaccaagaagtccgcactgcacgtatagaagaactgaagatgcttttctcctgagactacaaaagggctgttgtgcatcggatggtcggcaattcggcatggctaaaacaagatggctggtagccagaatgttggaaggatagagaatgaaataggagatacaggctataagctccatgagcttttcccctccaagcctggttgattacagaacagccatgtctgtggagagaataagtgcaggtgcatgacga

SEQ ID NO: 29792 - DNA, 690 bp, Zea Mays
cgaaggagtgaagagttttgttcgccgtgcagtttaagatgtcagaagcacttcagaaagataaggaaattggtgaagaggaagaggaagaggagtatgtattgttagagttggacaattgtctttattcagacatatcgcctggtgctcagttcgtactctctggtttggatacattgacgcctaccttgatagtaggtgacaatctgaagatggtcggggaatatgatgaaactattggcacctgctatctattttctgaaagtgaatctgatgcagtgttattacgccgcttctgcttcctgagaaatggcatcatttgcacataaaacttccattcttgaatcatgtcacaagaaactgaaccaaaacctgcaagtgatgagctggcaccttctaaagaaaacacagaaacaccgcttaacagcagtaaggaagcgcccttgaaggaggtgaaccatctggccagcgttcaaaagatcctcaaatttaagccaatcaatgtggagcactcgcagcatcgagcatatcagcacaaggacaaggaactttagaggaaaaaaaatacctgctgttttcttcagtcaatgcattcagtgtacagttttaggttcattgaaatgaggtgggctgtatacttgttgaatgttgagttcatctatatatatgagctactatatcgatctgctt

SEQ ID NO: 29793 - DNA, 2805 bp, Zea Mays
tgttttcttgtggttctcgcgtgctactgtgctgagaggggaccaggaagaatccgtcgtccggccggctcgctctctgccggccatgacgagcgccaataaggcgaagctccagctgcaggagagggtcccgctcccccgcacggcgtggaagctggccgacctcgccgtcctttccctgctcctggccctcctcgcccgccgtgcgtcctcgctggtgtcgtcgggcggcacggcggccgcgtgcacgtggtgctgggtcgccgcgctcatttgcgaggcgtggttcacggtggtctggctgctcaacatgaacgccaaatggaaccccgtccgcttcgtcacgcaccctgaacgcctcgccggatattgggcgggcgacgacgagctgctgccggcggtggacatgttcgtgacgacggcggacccgaagctggagccggcggtggtgacggtgaacacggtgctgtcgctgctggcgctggactaccccgcgggcaagctgtcgtgctacgtctccgacgacggctgctcggcggtgacatgctacgcgctgcgcgaggccgccgagttcgccaagctctgggtgccgttcaccaggaagcacggcgccaaggtcagggcccccttcgcgtacttctcctcctcctccggcggcggggcggcggagcgtggcggtggcggtggggccgccgacgccgacgccgagttcctgcgcgcttggacgtccatgaagaacgagtacgaggagctggtccgccggatcgagagcgccgaggagaagtctctagtccggcgcggcgacggcgcgttcgccgagttcgtgggtgctgaccgcgggaaccacccgaccataatcaaggtagagagatgaactgatgctcgtcggtcgagcactgcagcacgcagcgcgtgtcatcatggcatagtcgtgtgtgacgatcgtgaatcaccatcttctgctggcatgcgcgagtgctcggcaggtcctgtgggacaacgacagcagcaagagcgagagcgatgagcaggcggcaggggatggagtcccaagcctcatatacgtctcgagggagaagagccgcacgcagccccaccacttcaaggccggggccatgaacgtcctggtatatacgagggtgtccgcggtgctgaccaacgcgccgatcatgctgaacgtggactgcgacatgttcgccaacaacccgcaggcggccctccacgccatgtgcctcctcctgggcttcgacgacgaggtccacagcggcttcgtccaggcgccgcagcggttctacggcggcctcgcggacgaccctttcgggaaccagatgcaggttatattcgagaaagttggacacggaattgccggactccaaggcatattttactgcgggacgggttgctttcaccgcaggaaagtcatgtacggcgtgccaccgggctccggcaccggcgccaccaaagcagattcaccgtcctacaaggagctacagaagaagtttggcagttcgaaagaactgatcgagtcggcgaggagcatcatcacgtcgaaagaagcgccagctgcggtggcagatctaacgagccgcgtcgaagtggcgaagcaagtctctgcctgcagctacgagacgggcacgagctggggtcaggaggttggctgggtgtacgggtccatgaccgaggacgtcctgacggggcagcgcatccacgccgccggctggaggtcggcgctcctgagcccggacccaccggcgttcctcggcggcgcgcccaccggcgggcccgccagcctcacccagtacaagagatgggcgacgggcctgctggagatcgtcctcagccgccacaacccgttcctcctctccgcgtccaagcgcctccgtttccggcagtgcctcgcctaccttgtcatcgacgtgtggcccgtcagggcgcccttcgagctctgctacgcgctgctcggaccctactgcctcatcgccaaccgctccttcctgccaaaggcatcggagcccggcttcgtcgttccgctggcgctgttcctggcctacaacgcgtacaacctgggcgagtacgtggactgccggctctcggcgcgcgcctggtggaacaaccagcggatgcagcggatcacgtcgtcctccgcatggctgctcgcgttcctcaccgtggtcctcaagacggtgggcctctcggagacggtgttcgaggtgacacgcaaggagcagcagcagcagcagggctcgcccgacggcgacggcgccgacgccgacccggggcggttcaccttcgactcgtcgccggtgttcgtcccgccggcggcgctcgcgatgctgagcgtcgtcgccgtcgccgtcggagcgtggagggcggtcaccggtggcggcggcggcccgggcgtcggggagttcgtgtgctgcgcctggcttctgctctgcttctggccgttcgtgaggggcctcgtcggcggcaggggaagctacggcatcccctggagcgtcaggatcaaggctgccctgctcgtggccgcgttcgtgcacctgtccacacgcaagtaacttgcccggccccggcgtcgactcaccactgctactgctgcggaaggttttcatgtcagagacccgtaataatgcagacaacagcatgttccgcctaagatttgtacacaactctctgcttccactgcttgtatagaattcttgctcaagattacaagtcgaggccagtggtcggcgatagaaacagcgagtattattttatcctactcccaccagttcctgagcgtcgattctgggccgcgtctga

SEQ ID NO: 29794 - DNA, 1011 bp, Zea Mays
cctcttccccacacctaaagatccgaatctagggagcgggttccaccaccccaagattctcgtggcgacctcgcaacaacctttttcagctcttcccatctcttcggttgccgaatctctctcgccttctctccttgaggcttttataatcagcctgttcttggttcatctcgtttctgtggagtggagacaattttttcgggtgatagatttcgtctcagaaactcttaaactaccgttgctttctacttgctcctctgatttgcgccgagaaacaaccactatataattatcagcgatttctttcgttccactcgatccaaccttgttgatttcctttaaaggcagcgcctttgccaatctacttttgttgagacagatgtctagttagttcttgaagaagataaggcttcctcgcagattattctgttgctttactttgattttgtcagttttgccctcaatttccacccggataggacccgagcattcttttatttctttctttccccataatggccatgtcgctgagccgcttctcccagtggatatggccggggagcagaactagaaatcctagaggccgcgagccaccggcggggagcacggccttgacggaaggcctcttcccggactccccgtcggggttccgggatccagaccctggttctggcgcggcacagcggcgtaagggcaagagccgccgtcgcggtggccgcgtggaggcgaaggtcgatggcgagcacggcatggttatcgtgcagtccgacggtgacggctgcctgtctgactcggactccgacggctccgactggtccatcggctggctcgagccgctcgcgccggacctccagagtgacgttgactccgagggaagcttcgccgtcctcgtgcggtgctatcgccgcggccgcgctgaccggcctgaccgtcctgatggcaagttccctgctcctggtggtgtcgctcacggtcacggtggtgtttctgtgtgcggtgttccatgttcca

SEQ ID NO: 29795 - DNA, 1360 bp, Zea Mays
tgcccagggcgagttaattaatttggtcctggtgcatgcagacgctcgcagccagatggagtctggcgaccattaaaaagcacccagaaaggcgtctttgttgctcgtagctctctaccctttttcttttgctgctgcttgtctctcgttccttcttctgggtgctaggagtcgtcgtcttcttcttccacgggcacggataaaggagggagagcacacacatccgccatcgtcgctgcttcacgtacgacgagtattctgtattcatggagcagagccagggacagggagggaggaggcggcagatcccggcgttcgggaggtggaaccagcacagcgtcggcgacgaggtgcccatcacgcagtacttcgagtcggcagtacaggccagcctcctcgccaggcccggccactgctaccacgacgccggcgccggcgaggtgctgctgttccggtcgtccgcctcgccgcctccgcacaagccgcccaagaaggtgcggagcacgacggagtgtcacggtcaccaccagcaggttcaggttgaggaggtggggagcaggaggaggcagcagcagcggcggcggcaggagccgttgccgccgttcgtgtccggcgacgtgtcccgcgcggcgaggccgagggtcgttagggcggcggtggacgaggacctgtacaaggtcccttccgatatgctacgcaagaagaaagggaggaagcatgtgaggagcgtgtggatgggctgcgtgggcctcacctgcgtcgcctgacatgaccagtagtagcctttcttccacctttatcggatcgcgtggatggcaagaaagagagtccaagaggacgacgacccgaacccgaccacaagcatccaaaagccgaccccgaatgctagccgtttcagtccattcaatggtgatcgtcagtcaccaactcaccacgttgagcacagggatgcaagcaactcggtatactactgcaccacctcgtgctccatgcaccgtcgtcagtccgtcgcggctgagcttttgttccgccggacacagagatgcaagcccgtactgcacatcgtcgtggacaacacaagagctagtacgtacgtgatgcctgccgtctatccgatctgtggatgggtagctgatgagttcttcatcgtgtcattgcgcgcgcgcgcgagttgtccatatctatgtatgcattcttttagaaatggatttggcttcaatctgtttgggaccaatatcatcactcttggttatctgttaaggaaccgaaatagttaaattgataaaaccttctccccatgtcctctctattagattctatggcgtctaggatttctaagcccatagaataccaatccgta

SEQ ID NO: 29796 - DNA, 2512 bp, Zea Mays
atgcacccacgccccgtctctttgaagccgcccgcgtctccacccgagaccccgacccaccccgccctcccccgccgtcgcgctcgcgctcccccgcgacagccgccatgcgccctatctccgccatgcctgcgcctcctcccccgcccgcccgagaaccaccaagtttcccttccttacacagcgaggtccaccatcaacgcccccttccctggcaagccacagccgtccacgttcctggccaccagcgacctcccttctctagcccttagcagcgagcaacacctcctccccatggctgcccccagaccccagtcccgtccgcgcatccgctcccccgtcagcgacgcacctattctcctcgacgtcgcccatggcgtggacggcgacctccctcaccctgcactctggtatgtcaccgtattgcccgcctcctttccccgcaccggcgcagccccctgttgcggcggccccttccccaaacagcacggcaccacgtgctccccctgccgcgcccgcactctccttccccaaacagcacggccccacgacgctcacactctccttccctggcgatatcccctcatctgcgccttgtccctcggagatccccttccatcttcggcaccgagaggaaaatggatggcaatcccatccatcggcgccaaaccctacacatcctccatagtaggcacccgcccctccttacgcggcaccatcggtggggatatcccccaatctgctggaaggagtccgcgccaaatcagagcccgaaatccgtgccaaatccacgctggatgaggtggtggggagaccccccaatctgcgtcccttctacatgcctacacatcctccatagaaggcgccctcctactaaccactaaaaaaccccttccacacgctgacaactccatatatattagtccaaagggagagcacgattaaggccacgcctaccagcttcaccctcctcgcatttgtaagtccaatttttagatttatgatttcagatgttgagttgattttgcaaactggtaagtgttttgtttcatacggcaactctgcacatggacagaatcacagctctgttagcgttgttttatcaagttcttctagcagttgaagtagtgttttcttggcagatgttcgcctttaggacattgctgcgaggggaatcggatatgccacaggctgcatgttgttggagtttctatgtatccccatatcaaatttgtttttccctaatcagggaactcaattgtgcgagtaatagcaggagctcttccgaaaggccttcacatgttaatcctatcgaagaataacatatcaattattgaacgcctcagagaattgacacgattgcgcttgttggatatcaactataataggatatctagaattggccatgatcatctgttaggattggcctcatgttcctctttgaaggagttgtatctggtcggtaacaagatcagtgaggtagatggtcttcaccgacttctgaagctcaaggttctggacttgtgccacattcagtcttctgtagccactatacttggggttggtgaggctggtggaaggtttcagttcttctatacgtggaactaacctataggaggccagactgctagagcggtagagccagaaagtaatagttggtgacttggcggggacatttatgttatgctacctaattattaatctgtggaaaaggggaagcttttggagtagagcttattttttgttcgggttactatttcctctaattgtgtgaaaactgaaaagtatggttcgtgtctgaaaagcaatagttggtcgaggcatatttttgtatggttccactgtactaccttctatctggtgaattagatcccgattctaaataagttgctctctaatcagattaaacactttaatgtagctggcaattgcttattttgcaggtgcagaggatgctaggaaaatactcaataattatgtgagggttttaatttagttgctagctcgatgaaagactatgattcgcaagactggatattttcctgcttatgaagaagcggtggcaaccaaattttcgaaaaagtcggggccattactcagatggtaaacaaacttgggccatgtaaatggtcgaccttgcctaaactatacctggacgtattggaaagcaatgctgggaaagctatgccatgaaagatatttgtagcagtgttacatgatggcatcaagtgctgggaaaatatttattaatttatggttttgtttctatggaatataggagtcatgattttgtgcatttgatcagagactacattaactagaggatactttctttttttcaaaattacaaaaacaatactaagtgtacctattattgtctactcgtctcatgatgattactatgtagataaattctctaagctatgaacagtgaccaatgaaatatattcatttgcatacagttctcaaactaatgtattcacgtcattatatattgtgccagctttgtcaa

SEQ ID NO: 29797 - DNA, 1504 bp, Zea Mays
acattttacggccacaaaaaatgtataaaataggaaatgggaaaaccccatcacagctccacgcctccactgctatccctctcttcctctctgctttccccttccaatggaatcctgtagcttccgtgccgcaaccgcgccttctccctttccctccgctccttcttcatcttcatccccgcgcgccccatgccccatactccgatttcccgccaagaaaagggaggcagattggggtgcggaggagggcgtccggatttgatgccttcgcgtctttcgccggcaaggtcttcgtggatgaggcgattggagcggaatatggggagggcttcgaaacatttcgaatggatggaccactcaaggttgatgtggattatctgaatgaaaaattgcaagagtgcttccttcaaaggataaggcatgctatgaagccggatgaggcgtttggtctaattttttcgtgggacaatgttattgctgatacagactcgctaaagttgaatgcttggagacaacttgctttggaggaaggtaaggatatcccaagtggtgctcatgtccggaagagcattattcatggtgctgctgaccatgttcttagaaaggttttgtactgggcaaaagaggaagataaaatggaaaaattgaaggcacgccttatagagttgtactacgagaacctgttcaaactcgatacacctgtagaaggattgagagaatggctggatgctgttcagacagcagggataccttgtgctgtcgcatcaccccttgacaggagatgcatgatcgaagctttggatcggatggcgctaagcaaatatttcaaggcgatcgtgactgacgaagatgatatggagtcgatagcaaatcgatttctgtcagctgctatgaagttggatcgtaaaccctcgaagtgtgtggtgttcgaggatgacccaaggggcgtcacagccgcccacaactgtacaatgatggcagtcgcattgattggtgctcatccagcgtatgagttggtacaggcagaccttgccattgcaaagtacagcgagctctcagtgatcaacctcagaaggctgtttgcgaacaagggaatcagcttcatggacttgcagaagcagataatcgagaagtcacctcccaagaggaggctgacagtagacaccattttctgatagatacacttttatttggtgtctgcctgttgttcttgagtagccaacaaccttcggcattatggcggtggcgttgtatataagatagtgctgatgttaggtgatccgctgtgtacctccttgtgaatgcaatgcggtagttccatcaaggtaccatgaggaagactgctgcaacaatgttgttgctgatgtaagctgatattattcaaatttattcatatttcatggtcgatatctagctcgtcgacatcttgtctgaccaggcctgctagacgggaagcctgcctccagactccacagtccaaatggcccatcagggaaaaatatct

SEQ ID NO: 29798 - DNA, 1679 bp, Zea Mays
atataaaactatattagcttaattgttctttatctaaattattattattagaatgaaatttaaggatccaaacaaagctattttaatatcctgggtctatactcaactgagttagttaaaaaaacataaaaataagacatttttaatattttaatcctattttttcatttggtaagttaacaaacacgcctgtcacgtgggtccatctgtcggcctataatctttccatttctttcttctctctccttactcggttcttcctactcccgatccatccgcagagggcggtgtcggcctcctctccacccgacagcttggccggcgacgagcaccaccaggacaccagatttgactattttatgagttcacaagccacccagcatgaagtttttagaatacacccccttcgacagtataaatttgttcctcgagcagctcgaccttggtgattgtacaatcagagggaaccttgaggccttctcatgcaagcacactgcgacagaccgccggctttcaataagcctagaacatgagattcttgattaccttggcaagtcctctgatagtgacccgtcttcaccagtggagcacttggcctccagatcaagccggaaaacattgatatatctagttctcactcttggccacatatatccagattatgatttcaggtaatattgtctttgtagcaagtgtgttctaatattatctgggaggaaggatattgggtaatgccatagtcagctttctctgggcgatatggcaaacccgcttttgtcctttccgaccagcctaagggggtgttgtcagatggtatgacagacggattaataaccgttgctctttgagctgagagttcaattctctccatttcccttggtctttggtatttgatatatctgactttcttaaggtctcctgactatcatgttacacattcatgatagcacgaccttcagattaaatttaacatccttttgtcaacatctgttcacttatcagtgctgttcgggcacacttgttcttccaagaagaggagttggaaagtttcaagcagatggtagacacctacttatctgatgcctctaggcaatgggcagccacaaatgaaggcagttctcttctggacagtatgactaaagcaattgatgaggttatcaaaattaaagagtgtgacatctacagctataatccagactctgacgcagatccagttcttgagaaaggggccatatggtcgttcaactactacttctacaataggaagctaaagcgagttgtgagctttcgatgttactgcactagcaaattatcaggagatgacttcttaaccggtgttgcgtctgatggtgaagaggaagatgccttgattgacatggacatatgactgaccgtgttctgctagctacctgatgtgcgtataatatagaacatgtatgctcattcctggtagggaactttcaatatgacgcacttttaccgtttcctgtaaaaaccatggcacggtttagctttgtctgtatatgcggatttgagatttggtggcgggaaacttccaatcccctaggcttgaactgccacggtaattcggtactctgttgtttgctagacctgcaatgaataatgttgcgccaactgaattgttcaatttgatcaattgtgaattcacctctctggaa

SEQ ID NO: 29799 - DNA, 438 bp, Zea Mays
cgtcgccctctttccggcccaaccacgaaccactcctcctacagaaatcacctgccggcctggcctttccgtagctacaaccgaagccaccaccagcagtccagcacgactagcggaataatatccaccggcgacgggaacgggaggcggcgcggccggagattcgaagcgatggcgttcacgatgcgggcagtgaaggtgcctccgaactcggcctcgctggaggaggcccggcaccgcgtcttcgatttcttcaagcaggcatgccgctctatccccaccgtcatggagatctacaacctcgacgacgttgtcacgccctctcagctccgctcgaccatcgctaaggagatccgtaaaaaccagaacgtcaccaaccccaagtggaatccgacatatgttcggttgattggggcttggaatcgttcttgattgccg

SEQ ID NO: 29800 - DNA, 3362 bp, Zea Mays
atatcactcgtgtgctcgcaaacaagcgtccgagttggaggcgtggcggcccgttttgcatgccgtagctctcccggtgttcctccccttccgaacccctcgccgcctctccgtctcgtgattcgaatcactgccccattgcgaacgagccgccacagctgctgccagcctcaaggaagggccccggttcccaatcccagacgggccagcggatcgatcgaacaggcggccggccactcgggatcgggtgggccggggccgcggcggcgcatgagctctgacgccgcgagggggcagcgcggcatcaactgcacgaggggcgacgcggcggcgatgccaacctcatcgccctttgtcggcgacagcggcggcgcgggctccccgatccgcgtcgagcgaatggtccgcgagcgtagccgccgctacgacatcttcgcgtcggacgcgatggataccgacgccgaggcggccttcgcgctggatggggtccagtcgcctggacgtgcgtcacccgccaacatggaggatgctggcggcgcggccgcagcgcgaccgccgctcgccggctcccgcagcggtttccgccgcctaggcctccgtggcatgaagcagcgcctcctcgtcgtggccaaccgcctgcctgtatccgccaaccgccgcggagaggaccactggtcgcttgagatcagcgccggcggccttgtgagcgccctccttggcgtgaaggacgtcgacgcgaagtggattggctgggcaggcgtcaacgtaccggacgaggttggtcagcgagccctcactaaagctcttgcggagaagagatgcataccagtgttcctggacgaggagattgtgcaccagtactacaatggatactgcaacaacatcctgtggccactgttccactacctaggactaccacaggaggacaggctggcaacaacgaggaactttgagtcacagttcgacgcgtacaagcgtgctaaccagatgttcgctgatgtcgtgtacgagcactaccaggacggggatgtgatctggtgccatgactaccacctcatgtttctgcccaagtgcctcaaggaccatgacatcaatatgaaggtcgggtggttcctgcacacgccgttcccgtcatcagagatttaccggacactgccgtcccgcttggagctgcttcggtcggtgctgtgtgccgatttagttggatttcatacttacgactatgcgaggcattttgtgagtgcttgcactagaatacttggacttgagggtacccctgagggcgttgaagatcaaggaaggctaaccagggttgcagcgtttcctattgggatagactctgatcgtttcaagcgagcattggagcttccagcagtgaaaaggcacgtcagtgaattgacagaacgttttgccggtcgaaaggtaatgcttggtgttgaccgacttgacatgattaagggaattccgcaaaagattttggcctttgaaaagtttcttgaggaaaacccagactggaacaacaaagttgttctactgcagattgctgtgccaacaagaactgacgtccctgaatatcaaaagctaacgagccaagtgcatgaaattgttgggcgcataaacggtcgatttggaacgttgactgctgtccctattcatcatctggaccgatctcttgatttccatgccttgtgtgctctttatgcagtcactgatgttgctcttgtaacatcactgagagatgggatgaaccttgtgagctatgaatatgttgcatgccaagggtctaagaaaggagttctgatacttagcgagtttgctggggcagcacaatcacttggagctggtgccattctagtaaacccttggaatattacagaagttgcagactcaatacggcatgctttaacgatgccatccgatgagagagagaaacgacacagacacaactacgcacatgtcacaactcacacggctcaagattgggctgaaacttttgtatttgagctaaatgacacggttgctgaagcactactgaggacaagacaagttcctcctggtcttcctagtcaaatggcaattcagcaatatttgcgctctaaaaatcgtctgctcatattgggtttcaattcgacattgactgagccagtcgaatcctctgggagaaggggtggtgaccaaatcaaggaaatggaactcaagttgcatcctgacttaaagggtcctctgagagccctctgtgaggatgagcgcactacagttattgttcttagcggcagtgacaggagtgttcttgatgaaaattttggagaatttaaaatgtggttggcggcagagcatgggatgtttttacgcccgacttacggagaatggatgacaacaatgcctgagcatctgaacatggattgggttgacagcgtaaagcatgtttttgaatactttacagaaagaaccccaagatcccatttcgaacatcgtgaaacatcatttgtgtggaactataagtatgctgatgttgagttcggaaggctacaagcaagagatatgctgcagcacttgtggacaggtccgatctcaaatgcagctgttgatgttgttcaagggagtcgatcagttgaagttcggtctgttggagttaccaagggtgctgcaattgatcgtattttaggggagatagttcacagcgaaaacatgattactccaattgactatgtcctgtgcatagggcatttccttgggaaggatgaggacatctacgtcttctttgatcccgagtacccttctgaatccaaagtaaagccagagggcggctcagcatcacttgaccggaggccgaacgggaggccaccatcgaatggcaggagtaactccaggaacccacagtccaggacacagaaggcgcagcaggctgcatccgagaggtcatcctcatcaagtcacagcagcacgagcagcaaccacgactggcgcgaagggtcctcggtccttgatctcaagggcgagaactacttctcctgcgccgtcgggaggaagcggtccaacgcccgctacctgctgagctcgtcggaggaggttgtctccttcctcaaagagttggcgacagcgacagctggcttccaggccacctgtgctgactacatgcatgttcttggataggcagtaaatagactgaagttgaagcctccgtgctttaccagagacagagagaagaagaatattcattcctcgtatgcgcgacagagctacacccgtagctagtcagcgtgctgtacaatcatgtacaaaatttatgctcgtgataaaactgcgagaggggagctagcaaatgggaaaggataaaggagtttagttgcttctggtacgag

SEQ ID NO: 29801 - DNA, 3379 bp, Zea Mays
ggcgtccacagggggcgacacccgtgaccctgcccccgttcgacatcagcgctcctccccccgaccaccgtcgatttggtgtctgagccctcgctagatctcgcaccctcaccgaagccctcattggattcgacgccctcactggaggttgcaccgcgatgggatctaggaaccgtagatggcctcgaccacccacgtgggttgttgcctctgcggatgagacgcagcgccaaggggccagaggaaacgacgtgatggacctcatatcacagctcatgtcatggttcatgcctctcatcgcctcccgccgtggttcgccgaggccgccccatgctgcacgccatgggcagcgatgtcgccttcacgaagctcggcatggagtgctaccccaaggaggccaccgctgttggggtcaagggattccccgacatggaaaaataaccgacgacgagatcaatgccgcctccgtcacttgctgccgcatctacctcaggtccgagtctgaacctgattgcagagctgagaacaccttgaagctaggagatgtcatccagtaccatgaatgtggttaccgcattctctataagaagcgggcaccgatccatgtgtagtaccagcaaacttcccattttctatgactccaagcaatggcagttgccgttcagtttggactatagaattcaattatgagttcagtttgttgatattaaaggaaagatacaggattcatacttaaatacttaacaaggattcatacttaaatttatctgatgcaatttttcaactgaacgtgaacttggcaggggtgagtacggagtagtgtacaaggtatgtccattcttctatcgctccaattttcaactgatggaaacagtaacagataattaatggctcacctacttgcaatgaagcgagttctgcattgagctgtcgtagagagcgtagacagacactctagccaacgttgttggctgggattggaacacaaaagcgagacaagggatgagaagcacaggaggagccaggtgaggtgaggtggcgacacacaggagtcgggcaagctcagctcatctcatctcatgctctactaaaaaggattagcccatctcaagagaaaagagtaacattgtcagcccactgcaataaccacactattaccagtcttgaaattcactttttgtttgtttgtcatagaaccagggattcatgacaggaaatgatctccttctcaagataagaaaattgcatttaagttactaatcagtgtatggtttactagtttggcggaggcctcaatccgggtctagaccaaggtcatggtggcgacgaaggtggaggccgaggtggagggtgatgcttccactctcagtcttggggtggggtcgtggggatgacatatgagagtggggtgcagtggtggctcgtcgacatcagccattggcacccttcccctgcccagttcgatgatgcaccctccctcctactacttcacgatggcaccaccatctccaggtaccgtgccgatggaggaaaggagaaacaaggtattttgaagattaagagtgatgccacatacttagcgatggggtgcttgatatcctagatattgtactagcttcagacctcgccgaattgacaccttcgaagaaatgaagtcgccagattggtaggctttgagtgtttcaccagaggaagtatgtagtgcagttaaggaaggaaatgaacttccatcagacttgatagacacactactaaagtggatcccaagcaatgatgaggagcttaggcttcgactgtcctcccatagcaccgccacaccgcatgcgtccgcggcggcgtccgcctcggcgccggtctcgcacaccgctccctagctggggaagttcatcgcctccgagcccttcaacgtggggggattcgattgggcgatctacttctaccccgatgggaagagcggcgaggatggcgttgtctacgtctcgctcttcatagccctggccagcgaaggcaccgatgtgcgcgcgctgttcgaggtcacgctcgtcgaccagagcggcaaggggcaagacaaggtgcatacccactttgggaggtctctcgagagcgacccatacaccctcaagtaccgcgacagcatgtgatgagtctatgtacaggttgtttcctacggtatgcttatctatggtggaaagaaaaagtgattgactcatacttgaaaagaaaagatggcctttgcccattgacgcctgagacaaccagaaatttgccatgacctcgttcctgaccaagaaaaactgtcaagcacagaatcacagttgatatattgggattccaaggtatcagaggctgatatggatgcaatgtggaaacatcctgatgtgtataaggagtggataaaatctggtgagagacgtggaaatgtacgattctcccatgatgcaaagaacatgccttacctttctcgcgtcgaggtgaaggatatgattgccttctcatgttgtgtatatgatggtggtgatgaggagaaggaaatggatgcagccagagaaataggttggagagggaaatttactaagagaggacgtgtaataagaccaggaattattagaatgagtggaaaatgtcctcttacacctttggaggttgggttaatgcttcgtggaatggatttcagcaataagactgcaatctttttggcatctggaaagatttacaaagcagagaagaacatggcttctcttcttgaaatgtttcctctcctacagacaaaagagacactggcatcagaagaggaacttgctccattcaagatggctgctgttgactatagtatttgtgcccaaagtgaagtttttgtgaccacacaaggtggaaatcccgcattttttatgggtcacaggagatacttgtatggtgggcattcaaaaacaattaaaccagacaaaagaaggcttgctgtactcttcaataatccacgtatagggtggacggcattgaagcggcacttgcttaatatgagagcatacagtgatgtcaaggggatcgaaatgaaaagaccaaacgaatctatatataccttcccgtgtcctgactgcatgtgccgcttgaacagaacagaacactcgaaatccaaacagagtagatagtatatttcgtatgtagaccaaatggctaaaaccatccaatattttcatagactgaaaatgcagagaaagcaacaaaggtgtatcaatacagtcgtacaagcttagtatcggatggtttttaatttgtatagcaaagcacgggcacatacctatatatcttttaatgtatgtaaatattcttaacctttaaaagatactaacaagcaggtataacgataattaatgtttctata

SEQ ID NO: 29802 - DNA, 2850 bp, Zea Mays
cttcacttgggtttaatccaaagtccaaaaccacatcacacccttctaatcccaatcgcggcacgactcacgagctcctcgcgccgctgcagtgggctctgcgcctttcctctcgccggagtcctaaaaaaaccctagggactagggagcgtgcggctgctgctgctgcggccggacgaggggatgggcacagggggagacggggacaaggcggggccggcgctgccgctggaggcgcttttggcgctcgggctcgaccagcgcaccgccgagaacgcgctcgtcaacgccaaggtcaccgccaacctcgccgccgtcatagctgaggctggtataaaggaatgtgacaagtcaattggtaatcttctatatgcagttgccaccaagtacccaactaatgcacttgttcatcgccctgtccttattagctatgtcttgtcaacaaagataaagagccctgcacagctagatgctgccctctcatttcttactaatactggtcctgattctctagatgtggacaagtttgaagaagcatgtggtgtagttggtatgctatgtggacaggttaggaagagacacccctggggtgatgctaaggcagtaaaggaggaaattgacaagaggcttgcagaaatcctaggtccaaagacagaagctgacagtataaaaccagtgaaaaagaagaaggaaaaaacagcaaaagttgaggagaaaaaagttgcagttgccactactgccccaccatctgaggaggaattgaacccgtatactatatttccccaaccagaggaaaactttaaggttcatacagaaatatttttcagtgatgggaacatatggagagcacataacacaaaggaaattttggaaaaacatctcaaggcaactggaggaaaagtgatgacccgttttccaccagaacctaatggatatcttcatattggtcatgccaaggctatgtttatcgattttggtctggctaaggagcgaaatggccattgctaccttaggtttgacgacacaaatccggaagctgaaaagaaagaatacatagatcacattcaagaaattgtccattggatgggatgggaaccctacaaagtaacatacacgagtgattatttccaacctttgtatgagcatgctgttgagttaattcggaaagggctagcctatgtggatcatcagactgcagaagaaattaaggagtacagggaaaagaagatgaatagtccatggagggataggccaattgaagagtcattgaatttatttgaagacatgaggcgtgggttgattgcggagggtgcagcaactctccgaatgaagcaggatatgcaaaatgagaacaaaaatatgtctgacttaatagcatatagaataaaattcacccctcatccacatgctggtgataattggtgtatctatccgagctatgactatgctcattgcatggtggattctcttgaaaacatcacgcattcgctgtgcacacttgagtttgacatacgccgcccttcatactactggctacttgttgccttgggtctttatcaaccatatgtgtgggaatattcgaggctaaacatatcaaatactgtgatgtctaaaagaaagttgaatcgacttgtgacagagaactgggtagatgggtgggatgatccccgcttgttgacactggctggactccggcggcggggagtatcatcaaccgcaataaattcctttatccgtggaatcgggataacaagaagtgacaacagcttaattcgtgttgatcgtctagaataccacatcagggaagagcttaacaaaacagcccctcgaaccatggttgttttgcgtcctctaaaggtggtaataactaacttggaagaaggaaaagtactagaccttgatgggaaaatgtggccagatgcttctgatactgatgcttcctctcactataagcttccgttctcaagaactgtctacattgagaaaactgattttcgccttaaggactcaaaagactactatgggctggcccctggtaaatctgtcatgctaaggtatgcgttccccataaaatgcacagacgttatctatggtgatactcctgatgatattgttgaaattcgagcagaatatgatcctttgaagacttctaaacttaagggtgttctgcactgggttgctgagccagcacctggtgtcgaaccattgaaggtggaagtaagactattcgagaaattgttcatgtcagagaatcctgctgaattggaggattggcttggtgatcttaacccgcactcgaaagaggtgataaaggacgcttatgctgtaccatcgcttgccactgcagttctgggcgacaagttccagtttgagcggcttggttacttcgccgtggacacggactccactcctgagaagctcgtgttcaacagaactgtcaccctccgtgattcattcggtaaagctggaccaaagtgacttccagtgtaatgtaggtagggcgtgggtgctcggttgcataggcgcacctgagctatacttttttttgaagaagaaaatgatcttgtaatacagaacagcctaaaggcctcaatctttgtaaaatttacatgtgactgcagtgcagcttgtttgcttcgaaggaatcagattttgtatggtaaaaaaacactccatggtttgcagaaccaagccaagaaaacagatatcaactgtgatgccacactcaaaagcttgtttggtgggagggacaaggttgggatgctggagatctccaagcttttgagccctgacttcccgaagatctccaagcttccctggtccatggagccagggatgtcactttggtaa

SEQ ID NO: 29803 - DNA, 1997 bp, Zea Mays
gggccggcgtcgagtggagatccaatcgaaaatcgaactgacttcatcttctgttggtcaacaggagagcccgttgaaatcctggacctctcaattgtccttttctctctccccgcccaccttcccctgttctgccgcctccccagtccggcgtgcatcagcagcgacatcagagtcggcgatgggaggcgtcatcgacgttctcgtccccttatgttgatgaagtggtgtgccgtggagattccttgaccgatttcttgccggtaagacggagtctgccatctgcgtggctggtcatcgcggtgagcaaggaacgacgaagtgcgcccctccgcccttcggctcgtcgttgtgccttgcgtcgtcgggtggagttccttcccctgcttcaagctaattcggtttttccctctcatcctacaaaaagagtagagcagcaaaatggagaaccatggaaaattggatgggtgggatgaagttctggaagaagaagatgagttagcgagtgtatgcaaatatcctattagcacatcgtacctttcttatggaacaagcagaaggggcaaaagtgtaaagaagcctagattctcattacgaggatatgattttgttccattagatgttaagactgataacttgtgcattggggagcaagatggttcttctgcagtgccatcaactaaagcttcacaaaccatggtggctgaacggttggaaaacgttgaggaacaaactgaagatttggcaccagagtttgcccttccacccaaagcaaatactttagtttctgagctgctagataatttacagcgtaggggtggttcttttgtcaggacaccatctttgttgcaccaacatgctccaagcatatcaatcagggagcaggaagtttcatccggagtgccaccaactaaagcttcacaagctttgatggatgaaccgtttgaaaatgacaatggacaaactgaagagttgccatcagagctcccctgctcgatcaagagaccaaaattttcagttgcagaacttctagaagacctacagggtagaagtggttcttatgttgagacagcatctttgtcacaccaacacaccagagctaaacattggaagccaaagttcctttcttccgagaagaaaacaatagctattctaggagacaggagtattgacagtgaggaccccttggagcatgtaattgacggaacatctagcgaggaggaagatgctactcaaaaccacttgagtttggtgaacaaagatgagaaccagcaaactatggctgacctatttcaagaagtttttaatccaacaaacatggatggtgccatgaaatcaatgagatcaacaggagctggtaactatggaagaatgcaacagattatgcacatggagaaagattggcatgtggaattctcgaggcagtatagcagagagcacagttattcaggtgatttaaagggaactactgttcagattatgtcaaggtcattggaaggaaagctaacagtctgcagctgcatgttccaggaaaagggcaatgatgccactataagtaatgcctcagcagacggcaccatggatgaaagcagaactaggaggactattatcttcagtccaaagatatgtaacaatgtagatcttctggttggaaacataattcatatcttcccaccatggaaggaagttaaaatacaagaagagcatgtgattatttgcacctacttctcgcaccaccaccggacttgatactcggagatatttctgtgctagctgcaaagctagaggcagaccgccagcataaccgttgctgacagtttaatgttgatgtactcgcagggtctattctgtttgttttgtaatcacaagtgtactggctgcaaagctataggcagaccgcaagcataaccgttcctgatagcctaatgctgatgtacttgcagtctctcttctgttttacaatcacaagttactgaggcctagttcggattctctaa

SEQ ID NO: 29804 - DNA, 2543 bp, Zea Mays
cttctctccccaccacattctcccccctcctctcttcttctccaatccatctctctgtttgtctcctatcctttcctctctcccacttatcgacggacttcctgcgaggaacacagagggccatccaggcacttcctctgcatcacacacctatgctgcggctgcgtgatggaggaagctaacgccccagtgacgaccagccacccctcctccaccgctcctgatgcgcctccggacccggcggctgttccatccagttctgaccaaggctcccaatcctgtcaggcccagcagcaacaggtccaccagctggatgaaacgcgagagccggcgggcagcagctacgaagcgtcagagatcgccggccgcttcaacgaggccatcgatcccaaggccggcatcgacgctgcggcgcccatcgtcgattccgtcaagggcgccgtcagcaaattcggagctgtaggggttgttgattggagagagaaacgcaagcatgtccaggatgagctcgacaaggtgcgggaagaggtcacggagtaccagaagagagcacaggaggcggaggccggcagagcgcaagctctgcgggagctgggaaccgtcgtgaccgctgccgacgagctgggcctgggcctggagatggcgcgggccgagcaagcccaggcgcggcggcaggtggagctcgccgagctgcagctcgaggaggtgcggcgcggcgcaaaggcggagctcgacaccgtcagggaacgccgcacggccgcgctcgctgacctgcgggcggcgcgagcggaggtggagtcgctggagaaggtgcgcgcgcgcgccgcggccgaagcaggcgcggcggtggcgcgggagcgggaggccgccgcggcgtcgcgggaggctgggaaggccgtcgaggacctcaccgccgagctcgtcgcgctgaaaggggagctggagtcctcgcacgccgcccatgtcgcggcggagcagaagaggatgggcctggcggtcgcgtgggaggaagacaaggcgcggtggcagatggagctggaggaagccgagcaggaggccaaggggctgcgagagaagctcgtggttgcctgcgacgtcgagacgaaggcggtggcggcttcccagctcatggcgagcctaaaagctgagctgttcgcttacgccgtcgagagaacaacactgggacaggaggaggaggcgacagcgatcagcgaccggttgatgctggagaagaccaagaaagagctcgacgacgtgaaagcgagcgtcgagatggccaagcacgaggccaagtgcctgcgcgtcgccgccgcctcgatgcgcgatgagctggagaaggagaaggcagggctcaccgcgctgcggcggaaggaaagggaaaggcaagggctctcgtcagcgtccatcccttacctcgaggaggagttgaggtgggtgaccgccgagctcgccgaggcacgagcgaagaggggcagcgacgagagcgagatggccgagcgtgtagccgaggcacggcgagaagcggaggaagccaaggcgaaggcccggtcggctcgagaaaaggtcgccagggccaaggaagttgcgggcgtggccaaggccgccgtcgccgccatggaggcgcggctggaggcggtgacgcgggagatactcgccgcgaacaagtcggccgagaccgccacggcctcggccggcgcgctgctgcaagaaagcaagccgtcgagcgataaggacgtggaagcaggcgtgaccgtgacgctgacggtgcaggagtacgccgagctgagccggagagcgcaggagacagaggaggccgccggcatgcgggtggtcgaggcggtgaagctgatcaaggaggccaaggacgcggaggtgaggaggctggagaaggtggcgcggctggacaagcagaccgagcagaggcggctggcgctggaggccgcgacgctggaggccgaggaggcggagttcgacaagctgtcagcggagcgggagctgaggcagtggcgcgccgagcacgagcagcggcgcgcgcccggcgacaccgactcgccccgcccgggcctcgccgagatctccgtgctccacgaccagggcaccggcgaggggcgcgggaacccgcacatagtcagcccgagggcaggctacatgccgcggacggagctggtgatgacgggatcggcggcggatgcggatgcggatgcggacgcgaggcagaggaagaccttcttcccgcggattgtcatgttcttcgcgcgaaagagaactcagtcttggaagtgatgcacaacaaccggcttccttttgaaatttcttttggggcttgcttctggtacgtggctttctcggatggagcagatcaaatatgacgacacaagtgtaaaatgtgtattgatcataattttttttttcgttttcactcggagttgtgatccatgcttggaaatatggaccggcttgaatcttgatagttggtaaggtcttgttcttttgtccaatccaaaaatcatttcagctgatcaaaacttatactccctccgtct

SEQ ID NO: 29805 - DNA, 958 bp, Zea Mays
cgcgagtgccgtgtggacagccgcgctcacgcgcgggcgtggggcatgtcgcacacctgccctcacggctcacgctcatgacgagccagccagccaggagccagccaaaccgcctccacgccgcgttttcccgatctggaaatttaccacgagagcgtcgtgactgccacaaacatacgagcactgggcactggtgaatgaacgagagtgacctgacccccgtgcggccgtccgccgtcaccgaccgagcgccgggtcccaccactccccgtccccaacccctcgcgctcgctccagcctccagcaaccgcgctccctgttcctttccttcccaggcggccaggcccagcagcgtgaagtgaggccagctagcctattatcagcctatggcggctcggattggagcggacgggaaggcgatggcacgccgcggccgcgtggagctgcggcggatcgaggaccgggtgagccggcaggtgcgcttctccaagcgccgctcggggctcttcaagaaggccttcgagctctccctgctctgcgacgccgaggtcgccctcatcgtcttctcccccgccggcaagctctacgagtacgcctccaccaggcaaaaggcgtggtgcgtcacttatccattcaaacacaggaatttgttgcaatcacgggattgtagaagaaaactacaagatgtgatgatgctgatgctacataagtcatgctaaaatgtctcgtttattgaagtattgtatctcaaatatattattttttaatttctttatcttgtagtttatatttgagattttattattatatttagtcactgcacactctcattaaaagagtaacgacctttttggtgactaaagatgcttatgaagaagggagattgctattaaagatttatgtattacattgagcccttatacgatttatatagagtacatgacataagagacaaggc

SEQ ID NO: 29806 - DNA, 1779 bp, Zea Mays
ctagacacgctgtcgggatcaaaacaaggcagaatcgggccctttccaggcccagccaaattttcgttcacctggcttcacccacccgcgtgccctcgccgacaactgagccaccgccgccgccgccctacccccaggtgcccaggtcgtttcggtccctttgccaggtcttcgccggcgacgagcaccagccaccagccagggaatataactttgacctgtaaaatgaggccagttttttgcgggaaccttgactatgatgttcgcatctctgaggtcgagcgccttttcgggaagtatggaagggtggaacgagtggatctgaagacaggaatatcatggagcatatgtgctcttcctggttgatggactggttctacctttactgcctctgcctgagcccccacctcatgcctggtccatctccaggagttcactgtccaccacggcatctgtgcacatggaaacgaccacctcgtgaccgatgtcttacttttacgatcaacactgcatcctcgtaccctgcctgatcaccattccttcgccaatccaaccatgccaatctcatgtctggctggagagtggagataagtggagggtttgcattcatctacatggaagacgaacgtgacgctgaagatgctatcagtagacttgatggaattgattttggcagaaaaggaaggagaatcaaagttgagtggaccaaggaggatcgcactgctgatcgaagaggcaactcaaggaggtctccaaccaatgcaaaaccgaccaaaaccttgttcgtgatcaactttgacccgatcaacacgagaattcgagatctggagaggcactttgataaatatggcagggtcgcgaatgtaaggatcaaaaagaacttcgcctttatacagtttgaggcgcaggaggatgctactagagcattggagggtgctaatgggagccatttcatggacagggtcatctcagttgagtatgcgctccgtgacgacgatgaaaaaggtgaaagggcgacgaacggatacagcccagacaggagaggccgcgaaagatccccaggtgcaagacggtctcctagtccttacggcagaggtcgggagagaggtagcccagactatgggagaggcaaggagaggggcagcccagactacggcaggggaggccgcagccctgataatggcaggggaggccgcccagccggcggtggcggcggcggcagaggtgatcacgccaggggaggaggacgacgacgcagccctgactattatgaccgcgagcgccgagaagctagtcctggctatgacaggccccccagctgctcacctggaactgggagggacgcgagagactagaaaagcgccccatgcctgtgttgtagaattcaagcatcaaagcctcccgcgtcagatgaagttagagttggtgatgttagccagcaggaaactcgtttacttatgtgcgttagctcgtgctgactttgcaagttagcttaccatttcccatttgcgactccagaatgtaactcgtatggtctggaatggtagctttcaggactcgtttgaacctttcttggagtttttttcttcttttccggctaccttgattgccctgtgcatgcgctgatgaatctacagattgtttcgtctgtcaagtgttccgctgtaatgtaagagacgaaattatttgttccttgttgatgtagtccctgttttgtgcagcgagaaatttcagtatcttacgctcagtatgcgcgcctctccagatctgacacctaat

SEQ ID NO: 29807 - DNA, 1866 bp, Zea Mays
tacatagttattctgttttaactgaaatagtttgtcgatttttgcgtgggaacaacaaatacatgatggtaccccttccatccaaaaaatgcaaggcctctatttgacaaacagtcgaactcttagtagaggcggtccagaggtcgttagtggatagtcaagaagagattcacagttgatgtcgaacaaataaaggaatccaataaacttactgcaacattgagaagggaaaatcctacatcagctacatgtataatcgaattatttgtataaacaagataggtacaggcagagcaattcggtagagagaagggagggtgcatgcttgcagcctcattagattactcagttactattttaggctgtcttattgcgccttcatagttggaagtagtatagattttaatcttctctgtatgagcttaatatacttttatttagcttcttgcaagcttgaatttcctggtgctcaaatgccacctgccacttttgtagtctctgctcggaactgtgttttcttactctaattatacatatacgttcatatagagatggaatcaccacccctcacggttgaagcgaccgcttttaccgagaaaatgatggacatgactttggatgtgaaagaaaaagaatcctggaggcaagaaaccccctaggcggccggtaaactctaagtctgaaggtttagggttttcatgctctcgactctgatagctaactcaggaacgaaccaatggtaacaattttcttcatttaatggtggattaaatgaaactatcttcggtctttggtacttgctcaacatctacaataagtaggtcagtggaacatatgtcctgtcaccgttagattgggcgatcgaaccatggtacatcagtcaccttctttaatgatttttttgttctacttactaatctgctgctttactcttccctggtgtttgtactgacctttttaggaaatcttgcagaactgatattcaatgtaaaatattcagtgtgatagaaaaaagaagattagtcgagtatgatctttatttcaatctgccaatgctcttggtaattccagtttgcctaatagtcaacttgtttttttgtaatgttcgagcattcgctgaaattactgatcgtattcaaaattgttgctaaattgacgattaacccttgtttccatggatagcgagaggtgtgacgtggtatgtttatagctattgtgcagtatacaccttgcttacaggttgccacaactccgccggttggatccactaaacttccaatgtgtcctgtttgcattggtgtgcttacagttttgtatttttgtttcttagggcccacgccaccatgatgtcacatttcaattcattttgtgacctctgatgaagagatttaaacacatctgttctatcctatccatagttttaacttcaaatattgttctatttaatgccacaacaacatatatctttactatgtcatattatatatgattttgttggcttacaacctctcgatagggcgcccgaatgggcgcctcatgttctagttatatttatgacgtatcttatataattttccctccgtaatccatgcagcgtgtcaatggatgtttgcaaagacaacagatgccaatgcagactggcttcttcctaacaacaaacctcaacaagccaagagagacgacaattggcgacgtaggaaaaaagacgcattaatcaataacgtgtggattcctggcagtggcgtagacaaggggctctaaggtttgtacaaacatataaatacatattaattactactattttttaaatagttaagtatataaaaacagtgactgattcaataaagatttgttatttcttttgtt

SEQ ID NO: 29808 - DNA, 918 bp, Zea Mays
tcatggggctcccgtagcgtcgactgcttcgagaagctcgagcagatcggcgagggcacttacgggcaagtgtacatggcgaaggagacgggcaccaacgagatcgtcgcgctcaagaagatccgcatggacaacgagcgggaaggggcccagagcgggacgagcaagggagttgacgacaacaagtacaaggggagcatttacatggttttcgagtatatggatcatgacctcactgggcttgctgatagaccaggaatgcggttcattgtgccacagattaagtgttacatgaagcagctgcttacaggcctacactattgtcacgtcaaccaagtcctgcatcgagacatcaagggatctaacctcttgatagataacgagggtaacttaaagcttgctgattttggccttgcaagatcattctccagcgatcacaatggaaaccttaccaaccgtgtgatcactttgtggtatagacctccagagttgctacttggaagcacaaagtataatctagccgttgacatgtggtcagtgggctgtatttttgcagaactgctcaatgggaagccaatattgcctggaaagaatgagccagagcagctgactaagatcttcgagctttgtggtacccctgacgacacaatctggcctggtgtcacaaaaatgccatggtacaacaacttcaagcctcaccggccattaaagatacgagttaaagacttctttaaacattttgatcggcatgcactggatctgttagagaagatgttgactttagatccatcacaaaggatatcagcaaaagatgcacttgatgcagaatatttctggacttcacgagcgatgagcgcggccgtgaacaccatgaggatacgggcccccagatggcgtcggctgtgcaggcggccatga

SEQ ID NO: 29809 - DNA, 1892 bp, Zea Mays
ggaggcgccgccctgcgctctctggcgctaatggcgccgccgcgtccacccacaggaccgatcctcttcctgcccctcgtcttcctcttcctctttaccaccgccgcggcgtctgcggcggcgcctgaggatgaaaagttcactgaggagctgctcctgcggccgctcccggaccgcaaggcactggcacacttccacttccgctcctctgcgccccccgctgcctccgttggtcggcaccaccacctcttccccaaggccatctcccagctggttaagaaatatcatattagcgagttggagctatctttcacccagggaagatggaactatgagcagtggggtggatttgatcctatgtcaactaataatgcaaagcctcctggtgttgagctgtgggcagtttttgatcttcctttgtctgagatcgatgcaacatggaagaacctgacacatacactctctggcctgttttgtgcatccatcaactttttggagtcctccactgcattttctgctcctcgctggggcttcaaactgaacgaaggcaatttgcgatatggtgcattgcctcgtgaagcagtatgcactgagaatctgacaccttggttgaaacttcttccatgtcgtgacaaagctgggatagcttctttgctgtacaggccttcaatttacaaaggatattaccattcacaaaaactgaaactgagatcctcccagtcacttggtattattcttgatcaaactctgactgttgtgctgcaaccaaataatgtacatggcgaacagctacattccaatcatggtcaacttcagcccaactggtccatgagacatcttttcaacagaaagttgtcagggaaatgccttgtttctaaatccagcagagtattcattgaggttgataaaggcattgctgacgaagttaacatatctggaagtgttcattcttggagtaatgaattctttgtattgtccaatagcccggacaagttgatcaaaggtcaaaatcacttagaaatgcaatcttcttttttatatgtttatgatgctagtaactacagtgaggaacaacctttggatttgggcataacttggaagcttcccctgatatggacttgcaccccatcaccttttcatgcaagcagatttcttatgggcagtggcaatgaaagagggtcaattgctctgtcgtttatgtccactaatcttcataagaagatatctggcagcgcaaatgattgttcaataaaggcagttattttccaggttgttccatggtatgttaaggtctattatcacagcctagaaatatttatagatgggagcaggaagactgtgtcagaagtagttgacaagattcatgtcattccttcagaagacaagcttttgcctggtaccttggagatgctactaagattcccttgcagtatgcagtcgggaactctgacattggattttgacaaggggttcctgcatatagatgaatatcctcctgatgctaatcaaggatttgacattccttcagctttggttagctttcctgagttcagttctgctcgaagttaccctgaaattgatccagtacttggatcacctttactagaaaatttccaggaagatagtgttgtgaagtcgtatacagaagtattgctcgttcccctgacaactccggatttcagcatgccatacaatgtcatcaccttcacatgcactgtcttagctctttactttggttcattattgaatgctttgagacgaaggattggcgaggaagagagggagttgaagaaaagaggcagattggcaaagacggggttgccatttctggcgtcttgcccactgttacctagctcctgaaagtatcaaccatctgttggtctgtgtggttg

SEQ ID NO: 29810 - DNA, 1273 bp, Zea Mays
agaatgtgtaagtggttgaccccaggtagtatggggattgatttcaatggttgatgctgagaaaagattgttagcgaatgcactggaagatgttgataatcaagtttttatcttgctttctgacagttgtgttccactgcattcatttgattatgtgtataattacctcatgggaacgaatgttagcttcattgattgtttcaaggatccaggtccacatggcagtggaaggtactctattgagatgtatcctgaaatagacgagagggattttagaaagggtgcccagtggtttgcagttacaaggagacatgctttaatgattctggctgacagcttgtactacaagaagttcaagctatactgcaagccagcagaagggcgcaactgtattgcagatgagcattatttgccaaccctgttcaatatggtagatcctggtgggatctctaattggtctgttacacatgtggattggtctgagggaaaatggcatccaaggtcatatagcgctgatgatgtcacctatgatctcttgaagaacattacagtatgtttcatggatacttaatttttccttatctatcatatgattgttatgtgcatacgctgatgtgcatgagcgtacaggcagttgatgagaacttccatgtaacaagtgatgacaagaaacttgtgatgcagaagccgtgtttgtggaatggatcaaagagaccgtgctatcttttcgctaggaagtttaatcctgaagcacttgacaacctactgaagcaatttaccagttacacatctgtttgagtcctaccggattctttgccttgtgctgtcaaatccgacaagcttttttctcttcctgtttatatgtaaattgtgaagtccgtacttattaggatctgggcctgaagataccggtacaactgcaacagctgtgatggcttggagctgagtcatgggtaaaacggccacagcgatgtttatagaatggcactgccctcatagtaatttatcgtgttcaatgtatgtctccatagtcttccacccaactcccaactcattagttctttattcttggagaacagtttttgtcagagtgttatactgtcatgatatgatccattctttgtagacacagagattacaacagatgtatcacaaatgcagtcttaattttgtcactattaaatcttttatcatgcgttctactgaattaggtgttagcatttcttaaatttcactgtgatcaattttcagcaaagtaagcgtatttgagctg

SEQ ID NO: 29811 - DNA, 558 bp, Zea Mays
tctaaatgttaaaattatgttcactaccaggttattagcttttgtactgcacttccacacacatacaattttttttcttttttcttataccttccatgtcgtctggtccagaacttgtacactgtgggggttaattatggatatggatctatgaaatattattagcatgaaaatatacatggcgtgtatggaacaaaatggactctaatgctttttcttgtgatgtaggatgcttttggcgctgagaggaggaaagctataagatgctaaatctctccattgcatgcggaaaaacgtaggaagggcactgcagctgatgttgctgtgtgcaatgcttgagatagacagaaatactcgtcttaaggagcttggttgggcgctactcatgtgggtagtttatgcataaagttatgcctgttcgctgcttaaatgttgccatattttgtttttctctttgaaactgtgaagggcacaactttttaatgacttctgtaacttgtgtatctaacatctgtattcggtattctgagttaaaataggcacatttaattatatttt

SEQ ID NO: 29812 - DNA, 2437 bp, Zea Mays
gctgtggcgcagcccagtaggccatcgttcactgttcgcacacacgggacacggcacgccgcaggccgcagcgcgcgcgagagggagccggagccggctgcctgcttgaacgcctggtaacacggcctctcgcttcccctcccaaactttccctaccccgaccgccgatcctcctcgccttgacgtccaagagccccggtccgatgggtcgtccgccgagcgccggtgctccggcgttccgcttcctcccgtccgaggtggcggagatggaggcgcgcctgctgcagctcaacaacggcatccccacccgcgccgtgctgcagaccctcgcggataagttctccgcttcgcccgagcgcgctggcaaggtggccatccagcccaagcaggtgtggaactggtttcagaacagacggtactcacaccgggccaaaactcccagggccgcgtcgtcaccgccggctaagatgacgccctcgggagctgatcaccaccagcatgccgctaacgcctccgccttcagggctgctcagctctcttctgttgctgctgcgcaccacggttcctcctctacaggtgattgattcttcgtttcctcttccgtaggtgattcactaaccaatgttccactggaatgggataattcgattgtatgtgtactgtgtctgtgtcatcaacttgttactacaaatgcatggaattttatgagaatgctgatgcatttaaggttatgttcttagtgaaagggctcgtcctgtttcatgcaaaagatgacaattcaaattactttaggcggcctttaggttacactgtattttgtagttccttgtggaccattgaagatcgcagcaacctaggtcttttgttttttttctccccaagaacatgcccttccctgcaaaatcaatgtttgttgtgaacgatgggcccagttgcaagctttggacagtgtgcaaagcccaccaacgagaacgcaggactttgacagcatataagaagtcacaccctagctgtagtggtgtactggtgttgccttcccgcatcctcttcattcagtccccactatggtgacggcagcagagatctgaacgatgaagagtgtgaaatgttgggaaagacctaggggccctgaggtcttgtcttctcgatgtcgttgggcacccgtttgaggtaacaaattcttcatgcttggaatctattgctgaaatggcaagaaatgtggggcccaatatttgggcctcaccggtcatagatatagcagtggcgacaaatatttgttggatggatagtgtgagacgtcagggaagagctgggggacatcatgttcttctcttctcaaagacgcggggcaccagtttgagctgagcaattctttcatctctgcatgctcagatttatgtgctaaaatgatatgagatgcaggtggaatgtgggcgccaatgtatgtggctgcagcagtcatggatatagtggctgttctacctgctaatgagcaactcgttctacctgctatattagtcaaccagtgctgtatgatactgagcaagccagccagctgctgtgcatgtgccatgcagcaaatgggggatttgttttgtgcaaagccctcgaaatgtttgttatccaacatattggtggacagctacaaaactttattcatgatgagcttgagggtttttttgctggctgcaacctgccctacctagtacctacaaggttgctagtgaccataatctcagctgtcaatgcctgttaaaatgttgattgtgagggcaacttatcatgtgctgcttcattgcttctggacattagattattaaggctctgtttggtagagcttcatatccaattatttttgaagctgtgcattccctagctccaggaacacatgatcatgggtctgggacctgccaaacagggattcagttgtaccattgattttagttttgtgcactcgatatatgcattgccattaaatcatcggttaccatgtccattttttctctgattcttattacctttgttgacaatcagggaagaatcctgtggaaagtgtctcagttgagtttgaggccaagtcagctcgtgatggtgcatggtatgatgttgctgcctttctttcacataggttgtttgaatccggtgacccggaggtgcgggttcgtttttctggatttggggcagaggaggatgaatggatcaatgttcgcaaatgtgtgcgacaacgttctcttccatgcgaggccacagaatgtgttgctgtgcttcctggggacctgattctttgttttcaggaaggtaaagatcaggctctctattatgatgctcatgtccttgatgctcaaaggagaaggcatgacgttagaggttgccgttgtagatttcttgttcgctacgaccatgattcttctgagattgcagtatgggttcatgaagt

SEQ ID NO: 29813 - DNA, 3342 bp, Zea Mays
caccactgtacaccactgtagatccttcctcctcgtcgtttcctcagcgactactttaattgctgttatcgcatttgaggaggggaggccgggaccccggaagtctgctgctgctcctgctttctagtacctgcccacctgcgcttgcatctgttgcttccctgctgctggcctgcgaatccacctgcatttgctgaggctcatcgccgcgtgtactcctgctctgtgaccggggattccttggttttcctttgttcttcagggaggattcaggaaatgctcggagttgcattcggtggctgaaacttctagaagggtttgagagagtaagaagaacttgaacctcagcggtaaagaagaatatggcagacacggtcacgggcagttcaaggaggtcacaagatgacactgcaacattaatcccacacagtggcaatttgggaggatcaagccggaagggcgtgaaggccgccaggttcaaagatgatgatgaggttgtggagatcaccatcgtacagcgcgattccatggcaatcgaagatgtcagggtagtcgatgatggcggctcagggcatggtggtgggtttgacggcctgtcacttgtgtcaccttcctcgtcaaggagcggcaagctagcatcaaagtttaggcaggtgaaaaatgggctaaagatgaataactcaagcaataaggcgccacagacacagttgggaaagaacgtgaggaagagattggacagaagcaagagcggtgctgctgttgcgctcaagggcttgcagtttgtgactgcgaaagttggtcatgatggctgggctgcagtggagaaacggttcaaccagctacaagttgatggcgtgctgctacgttcgagattcgggaaatgcattgggatggatggatctgatgagtttgcaatgcaagtcttcgattcattagcaaggaagagagggataacgaagcaggtgctgactaaggatgagctgaaagatttctgggaccaactaagtgatcagggttttgacaaccgtctgcggacattctttgatatggttgacaagaatgctgatggaaggatcacagcagaggaggttaaggagatcattagcctcagtgcatcagcaaacaagctttccaaactcaaggaacgagctgatgagtacacagcactcattatggaagaacttgaccgtgacaacctgggatacattgagcttgaggatctggaggcacttttgctgcaatcaccatctcaagctgctgcaagatcaacaacacatagttcgaaacttagcaaagctcttagcatgaagcttgcatcaaacaagggcacaggtccattttaccactactggcaagagttcatgtacttccttgaggagaactggaagcgcatttgggttatgactctctggctctcaatctgcatttgcctctttatatggaagttcatccaataccgtaatcgagctgtatttcacatcatgggttattgtgtgaccactgcaaaaggtgctgcagagactctcaaattcaatatggccttggttctatttcctgtttgccgaaatacaatcacttggattcgatcgaagacaaagatcggagctgttgtgcccttcaatgacaacataaacttccataaggtaatagcagcaggtgttgcagttggtgttgctttgcatgcaggtgctcacctgacatgtgattttcctcggctgctccatgcaagtgatgctgcctatgaaccaatgaagcctttctttggagacaaaaggccaccaaattactggtggtttgtaaagggaactgaagggtggacaggtgtggtcatggttgtacttatgactatagccttcgtattggcccagccatggtttcggcgtaataggctcaaggattctaatcccctcaagaaaatgactggcttcaatgccttttggtttacgcaccacttatttgttattgtgtatgcactgctcgttgtccatgggatctgcttatatctaagcaggaaatggtacaagaaaacgacctggatgtaccttgctgtccctgtgctcttgtatgtaagtgagcgcattcttcggctatttaggagccatgacgctgttaggattcagaaggttgcagtgtatccggggaatgttttggctctctatatgtctaagccacctggattcaggtaccggagtgggcagtatatcttcataaactgccgtgctgtctctccatacgaatggcatccattttccattacatcagcaccaggagatgattatcttagtgtccacattcgcacaaggggtgattggacttcacgtcttaggactatcttctctgagccgtgccgccctccaactgatggagaaagtggactcctaagagctgacctttccaaggggatcacagagagcagcgccaggttccctaaactcttgattgatggaccatatggtgctccggcgcaagactatcgggaatacgatgtgctcctgctcattggactgggcattggagccactccattgattagcattgtgaaggatgtgcttaaccacacccagcatggaggatctgtttcaggcacggagcctgagggcagtggcaaggccaagaagaggccattcatgacgaagagggcctacttctactgggtgaccagagaagagggatctttcgaatggttccgaggggtcatgaacgaggtggctgagaaggacaaggatggagtcattgaactccacaaccactgctctagtgtgtacgaggaaggggatgcacgttctgcactcattgtcatgctccaagagctccagcatgcgaagaaaggggtcgacatcttgtctggaactagtgtcaagacgcacttcgcgcgtcccaattggcgaagcgtcttcaaacatgttgcagtgaaccatgagaaccaacgcgttggagttttctactgcggtgagcctgtccttgtgccacagctacggcagtggtcagcagacttcacccacaagacgaacacaaagtttgagttccacaaggagaacttctaatggcataactggagaagctctggacgtggtcctctaatgatttcagaatgtgaattaccagggttgtaatatatatacgagtagaataaaatgatgggagttattttgttatagatgtcaaaagtcaaccatgttctttttgcaatgtgctctgtccatccctgtttactcctctatgccgtctaggcgaagtagataatgtatcttttgcatacaagcaacattagaaggtgtaacacatgattttttttttgataaaggaagattttattaataacttcaagcacattacatcgag

SEQ ID NO: 29814 - DNA, 777 bp, Zea Mays
tcgctgccgccgacgaggatgaccaagaagacgacgcggccacgccaagtccgacgccgacaccgacaccggcgccggcgccggcgccggctgcggtggtcgtgccgatccccggagagcaagctgtcccgttcttcgcgcgtgcctcctctctttcagtgcatgttacagagaagacggatgacgtgctgcccaggcaagcgagctccgagcaaggcacatcaaaagaaaagcagccggagcagatcaccgaggactcgccagcggcgcagtgcgggcagaagaggcagcgcagcgatgacaatgcctccggaagagccgcgaccaacctgcaggggcagctggttgaaatcctagaccggagcagccagatggtggcagcgcagctagaggcgcagaacatgaacagccgactggatagggagcagaggaaggatcaggtgagcagcctgcttggtgtgcttggcaaggtggctgatgccctctacagaattgctgataagctatagccgccactgtgagtgtgtcttgagcacagtaaataatcgctgcaagaatgtacagattggtacaggttgttggcgtcctattgttattgtggattggttctgaaatttggtcagaaacctgaaatgggatgccccattttttaacccatgggatgtagcatttgtatgcccgtatggccccaaaactgtgtattcttacagaggaatggaagtgcatatctgatgacacaatcttgggtcagttaggtttcctctaatttgatttctg

SEQ ID NO: 29815 - DNA, 3333 bp, Zea Mays
agagtaccaaacgagagaaaccccacaaaatcaatattataacagaaaaaagtcggagggttcgggtcgaggtgcttcatccacacccagcgaatcctcgccgcgggagtcacgcaaccgccgtctcctcgccggcacgcttcgccgccgccgcctctctcctcctcgtctcaaccgccgcctgcacacgcagaaaaggagggagaataagaggatcagcaaaccccaagccctccactcgtcgccccctgctgcaatcgccccacccgcctccgcccgccgccgcttctcctcaccttcctctcccgcgacatctcagttcttcatcaccaaaagatggtcggcggcggcaacgagttccgtttcttcttgtcctgcgacatcagccacccgcttgccttccgtgttctccacgcagaacatatcttgttgaccgaccaaaaagtcccagagctctttgttgagtgcaagctatacatcgatgggatccaatttgggttgcctgtaaaaacaaggttggaaccttctggaccgaaatactgttggaatgagctcataacattaagtaccaaatacagggacctaacatccctctcgcagcttgcatttacggtgtgggatgtctcatctggtgagaaccctgaggttgtcggtggagccaccatatttctttttaacagcaaaaggcagcttaaaacaggaagacagaagctgcggctgtggcccacaaaggaggcagatggaggagtccccaccacaactcctggcaaggttcctaggaatgagaggggtgagatagaacgtttggaaaggcttgttaacaagtatgagagagggcagatacaacatgttgattggcttgatcgtcttgccttcagtgctatggacaaagctatggaaaaagagtgtgagaggaaggccaatttgtaccctagtctggttgttgaattgtgcagtttcgaacatagaattgtcttccaggaatctggagcaaatttttatacaccggccccagtatcattatcaaatgaactggttactgtatgggaccctgaacttggaagaaccaatccatctgagcacaagcagttaaagcttgctaggagcttgactcgtgggatagttgatagagatctaaaaccaagctcaaatgagagaaagttactacaaacaattattaagtttcctcctacacgcaccttggaagtggatgagaagcaattggtgtggaagtttcgtttctctttgatgtctgagaagaaagctctaacgaaatttgtccgctcagtggattggagtgataaccaagaagctaagcaagctgttgagttgattggaaagtgggaaatgattgatgtggctgatgcactagagcttctctcacctgattttgaaagcgacgaagttcgtggttatgctgtcagcgtacttgaaagggctgatgatgaagaattacagtgctatttactccagttagtgcaagctcttcggtttgaaagatctgacaagtcccgtctagcactctttcttgtaaaccgtgctttgtccaacatcgaaattgctagcttcctccggtggtatatattagttgagcttcacagtcctgcatatgcaagacgatattatggcacatatgacatgcttgaaaacagtatgatgaaattggttggtagggaggatggggatgaagatggatttcgactgtggcagagtttaacccggcagacagacctcactgctcaattgtgttctattatgaaggatgtaagaaatgtaagaggtagcgcacaaaagaaaattgaaaaattgaggcagctattatcaggagttttcagtgagcttacaaactttgatgagccaattcgttcaccattagcaccaactcttctcctaacaggagttgtgcctcaagaatcgtctatatttaagagtgccttgaaccctttgcgcctgacatttaaaacagcaaatggcggaacatccaagattatttacaaaaagggtgatgacctccggcaagatcagttggttattcaaacggtttctttgatggaccgactactcaaattagaaaatctagatttgcaccttactccataccgagttcttgcaactggacaagatgaagggatgcttgaatttattagttccagttctcttgcacagattctatcagaacatcgcagtattacaagttacctacagaagttccatcctgatgaggatggtccttttggtataacggctcaatgtttggagacattcataaaaagctgcgccggttactctgtcattacatacatattgggggttggagacaggcatctggataatcttcttctaactgatgatggacgcctttttcatgttgactttgcttttatccttgggcgagacccaaagccatttccgccaccgatgaagttgtgtaaggaaatggttgaggccatgggtggtgcagaaagccaatattacacaaggttcaagtcctactgctgcgaagcatacaacattctgaggaagtccagcagtctcattttgaatctattcaagctgatggagcgatcaggcattccggacatctctgccgatgaaagcggaggtctcaagctccaggagaaattccggttggatctggacgacgaggaggctatacatttcttccaggatcttatcaacgatagcgtgagtgctctgttccctcaaatggttgagaccatccatagatgggctcaatattggcggtaacacaagctaatgtcgtagaagcaagtgtgaatctgtacatgctgactgtcacaagccacggtaataagcgagaaacgacactgatggatggaagcctaggcgcctagcatttggggttcaagctgcgccgcatctgcgaattgattgggctgatgcagggcatgggcaatcttctcgtgccggtgacacccaggaattcgggttgtcagttgtcacttgtgatagtagaattccgtcacgcactgctgtagacctatgggcattcgtcagatgtatatatgcgttaatgtataaaatcaacttcagtagcaaatttgtgaataccggaatacgtgatggtttaagttctttagtagtttgtaatgataagactagcctgccaggtgccagcagtctcaggagcatgtgggctctacaaggagattagcagctgctggagcattattgtgaaactaccaagtcttatatgatagcaatatcttttgctcatacaagtagtcataactcgcaagtaatggaaaacatgtcatgcatgaggaagtattgctgtgacaggcatattccttgttggaatgctcaaatggt

SEQ ID NO: 29816 - DNA, 1604 bp, Zea Mays
gccccctctcctccgcgatcctccccaatcgcgcagatcccgtctctgcgccgccatccgcgccgctcgcggagccgcccctccccgcaccgcgcattgcccggcgcgacagacaccgcacgacccccaactcggcgccccacgctccgcgccccctctccccccggcatgagacaccgtccctctcgccatgtgcccccacgcccagcggcatatgaaattagcgaggggcgtacaggtcgctctcgtctgctcggggctgggtccgctgccgtggtggccgtccactgggcgagtcgtcgaggtacccaatttctgccatggcgatccgcccggaccaatggtcgattctccatctgaccatcctcagtaagcctcctgccccactactgccctccaaagcggcgcgcgcgccaccgccatctccacccacgcccaccttgctgccgtggccgccccataccgcgccctcgatctgaccccacggggcaggatggacaaagggaaatcggtggtggccgagctggcggcgtcgttcagcgatgtccttgtcacaccgcgcgagccgccagaaccccaagccaagagcttcctaccatcgccctccttctttactaagtttgccagggagacaggagacacccaaacgctttcagatgttgatataaatattattgctttggcttacatgttagaagctgagatccatgggactagccatttgcgagagcaccctcctcctctgaaaattctcgaatacttcctctgaagaatattgagagtcaagatatcttcatgtgtgataccaacagtctttgtggggcacaagaggatatagagctctagccatcaaagaaggatgcacctgttgcatgggaggacgatgagaacgatgtaggttggatgcatgctattagccatagcatgcacagaagatatttgcagaggaaggcaaggcgtgatgccctcaaggaatctggacaaagttttgagacaagttctgttgttccatcaattgatgatgataaagttctctctgaaaatagtggattggagcatggtctgacttcaactgatggcctttcttctgtctctgagataattagtgcacgttctgatgattttgaacatcaagcagagaatgacactgaaattcctggagaacatttgcattctgatcagcgagcttacggtgatgatgctgatgcgtgcaccaaagaattggaaaacctagatatagaaggtgaggatgagggaggtggtgatgcacatttcattgttgatgagagcaacgagcagagttggaccctgaggtccttatctgaatcgagcattccacgttattcactatgcaaagaaagagacgtgaacttgaagtatgagaaacataaaaggtggtcagtgggatgacacagaaaataagagggcagatgggaagagcatgggtatagagaagtctcctgaccatagcttcatccaagtagaaacattcataatttagtttagcatgaatatgatatttgcctgcaatagacgactaacaagagtgatgccaaccaatgtagtttctgatttactgggcatgagccctcatatttcaattt

SEQ ID NO: 29817 - DNA, 704 bp, Zea Mays
tgcggctgtattctcttcgctgttgagaccgcgcgcgtgcgcctgaacgaagctacccgcaacctcgcagcgcgcgcccgccgccacaacctcgtcggcaccgcgcgcgccccgcctccaccccacgtggcgccgacaaatttctagggtccgttatccaaacagccagttcacccgttccttatcttccgtcgttcagccgacgtcctctctctctctcgtggcaacgactgggtgacctccccgcccccgccgctctacaccaggtgcccaggtcttcctcgggcccttcgccgaagagcagccaacaggtatgcgcaccccttctcttcccttcccgctgtgcgaagctgaggacccaaaccctagctgacactgttttggctatttgcgtttcgatcagatctaattttaggtgtatacatgtagtattatgctttctaacttgattttcttgcaaaataaaaacatgggtccgctcatcttccctactgggtccgcctggcatatgtaggaattttagctatcttttagccgattgaatcaacttctagaatcactacataaacttgtattcgttgagatttaattctttaggttggtgacatattttgccagattactgggtatattgtcagggtatattgtcagctatattagtctactaatggattttgccttttcttggtggtagctttaactgc

SEQ ID NO: 29818 - DNA, 462 bp, Zea Mays
ctctctctcttacctgcgggcccaccccacaggcgtctcttctgcctcccctctctatcttcccacgccgtcgccaggaaaccagggtgcgcgcgccgcgcagcatgcacccctggccgtccagctcgacagcagccaagccgccacgcccaggcacgcaccgaccggcgcccaggccgatgccctgcccctgcgcgcccgcacaaccgaccgcctgacccgcgacaccgacgcgccaggagcagctgatgccgctttgtttaggacaacaccgcaacactgatggagttggacgatttcatcaggctggactgtatctggatgggatggactctactcgtaagtagagagagtgcttgtcttgtgtaatacccaaaagtgtaaacagtgaaaatagagatgagctcaatattttgtgacctatatttatcatctcatgtgaacacttcatttaaaagtaaa

SEQ ID NO: 29819 - DNA, 865 bp, Zea Mays
gctagctgtaaacaggcccggaagaatattgcgctcctgcctttacctcgcgtgcgcgacaactagggcgaccgccgtcgctaaacgcccagctgcccaggtcttcgtcgggcccctcgccggcgacgagcactcaacacactcaccagagccttcatggaggcacatcttccagcctttaaggaaaagattccacacttagaagtggtgacagagcttgtccgcggtcaacatcctaacttgaagggaatttacaagaaccataacgagcgagtggtctgcgtgagaaatttaccgccagaagaaatactcctgcaagccaccaggctaaggaactctctgggcaggaaagtggtgaagctgcggaccagacacgtaacgaagcggcccagtgtccaggggacgtggacgacggagctgaagatgtgaagccaagctagcagtcaaggtgtttcggtgttcttggtggtgtgatcgcagagaaatgtcagctgtgtcaataacttcggtagagagctgccgttatgccagcctatttcgatagccaaactatttacaccttttgttccgactaaggctgcctcgagcagtattcggtaaagggtccggtacccttgactctaacaacacctgctaaggtctagtttgggtactttagtattgaagtgatttggagggattgaagagtatataaatcccaaaaaaatcaaaaactctcataatacatctcaatccactacgatcccttttattactagattacctaaactaggcctaaatgagcctgtaaaatttagaggagcctcgtcgaacgccatatctagagttcagctctgcttaggtgtgctgcaatcaacatgaaaga

SEQ ID NO: 29820 - DNA, 236 bp, Zea Mays
gaaatatccaatcataaaaaacaaaaacatgtgaccataatacattccatgtgatcaagtaaataaatgctagaagaaaaagctagtacaaattggaagaaaattatttggagcatatagcgtggcctatgccacagcccaaagagttaatgtagaccacaacaataccacttgttacacagagttctggagatttgtggaagttcgtcaacaaacaaataaagattaaggtaaac

SEQ ID NO: 29821 - DNA, 1666 bp, Zea Mays
aaaatatgcaaaaaaaaaaatctattgcctgactccttcaaaccctgcacaccccacctgccttgtaccaaattcccctgacccgtcggtctgctatcccatctgagctcacggcgatcctctttctcctcatcggcatgagcggcttcttggcggtggtcggcaaggtcggcacctttctgctgtgggtgctgttcctggtcttgcagaccgccaccaggatcgtcggcagcctccttgccagctcagctgagcagcaggatgaccaccatcaggaatcggcggcggcacggcgcaggtcgccgccagcctccccacatcccgaactttacgagccggcgtctgcgtctctggcgcagctgtgggacccaccgcctcttccgcaccttgcttttgctcccgctgcggatgagagctcttcgtcctccagcttacggcggcgtgccagtgcgccgctgccccgagcggatgaagactttgtggtgccatcgagcgcttactcgcgtccaacagtgggggtggctcatacacactctgtgtcagcaccaccactgagggcaatcgagacgcgggcggtgccatctaggctggtgacagccgggggtaagcggccaaggctggagaggaagtactccaagattgttgaccagtaccgatccttggatgaggttattgaagcattagcacaggctggtcttgagtcttctaatttgatcataggaattgatttcacaaagagtaatgaatggacaggaaagaattgcttcaatggtatgagcctgcataatatcagtgacaacccaaatccttatgaacaggcaatatccatcattgggaaaaccttatctgcttttgatgaggataatttaattccttgctttggttttggagacgcatctactcatgaccaagatgtatttgccttctatcctgatgaaagaccatgcaatggttttcaagaagctttagctcgatacagagagattgtacctcatcttcgcctttcgggtcctacgtcattcgccccaataattgacatggccacaaccattgtggagcaaagtggtggccaataccatgttttagtaattattgctgacgggcaggtcacaagaagtgtagatactgaatttggtcagttaagcacccaggagcaaatgacagttgatgctattgtacaagcaagccaattcccattgtctataattcttgttggagttggagatggtccatgggatatgatgaaggaatttgatgacaatataccagctaggtcttttgacaatttccagtttgtcaacttcactgcgatcatgtcaaaaaagataagtcaaagcaaaaaggagacagagttcgccctttcagcactaatggaaattccattgcaatacaaggcaacattagagcttggaattttaggacgtcgaattggagagtcacctgagcggattccacttcctcctccttttgcaagttatagcacagtttcaagagcagaaccatctcgggcaaatagttatcgaagtgtgccttcacatccaagggaggagccagctgtaaattcaactatcacagcatcagttacatccccatcagctgccgaaagtagagttttagaaccccagagataagctgaatgcaaaactgcttcgaagatattgagtgt

SEQ ID NO: 29822 - DNA, 1727 bp, Zea Mays
gcggggccacttgtgcgccactgccgttgccttctatccggcgccatctccaccgtccactgccccatccgcagttccacaccacactacgccgccgcagccaggcagacagaggcagccccctcatggctgcccacgccgtcaccccgctcaccatctgctgcctccgccgcggcgttcccctcaaccacagccgccgcctcctcgccgtagccgccgcagcgccagaatcgcccgcgcctacccccgcgccatcccagttgccgcttcccccggttcctcctcgcaagggctacttcccgaagcgtggcgagacagtcgagctcacctgcgaggcgctcgcctttaagggcaagggcgtctgcaaggtcgcgggctccacgttcgtcctgctctgcgatggtgcgctccctggcgagcgcctcatcgcccgcgtccgccgcctccgccgtggcgcctttgccgaggccgccaagctcaggaccctcgagccacaccacgacgccatcgaggcgccctgccccctcgccgctgactgcggcggctgcaagacccagtctctcgcgtacgccgcgcagatccgccacaagcatcaccaggttcgcgacttgctcgtgaactttggcaagtttgatcccaagcgcctggagagctcggagccggatgatatcctcaaacccaccgtgcagtgtgacgagatattccgatggagttctcgtttgggacgaagagatgggtgcaaaaagagttgaaggacaagggtgaggaggtggaggtgaagcaggaaacgaatgaaactgatggatatgcgcttggactgcacgcaccagggttcttcgacaaggtgctacatgtgcagaaatgttttctgcagagtgagccagcagataaggttcttgcagttgttcaagaaacctggatggatcctgccataggcctcacaccttatgatgtccataagcatgttgggtttctcaagcatctgatgataagaactggaaggttagtgtcataaataatgtgaactcgtctgttggtaattcatctgtgggtgaacaagaatatactttgtacgggaagccaaacattacagaaatgttgagaggacttgcgttccagatatctgccaactccttttttcagactaatacaaaacaggctgatgttctttacaagcttattgaagattctgctgggcttaaaggagatggctctgaaattgttcttgatctgttttgtggaactggaaccattggtttgacctttgcccgaagggcaaagcacatttatggatatgaagttgtccctgaagccattgaagatgcgcgaaagaatgccaagttgaacggtatcaacaatgcaacatttgttcaaggggacctcaataaaatcaatgaatcattcgggaaggaatttccaaagcctgacataatcatctcagatcctaatcgccctgggatgcacatgaagttaatcaagtggctgttagaagttaaagctcctcgaatagtgtatgtctcatgtaatccagctacttgtgctcgggatttggactacctatgtcatggcgtggaggagaaagatttgagaggattctatgaactgaagagtgtaattcctgtggatatgtttcctcatactcctcatattgagtgtgtatgcttattggagctgcgttgattttcagttttggtcaggtctctgaagcggatgaaatttgaagcatc

SEQ ID NO: 29823 - DNA, 884 bp, Zea Mays
ccctggtccatcagcatttcattcaggaccatagtgatggttcagaggaaatgcaagttaataatgaggcaccactagggtgcctcaagccaaatatttctcagtataactctccagagcagataggtggtgttgaagggtttcctgagaataatgaaaaaaggaatgatattgttgctgcggaaaaaatctgggaggcgactccaaaccaaggccttagcaggcccatctaccgacaagaattttatgcctggccatatatttattcagattatcaaatcgtgcgtcagccactaccttatggttttgacaaccaattttatcagataaatagggaccacggtttccctattgagaacagggttcaatatcttccattcaagatgctccctcaaggtcacccccatgatgcacagcttcaggaatttcagtattttgtggttattgactttgaagcaacctgtgacaaggtgaacaatccatttccacaagaaatcatcgagtttccatctgtcttggttaacagtgcaactggaaaactcgaagaatgcttccaaacatatgttcggccgacgtatcatcaatttttgactgatttttgcaaggagcttactggcatacaacagattcaggtggacagaggtgtgcctctaggtgaagccttactcatgcacgataaatggctagaggacaagggcatcaagaacacaaactttgctattgtgacctggtctaactgggactgccgtataatgctggagtcggaatgcagatttaagagaatcaggaagcccccttattttaacaggactgatgcacgggtcacctggttggtactggccctcgccgtcatgattctcaacatctttgggagcttgactggc

SEQ ID NO: 29824 - DNA, 189 bp, Zea Mays
agtcaggagaaaaatactgaaccaaatccacagtgactgattcaggtttgcatttccatgcctgatagacatagttcgaacacctttttctctctattccaaacaaggatagctcaagcattcctgaacaaatttgttccccaaccatggctcttcaggtttactataaaaatccaggacccaaaatat

SEQ ID NO: 29825 - DNA, 967 bp, Zea Mays
ttccaccctccttccattccgttcggatacaccgtctcgtttctctctcctcccctcgcccgtcttccctcctgtgcgagctcagctcacggtcctcccacccccacgagcgcctccgcggcgaggaagagataatcagcaggcggagcggggggcgcgccgatggatctggagaggccgccgccggcgtcggcggcggaggcggccggggccgcggcgtgctccatctgcctggatccggtgctcgcctgcgtcgcgggccggtccgtcgccaagctgcaatgcggacacgagttccacctagattgtattgggtctgcattcaatgcaaaaggagcgatgcaatgccctaactgtcggaagattgagaaaggtcgctggctttatgcaagtggacgtcacccccctgctgatattgatatgggtggatgggtgactagcgacaactatgatatcacctccgagcttccttttggatttcaatggtgtccctttagtggattcacccagctagcatcaatgttaggggtgcgtgaagctgagccaacttaccacacaactggagatcactcaagtgctgcaagcagttcacttgtttgcccatatcttgccctgcgtggttttctccatcctgttaatgtgccttctacttctaattctggtgctgaaagcacttcatttcatcggcactcaactggcttggaaggacatgtcactcctgatttgaacaatgctccagttttccatgctaccgagtcaagaaatcatgacagtgagcacagacatttgagtaatcttcctgtatcaggaactcctgaatattctatgactccatttgggataggagtaccaagatatgacagtggcagccaacagggattccgatcatatgcacatcatcatcccctaatccatagaattggagcgcattagaagaaagattggcgaggttttctgccttgttttt

SEQ ID NO: 29826 - DNA, 3279 bp, Zea Mays
caaactcgctgccacgtcggtccgaaccaaatccagcaccctgcaccctcttcctccatcgcaccctatcctcctcctccccggtccggcggtccccaccggtccaccacggcaccaccgtctccccgccccccgcgtccgatcaccgcaccggcgaactcggcgagccgctcgtcgctgcacgctaagctgggaatggccgctgcgctcgccagctcaccgcttgttcacctatccacctcccgcctccgcctccccaggccccgggcctcctccagttccgctccaggctgctcgatcggcgtgtgcttgggatggaggctgaaggtcgggtggagggctctgaggcggtgcgaccggcttcgatgcttctccaccgacggcgacggcgtggaggagggggagaagcgtggcgaggaggaggcctcggcgacggcggccccggccccggacccagccccagcggagacacaggtgggcgctgcggaggagctggcgtctgagcggagccgatcagggagcttttcgtcctcatcctcgtccgggaatcctggtgtatcaagcgagccaccactgttgagttttagtgttgataatatcgatacagttaaactattggaacttctaggcccggaaaaggttgacccagttgatgtcatggcaattaaggaaaaactctttggttatacgacattctggttgacaaaagaagagccttttggtgatctcggtgaaggagtccttttcattgggaatctccgtgggaagagggaggaaatctttgcaaaacttcaaaggcaactacgcgaacttgctggtgaaaaatacaatctttttatggtggaggaacccaattcagaaggggatgacccacgtgggggaccacgtgttagttttggtttgcttaggaaggaagtttctgagcctggacctactaccctatggcagtatgtcatttctctgtcacttttccttctcactatgttctcctgtgttgagctaggaattgcatcaaagattagcagtcttccaccagaaattgtttcatatttcactgatccaaattctactggaccccctcctgatatgcaacttctgctcccatttgtggaatcggctttgccagtggcttacggtgtcttggctatccaattatttcatgaaattggacactttttggcagcatttccaaaaaatgtgaaactaggcattcctttctttattccgaacttcacccttggaacttttggtgcaattactcagttcaagtccattcttccggatcgaaagacaatgtttgacatatcaatggctggtcctgtggctggagctgcactttccttttcaatgttctttgtaggcttattactctcttcaaatcctgttggggcaagtgatttagtagaagtacctagccagctgttccagggttcattattgcttggactcattagtagagcaacacttggatacagagctatgcatgctgctacagtttcgatccaccctctagtgattgcaggctggtgtggtttaactactactgcatttaatatgcttcctgttggatgtcttgatggtggaagagcattacaggtaaaaattcctgttaagttctgattaataaagccagaatatcagacatccacgctaccagtacttgagatgttctacagcgcctaacactgtttttggacatgcttttctttgacctgttatgctaagtttctaagtaatgtgccttgcgatcccataaacaagtttagactaatgcggtaatgcctgagtaattatacttgtcttccacaaaatatgtttcgtattttttacttttgtatccaagaaatcatcactaaaatattactatttgtttagagtacatattgttttcataggattgttagctatcaccaaacattattatataattatgttaatatggtccagagtctgggtgtgtttagactacagcaaggtacactgttacagtattgcagatgcttttcctgtgccgctccatcgtagtgtgtgtcaggcatcaacctgacattatacgctaccggtgaggatgagagtcctatgaagaacgagctcaacacaacaccaatacacacgagaacacttggaacacgaatggttttggtgctgcctgaaagcacaacttttctgaactcctattgcttcttttattctgaatacaaagagcagaaatgcttggcgcttagccacacatcacgctacaaacgtgtccatccccatgtccacgatgccgctaattcactggtcattccagggctgtgtgtgagctaatcttgccacgccctcctatgcgcaaggccaccacaggtgggagctcgtgcacatgcagaattgaaaacagctaaacatgcaactaccatgcacacggattactaacaaattctcttaagccttgcgcacgttcggtacatcaatgaccccgagcttagtacgaagttcactgcaccgctcatgtctccgggcctttgtcaaattgtagccagctgcttaacagtcccaatggactcaactgtgaccctgttctccttgatgaattcttgaaaaaatgatatctaacatcaatcttgctacgatcatagaaaacagggttgtactcagcttcgcatgatgacggggctaccaccttctgcttttgagactgccaggttatgatgttgctgctgaggaagaacaggacactagagggtgcttttggcaaggatgctttgtttggatttggcctcacaacatactcgttgcttggactaggagtgcttggaggaccactgtctcttccttggggtttgtacgtgctaatttgccagagaacaccggagaaaccatgcttgaacgacgtaagcgatattggaggttggaggaggacggccttgatagcttcagtgtttcttgttgttttgactctcatcccgttgtgggatgaactcgcggaggaactaggtgtagggcttgttacttcgttctgagatacggtccttaccgatagaattaggccgtgatgtagctcaattttgtattgaaatgtagcgtcccatagcgggactgctgtaaaggcatgtgcagtttcctgattaggtgagcaatgatatcacctatgcgagtgtcatgaaattgtgccaagacgctgacgattattatcaattacatacatgtacgcacattttgaccatacgagtacagatacacacaacctacccttctatgagcatcttcaaacgattgggcgtgaagccatgaagtcag

SEQ ID NO: 29827 - DNA, 1778 bp, Zea Mays
ccggtccggcccggtggcccccctcttttgctaggcgcctctgtccccgcgaacacttcccgatagattccattccatccccctctcctctctatcatcctcggcatccgtcccgctttgcccttgtttaattccaaaggtttcattttctgcagggataacatttgtggggggtggtgagccggccggccctatagaatcctgctcctgctcctgcctgcgcccgtccccttttcatgttgctttccctttcctcctcctcctcttcttcctcctcacctcacctcctatttagccgtccgaattgcttgtcagcatcttcccagcttcttcttcttcttccaaccgcgctacgctctcttgtccccggtgctcgcttggattcttctctcttcataggaaggaaggattggctaccgagatattcctactagggctgtagtgcatcctgcgcgcttggtttattctgcagccagtaccagtaccagtaccccagctgagccggtgaggagaggagatagagagagcgagcgggagcgggagcgggagcgggagcagaggaggagggccatggaaggcgacagcttctccggcggcgccatggccaacggcggcggcggcggcggcggcggcagcgggcaggtggtggacgggaagctgatccacacgttccacaggagcttcgtgcaggtgcagagcctgctggaccagaaccggatgctcatcagcgagatcaaccagaaccacgagtcccgcgcgcccgacaacctcacccgcaacgtcggcctcatccgcgagctcaacaacaacatccgccgcgtcgtcggcctctacgccgacctctccgcctccttcgcgcgcaccatggaccacgcgtcctccgagggcgactcctccggcaccggcaataacggccgcgccggcgccggcgccggccacaagcgcgtccgccccgcctagagctagcttttagtttttttcttcttcttcttctgctgggtctagcttggcgtggcaatcctaggtgttgccattgccactaggaggcgtatttagtcttttctcttgcggttcttcttgttcgccttcttcctttgtgctcgctagctgcgacgaacgccggtgattagtgtatggtaatttagtgtcaaacagagagctgccatgtggatgttgctcctatgaccacgattaagacgatgaagaaacaccagagaagcggcacacggtaggcagccttgctgctgcgcttagctagcaagcatcttgaatggaaactattttgcagcgtactaggacacactcatgtcatggtggagcgaatgcgttggaggcgaggctggctgctcactctattatgtcactgcagatgggtcaggtcaggtagtaggcagttcatgttcatgttcagttcggcagggcaggacagatcttgagagggcaatgtttaccatctgacactacccctcgccctttccatccacctgcctacctacctgagctccgaatcgaatctggtgaagtgcatggccactttggagacgcgcatgggtcggtcggtcgatcgatcgatcgatctccccaactctgaatctgatgattgagttgcaaaatggtgtctagtactggcagtgcaaagtgcaatgctttacagctttacaaaacctgctcctcgctcgctcgctggctcgactcctgccgtgtctttccttcctgtcctgatgagttatcatgaaaaaaagctcagcaacatggccaagctagctagtacgttgttg

SEQ ID NO: 29828 - DNA, 2518 bp, Zea Mays
gttctatttaacccccctcgtctccccctccgtttccagcctcaaactcttgccctccccccggcaccacactagcctagtgagaagtgcagcagcagcaccagcggcagaagtgttacttagttgctcctcctacctgtgctgctgcgcaggagcagagcctgaaaggacgacggccgtcggcgtaaggggagcgagcgagcgagcggccatgaagtacgtgctggtgaccggaggggtggtgagcgggctcggcaagggcgtgacggccagcagcatcggcgtcgtgctcaaggcctgcggcctccgcgtcaccaccatcaagatcgatccatacctcaacaccgatgctggaaccatgtcgccgttcgagcacggggaggttttcgttttggacgatggcggagaggtggacttggaccttggaaactacgaacgttttctggacatcaaattgacccgcgacaacaatataaccacgggaaagatcttccaggctgtcattaacaaggagaggagaggcgactacctagggaagaccgtccaggtagtgccgcacatcacggatgagatacaggactggatcgaacgcgtcgcggtggtcccagtggacggcaaggaagggcctcctgacgtctgcgtcatcgagctcgggggcactataggggacaaaatcttttcgccgcataacgacagtggcattcttgatgcaggggatatcgagtcaatgcctttcattgaagcgttaggtcaattctcgtaccgtgttggacctggaaacttctgtctcgttcatgtcagtcttgttccggttctaaatgtagtcggtgaacagaaaactaagcctacacagcacagtgttcgagggcttagagggcttgggttagcgccggatgttttagcatgtcgcagtactgagccattggaggaacatgtgaaggccaagctttcacagttttgccatgtcccggaccagaaggcccatgaagcgattctgaaggttttagacctccagtatgatggaaaggtgcctcgggaacctgagctaacaaagtggactaaaagagccaccaagtttgacaagttgaagactccggtcaagattgccatggttggaaaatacactggcctgtcggattcctacctgtctgtcataaaggctcttttgcatgcatcggttgctatggaaagaaaacttgtagtcgagtgggttccttcctgcgacctggaagattcttcagctaaagagacccctgaagcccataaaaaagcatggaaattgctgaagggcgcagatggcgtactcgtccctggagggtttggggacaggggagtccagggcaaaatcctcgccgcgaaatacgcacgcgagaacaacgttccttatcttggcatctgcctgggaatgcaaatcgcggtgatcgagtttgcccgctcggtgatgaagctacgaggtgccaatagcacggagttcgatccagctacgacgtcaccctgtgtcatcttcatgccagagggctcaaaaacccaaatgggagccacgatgaggcttgggtcgaggaggacctatttccatgtcagtggctgcaaatctgcgaagctgtacggcaacgccagctctgtagatgaaagacatcgccacagatacgaggtgaaccctgacatggtcccagactttgagaaggccgggcttcagttcgtgggcaaagatgagagtgggaaacgcatgggatcgttgagcttccctctcacaagttcttcatcggtgcacagttccatcctgaattcaagtcgagaccagggaagccatctccgcttttcttagggctgatagccgcggcgtctgggcagctagaaccattgcttcagcgcagcaatccgacaacgaaagcatgttcgatcagtaaagtcccgaaactgaaactgtaccccactgggcctgtgaataatccactgaacagcttggtgaacgggtactacccaaatggcactgggatccacacctagaagcgtagcgcttagcgatggtttggttggtatttgctgctatggtttttttgcttgtacccctcctttttcatgtgttcctttttttcagtttgttatttgtctctgatcaactgagagaagagaaggctaagattcagcaagcccccagctccagcgacacatggttccgacatttttaacgaggaacgccttccagtccgttgaagcgagctagccatagggtggtgaggtctagtgtgatgttgttgttgtttttttctctttcctttttttttggcctggaactaaggcgcgaagtgttttgagtagcgctagtagagcctggaagaagttatctaaactatttgtacattatggaagaacttatctaaggactgaatacacaaatgcttggccatgattgctttgttgccacaatatgaacaaccacgctcagatgaagagtattggtgttgttaaaaaatgccagtgaaattgttgttgttaatgtttgtgcctgtgttgccct

SEQ ID NO: 29829 - DNA, 5626 bp, Zea Mays
atgtgcaggagcaagtttcttcgttaaccacctcgcccttcgccttcattccttcacccggacgcagcggtggccaaacaaataacacgcctcgacgacgcggcgcgctccgtcttcctccctccccgccaccttccctccaaatcaaaaccagccagatcgccgcctcgtcctctccctctgccatcctcccgggatcgccgtcgggctcgccgcgccggaaccctagcggattgtcattcgttcgcgcgcgccccgcctcgccatggaggacttcgcgcgcgcggtggaggacgggctcaagctctcgaagcggctcgtgctcccgggaggggtgccgccgccgcgcccgccggcggggatggagcgcaccatgtcgtccgcctcggcgtcgggtcccgacccgcggctgctccccacggcgccgatggcctacgcggtggtcaccgacccggccgccatcgacacccccgacgtgcccagctaccaaccctacgtctacggccacctcgacccgcccgcgctcatcccgctgcagatgaaggaggtcgacttggccgtcgactgcgcgctcgacgccgcgcacgtcaccctgcgcgcgcgctggtggctgcactgcatcacgcgaagccgcgactgcgacgtgcgcctcgtcgtgcccttgggcgagcaggagcagggttcaattctaggcgctgaggttactgtcggaagaagatcatataatacccaagtaatcgaagtagaagaaactttggagaatcatgcaaaaattgagagtggtggccttctgaagccacatctgtttttcttgacaatatctcaggttgagggaggagcagatatctgtgctacatttcgatggtctcagaagttactatatgatagtgggtgtttctctgttgacatacctttccattttccatactttgtcaacccattaccaaaagtgttcatgaagagggaaaaagttcagttgactgcgaacactggtttcagtaaagaggtttttctgcaaggaacaagccacccgttgaaggaaaagagtaggcaaggagataaattgtttttcctgcatgaagccattgttgagaattggtcgagcaaagtttttaatttttcgtacagtgtttactcaggtgatttgtctggtggtgtgtttgtgcaaccctcaatattatgtgactatgatgatagagatagcttctgcatttttcttttacctggaagtggcaacagaaaggtattcagaaaagcagttgtgtttgttgttgacacaagtggaagcatgcaaggaaagcctcttgagaatgtcaagcatgcagtttctaccgctctttcagagcttgtgcaaggggattacttcaatattataacatttaatgatgagcttcactcattctcttcctgtttggagcaagtaaatgacaaagcaatagcaagtgcaactgattggatgaatgcaaacttagttgctgagggtggcacagatattatgcatcctttgagtgaggcaatggcattactatcaagtgttcatgacacacttccgcaaatatatcttattactgatggttctgttgatgatgagcataacatctgccaaactacaaaaaccgaagtcaccaacagagggtctaaatctccccgaatttctactttcggactaggatcatattgtaaccactatttcctgcgcatgctagcatcagttggcaaaggacattacaatgctgcacttgagacagcatcaatcgagaatcagattgttaagtggttcaggagagcatcaagtacaattgtggaaaatatctccattgatgctatgacacatcttgatgaatttgaagtggattctgagtacattccggacctttcagcaaattctcctttgtgtgtgtctggaaaataccgaggaaaattcccagacacagtgaaagctaaaggttacttagctgacatgaaggaagtcctgattgaactgaaggtccaacaactaaaggaagtaactcttgacaaagtattggtgacacaacatattgatcttatgacagcaaaggcatggctttctgcggccaaacaactggagagaaaggtgattaaattaagcatacaaaatggtgttccatcggagtacacagatatggtattacttcaaacaaatttggacaatactggaacacaaaaggtcaagcaaaaactaaaaggacagaaaggcagagatgagcaacagatcccgctccatgggctgaaactgggattcggtaacaactaacaaggacgctacaagggaaaatctcgtcacaggattttgggacgtgaactcagcagagaaaattgtgatgctccaaaagggacctggctgttgcagccgcgtcgctgactgcctttgctgcatgtgctgcatcagggcgtgcaacaggatgaacgaccagtgtgctattctgatggcacaggatatgtttgtagatattcaagatgaaaagattttgaaacattttcgaggcttaagaactcggaagataaatttacctcgcaacatcaactcatgctataacctctttttctctcaggtggtccttttcatcggcttgcaagtaagattggtccatgaagtgtagtttatgcacagctcatccctgcttctggtggtactgtcaatgtaaggaggggatcagcatcccttgtctatgcgccgggcggccccattgtttctgcaccaagcccgtgtaatcaggagctattgcccagtgacgcacctttcctctcaggcttgttggttgaacagctctgataatgaagagcccagtcagagtttcgcttacggtgattatagaagtcgtcgtctgcttcccttgatcacacaagcattgcgggcttcgaactgggacgctgccagaaatataagcttcagggagtgtgtgaggttatacgggtcatctcaatcagttggtttgtttgctttgatcatgcaggcattcttgccacggagaatcagagaggtacggtgcttgattcggagcattgttgattactgtggaaatgctgggtcagagttgtttgagttggctcctatgttggtcagcaatttgggtcagtcaatgaccctgttacaagtttatgctgcagtcatccgtatttttgtagagtcttcgatgtttgaggacgctcttctcacttatattcaggccaagaacattggtgttgacagacgtttgtgcaatttcttgttgaagtgtttagttgaggggaatcaaatcatgtacgctaggagcttatttgatgacatgaaaagttgtggtccttcacccaatgtctgctcttattcaattttgatgagtatgtacacacatggagagagatcatgcttggaggaagcttttgagcttctttgtgaaatggaatcaaatggtgtgagaccaaacgctacaacatatggaacttatctctatgggctttgccgttccagacaggtaacatctgcatgggactttcttcaaactctttctcagagtggaggcccttgcagcaattattgtttcaatgctgtgattcatggtttctgttgtgaaggtcaggttgacaaagccatagaggtatttcatggaatgaagaaatgtgggtatgtaccagatgtccatagctacagcatattagttgatgggttatgcaaacaaggggatttattgaaaggttatgatatgcttgaagaaatggcaagaaatggaatatgtcctaatcaagtgagttacagttcacttctgcatggcctttgcaaaactggacaggttgcattggcattgaagattttcaagaatctccaagaccatggttttgagcatgaccagataaattacagcatcattcttcatggctgttgccaacacttagatctcaaggccatctctgacctttggtttgacatgattcatcataatatcgctccagatgtttacaactataccagtctgatctacgcattatgtagacatagaaacctccaagatgcattgggagtgtttgagctcatgcttgaaaatgggttgtctcccaacatcgtgacatgcacaatcctagttgacagctttagcaaacaagggctagttggtgaagctttcctattcctggatagaatgcatcagtcattgggaatcgtcccaaacctttgcatgtacagagttatgatcaatggcctttgcaagaccaacaaatatagtggtgtgtggaatgtttttgcggacatgataaagaggggctatgttcctgatgttgtcctgtacagtattattattgagggcttcgtgaaagctctgaagttgcaggaggcgttaaggttgtaccataagatgttggatgaaggtgtaaaacctaacatatttacgtattctagcctcataaatgggctgtgtaatgatgatagacttcctgaagctatgggattgattagggatatgattggggaagacctgttacttgacaatgttttgtacacatctatcattgcttgttattgtagacgtttaaatatgaaggctgctatggaaatggctcaaagagatggaaagaagcggtgtgttgccagatgcttttgtatatacttgtatgattgatggctatagtaaacttcctgcaatggatgctgcacgcttgatgatggaagaaatggaaaaaagaaagcttaaacctactatagtaacctacacagctctcattattggataccttaaaatgggggatgagaaggaagcttgtatgatgtacgagagtatgcgtcatgtaggcattgctccagatggaaagctgtgttgcattttgggcattggcaatgacaggggtgattgtgatgattctcagaaagcgaagggtgtaacataattacataattttcacagagatttattaacttgatgaagggacttctctatgatggctgaatggctctgagctctccagtgcaggacacactgtttgctccatttgtttcctccacttccacactgccatcctatggacaaggaatggaaagcagtaacctgaaatgtggcagttaaatccgtggacaactgctgagggtgtgaccgatacaggttagcctttgtattgtgcaaataatcagataagaagtctgcattctgaaaatgcttcttttgttcaaagtgttacatcaacagttttaacttccggttacttgagatatagcatcatactgaaaatttccctgcttttcaagtttcatgtttagaaaggttttctccatttgtttctaaatacatttaaccatgctgttattttctagattgttttcctgtagaatctttttttaccatctgtagcacctgtaaagctatgagtttgacagatctgaaagatcacagcaattcatgaaagcaattaaatggatgcactccacacatgaagccaatgccatgtgcccatgtcactaataagttgattgatgcttcatggaccgccttccctgccttttcatcctcttcgggccatgttcggtaggcatggatttaatccccaggtggaattaatccagacgtggattgaatggatcccctgttgtcactctttccctaggtggttcattaatccattacccttgggctttggactctct

SEQ ID NO: 29830 - DNA, 2939 bp, Zea Mays
cttcctcctcctcctcctcccccttcccgagctcctctctcttgccgtccacgctcgactgcgcgagacactggtcaacgcccgggtggcaggcggctctggtggtgtgttgtgtgtgtggtggtggggtcgggtgagtctagctccgtcgcttgcgccggaagaacttgtcgggagctgtctctagccctcgggttccatggggaggaacggtagcgtgaagcgctcggcgtcttcgagcgctgcgggtgctgctgcggggccgccgtccttctctgtgaatcccgccgactaccggttgatggaggaggtggggtacggtgcgcacgccgtcgtgtaccgcgcgatcttcctgccgaccgaggatgttgtggctgtcaagtgcctggatctcgatcagctcaataacaacatcgatgaaatacaaagggaggctcaaataatgagcttgatagatcatcctaatgtaatcagggcttactgctcatttgttgtagagcacagcctctgggtgataatgccattcatgacagagggttcttgtttacacttaatgaagatctcataccaagaaggttttgatgagccggtcattggctccattctaaaggaaactcttaaggctctggaataccttcaccggcagggtcaaatacatcgtgatgttaaggctggtaatatccttattgatggtgctggggtagtgaagcttggagactttggtgtttctgcttgtatgtttgatagaggtgacaggcaaagatctaggaatacatttgtaggaacaccatgctggatggctccagaagtgctccaacctggcactggatataatttcaaagctgacatatggtcatttggaatcactgctcttgaactagcacatggccatgctccattttcgaaatacccccctatgaaggttcttctcatgacactccagaatgcaccacctggtcttgattatgaacgtgacagaagattctcgaagtcatttaaagagatggttgcaatgtgcttggtcaaagatcaaacaaagagaccaacagctgagaagttgctaaagcattcatttttcaaaaatgcaaagcctccggagttgactattaagaatatcttatctggtttacctcctctctgggaccgtgtaaaggctctccagcttaaagatgcagcacaattggctttgaagaaaatgccttcttctgaacaggaggctctctccctgagtgaatatcaacgcggtgttagtgcatggaacttcgatatcgaggatctcaaggctcaagcatcattgattcatgatgacgagccaccagaaataaaagaagatgatgacattccaagaaacattgaggatttatcttcacggaaccatttggcaaagtcatctgcaaatgaatgcaactccagccagcgagcttttgccaccactttaaattcggatggaaacagccccaccatgaacgaagcttttgattttgatattagcgatgctgacactacaagaagggctgatggatatgaaagcaacacaaggcagaatgattcgttgccctctacatcaaagagagatccagagtcgaatcattgggcaagtgatggccagagacaactgacttctggtgggaacaatagctcaacatctgaaaggggctatggttttgagagggatgcatctgtgcaaatgatatctgacaaacaaagaagtgagatgagaaaaacagcaagccttagtggtccactttcactgccaactcgtgcttctgcaaatagtctgtcagctcctattcgatcttcaggaggttatgtagattcatcaggcgataagtccaaacgaagtgtagtagagattaaaggtcgcttctcagtgacatctgagaatgtcgatcttgcaaaggttcaggaaggtccacttagtagtctctcccggaaatcaccagagggttcactgttaagaaaatctgccagcactggtgattattttgttaatcctaagctgatgtgtaatgctaatcagctgaaggaactatgcaatagttcagtatcatcttcagtattaattccccaccttaacaaccttgtgcaacagactatgtttcagcaggatctaatcatgaacctacttagtaacttgcaacaaagtgagaaagttgatggaacacaaccaataatatcttctcaagtccgaacaatggagaatgataaagtagctgatacagttaactctgtgaaggaacggtcattacttgttaaaatttcagagttgcagtctaggatgataatactgactgatgaattaattgcagctaagctaaaacatgttcagttgcagcaagagctaaatgcactgtactgccgagaagaaattgtggatatcagggatgaggataacgaagaaacataatgaggatccatgccgtatgaattatccgcctctctctgagatgcataaattacctgcctctccctgaggtcaatggagaacaggagaaggaaagcggcggggagaacaagagaagaaaagtggaggtgccgcaaatatttgctggatctagagagtagctgcggttgtgttttttttctttgaaggttgtcttccccttgcttgctgtcatcagtcatcagtgtgtataaccgtctctttttcagtagttcgaggtttttttttgggtgactacaagatgaggcgtggtcatgctgctatttttctgtcatccccatcattggaagtagctgtgattatgtagtacgtaggctaccggggtggttaatctatgtagaattgcaggtgactgcataataaattgtattttatgtagcaataggatgtatattaaatattggcgcattcgttgatataatatcatatagggctatttgcaaacatccaaacaaggttgtttgcatatatctaataataaagtatgtatctactc

SEQ ID NO: 29831 - DNA, 802 bp, Zea Mays
ctcgtgcggtcgttacgtgctgagctcgcctcctccatgcctatataaccgggtcagtctcccccctcctcatcctatggggccgtgaccgatgccgtcgttggtgtaccgagagcagagcatggagtgccaccaccgccatggccatcctccaccgacggcgctggtccctgggctcaaacgtcctccttgtccgcctaatataaatccccagccgaacctccctccatctgtctgtgcttgctccaaatatccgcgccaccatttgtcaccaagatagccggggaggagaagaaagccattgtgctagtgcctcatctgcgcgggcgacgaagcaccagggagcaacatcgagatcgggcggagtctacacggcgccgaatcggactgaagagtgggcggatcaagggcaatttctcgccggtgaagaagtgttaatgcgaaattgcgaatctacgtgccgccgtgggtggccctattcttgtctccgtctccggtgtggagctattttattgattcgatttcgtttcctctgcacgtagcacctaaccgggaccgaattaagcaccaagaccttggatcgcctgttcgctgtcgtgtgccacgacaccgccgcctctgggtgggccgagaaaagagagaggaaggagagatcactgtggtcatagatcaaataatggacggacaagattgtgttgtagcgtaccctatcaccccattttgatccagtcgtagatcatgggatcgacggtcctgtgggatcggatgggtgcacaccgttggatgatgatatgatggtctc

SEQ ID NO: 29832 - DNA, 3969 bp, Zea Mays
ctttgttgttgttggaaccgagttttattgaggtacctccctcctgagattggttccctcaagaagctccaagaacttgacctctctttcaacaaattgaaaaactttcctaactgtataattgagttgagtgcattgaagtttctcaaagtgaccaataataagttggtggatgtaccctcgggaatctcctctttgagatgtcttgaaagccttgacttatcaaacaacagattgacttctcttggttcagttaaacttatttctatgcttacgctgcagtatttaaaccttcagtttaataggctctcccattcctatgtaattccttcatggatatgctgtgacatgaggggaaatgttgaaaatactatgaagggttgcaagttaaagtacacaggtgtagcaaccatgaacagtttagcagaacctagtacatcgagtcatgcttgtgacagcgcccttttatgcgtgcaatcagaatcttcgccaaatttgaaacaccatgctccacataaaattaagaagggctggaggagacgggattgcttgcaacaacgagctcgtcaggaacgtctggagtcgagcaggagcaagctgaatgaaaaatacatagatgaaatggctgtgaacatggctgaagatgaatgcccttctagtttgcatgatatggaaaataagctaggcatcagaacaattgatgaagaaacttcagtacaggattcgttgaaagaaacaagttctatatctgaagatctattttcaatagttgacgatgacttggatgggcttacgaaggattgtggcacgatggtacaggatcactatgatgaggagaaacctggattcaatatgagaggttacaatgatgacaattcttgtatcagtggggagcctgcttgtttcagcagaagcagggtttgcagtgttgaaaaggaactagatgatactgcttcatccgtccatgatgttggtgagattgctcgagacaattcttcagtgacacccaagtttgctttaaaatctaaaaggcaccctgatatggacagcaatcctaaaccaagcaaatgccctcgaccaattgatgaacgctcaaaactttcatataaatacagtgtggaatcattttgcagcatagatgaccatctaccagatggtttttatgatgcaggccgagatatgccattcatgtcattagaggagtatgaaaggagtcttgggctgtatgcacgggaggttattctcttggacagagaacaagatgaagaattggatacaattgcttcttcagcacaattactgctatctagtttgacaaggccaagctcttgtgaaatggaggaagatgcaggccatgatttactgagggcatcagtgctcgctttgtttgtttctgactgctttggtggttgtgaccgaagcgcttctcttgggagaacacgtagagctattgttagcttgaggaaggagcagccttttgtttgtacttgttctgctgggaacttgggcgacaacaatgaagctaagcagaccaatattctttctgggcactttgattttgctggtttgtgtaatagatcaatacatctcatcaaggaaagaagaaattcgggtattgtacctataggttcactgcaattaggtgtttgtaggcaccgagctgtcctaatgaagtatttgtgtgaccgggcggatcctccaattccttgtgagcttgtgaggggccatcttgactatacacctcatgcttggaacattgttcctgttaaaaagaggaatggctgggtaaggatgattgttgatgcttgttaccccaccaacataaaggaagagacagatccagagtacttttgcaggaactgatggttattgctggtagatactcttttaatcctttattattttggtcagcttatggtaggggtctgatgatctagtgttgcatgcacattagtcttgctgtttcagggaggcgcggacacaagtatataccactcagtcgacttcaaattgtgctcgatgatgagggctatactcctcggtgctctttcccatctgtgtcatcatgcaaagaaattgaagttacaccttctagttctgtctatcactgtaaaattggtgctgttgatgctgctgcaaagatacgatatctggatactcgtagggtctcaaatgatgaagttaaactttttgaatacaagcttctgggggaagtaaggatgctgggtgcgctaaggaagcacagatccatagtggacatatatggacaccaactttcatctaaatgggttcaagtcgatggtgataaagaatataggatattgcagtctataattttaatggaatatgtaaatggaggttctcttaagggatatttgacaaagctactgaaggagggcaagaagtgtgtccccattgatctgtcagtttacattgctcgggaagttgcttgtgcattgttggagatgcacaagaagctagttattcacagggacataaaaagtgagaatgttttgattgatttggaccccaagaggaatgctggtgcacccattgtcaaactatctgattttgacagatccgttcctttgtattctttgtcccatacatgctgtatatctcagcttggtacacacccacctgatgtttgtgttggaacaccttgttggatggctccagaggttgttaaggccatgcatgaaaaacaccactatggactggaaatagatatctggtcatttggatgttttttattggagatgcttacgcttcagatgccttaccagggactttctgacactgaaatatatgatctgatactgaggaagaaacagaggccaaggctaactcaggaactagaagcattctggacaatggatgagccagctacgagactcaagttagggatcacatctgatgctcatgcagataaattgagacacctgatagatctcttctaccagtgtaccagaggacatgcatccaggcggcccaaagctgtgcaaatttacaactcactgtgctccttgcccacatgttacgacatgaggtgaacgttctgatactgtatgaacgcgaaacttgatgcagaagtgcaggggaaggtcaaggcaggacatctagccagcctcagagggtttggtgctctaacccgaacatttcaccgtgagttggccttcaggtgctgccaggcagaacatgagaagtgggaccaaggctagcggctgtggtcgccagagctcctcctgagttggtcagttttgtagcggcacggcatctgcgtccacttgtagtcatcatcagttggtcagttttgtagtggcacggcatctgcgtccacctgtagtcatcatcatgtatgtgttatcacatccattgtttccccttttcatggttgctgccatcacaatggggtttaagttatcaaattaggtcattggtgccccaggggcatttgtctgctagaccgctgcatttacttctctatgtgtattgtattgtttatatctgtttagaaaaaaatgactgttgtccatgtaacaattgatgacatctgctatgtgttattgcgaggttatttgtttatgctgattttaccagccattttcgggcatgagctcttgggaaacctgtatcgtgtacagtctcgacagacaagaatatactgatgaatcttgatttatgtgtcagtcttttcaccatttattatatatatgctcgcctacatttaaaacttagtttgttactttcttttttattaaggtcgacacaaattgattaaattcgttaagatgcgcttgaatacatataacttccggcatacgaatagtataagacgttatttgagacagagcttattagtaagactcttggtcatatataacttcttttttttccacaattttaccgcagactttatattcattacttcacgcaaaacatcaaaagataaacggatctgtaatgtgg

SEQ ID NO: 29833 - DNA, 1622 bp, Zea Mays
caagtatgtgaagttgtgaacaaatgagtagcagactagcagcagtacacacgctacgttacctcttttccccttgctgaggttctgctatttttttaattaaaactaaaaccctattttatccaagccgataacttagagagaaaatacgcagatctactgcttccgccgtactgtaaaaaaacagtgcacagtactataggcagtattatccacagaaaaacgagcaagatatcatctttttttactttttggcccactgacggaggtcggaaggcatggacagatcgcgttttagaacgggtggtagctccggcgcagcccactgacgttggcgaacagcccgacgagctcttgcttgtacggacgaggcggatccggaacggcggtgaggaacacgaacttctccttgccgtcgctgtggctgcggccgacgaggcggtcgctgatgcggcgccagcggaggacggagcccgtggagccgctcttccggcaccggcgcggggacgcgggcgccggcgactgcccgccgggcgcccacaggcagtagctctccgccggcacgccctgcaggtcctcgtccccggcgccgccgccgccgccggaggcgtcgtcctcgtcctcgtcctgccacgcctgcgcactcgacgatcgcccgtccggctcccgcgcgcggaactcccgctcctccagcaggagccggcccagcggcacccgcaaggtggccgtctccggctcctcctcctcctcctcccgcagcggggacgggggccggccgaagatcgggtacacgggcacgatgcacgcgccggcggcgaccggaggaacggggaagctgaactcgtcgccgtcctcgtcctcggcctccacggctggagacaggggctccggaaggggagtggtggcgccaacagagaaggaggccggtccggccgtgtcacgctcacggtgtgggatgagccgaaccaaggcgtgaggcgcgacggatacggcacggggagcttccgtgacgctggccggtgggccgcgtcacgaaaccgggaccacgactcagtgggaaacagcgagggtagttggggagcggtgggctgagccgcccagcccgcggaggtgctgtctcgtttggggcgcaccggtgaggtgagccgttccgagggtgtggcgcgccgtgctggggcagtggggctggtgagccgttccgaggccaggccaagccaagccagaagaatgaggcgggtagcggcggtggcggttctagaagtccgagaacgcgaacgggatggggtcagcacgcgagacggacgggttcgcctttcgcggaagagaacagaagcgaaccgcgatcagcttcgagggtccgcctgttcttctggtggttcatagaacgcggacgtggcttaccgcttaccgaaccgcggcggaggaacagggctcgttggattggatcgccagcactgcgcaccgcacaccggacacgggcaggctacggatttggtgggctttggtcgctaggaaactcaagacacacgaataataccaatcatatcttcaacacactatattttttatttttttctatacaacaaagaaataatttattataataaacaattggagagggg

SEQ ID NO: 29834 - DNA, 1933 bp, Zea Mays
ctgaacggaacgcaagtctttcacgtgtagatcgggtcgcggatagttatcggttcgcgaactcggccctatataaggcgcctgacagccagcgtcaaactcatccaaattttcgcctctgctcacaactgcgccaccatcgtagttctcttcatcccgaccgtcgacgtgcatctagagctcgggagagcaggtctccggaacccttcgcctttgagatcctgcaccgggagagggtgaataaggtttttggaaagtaacctcacgcgactgctcgcgatcttgtcgtcgaaccctgcttcgacgtcatcacccctgctgcttcgacgtcgtcgaccctgctgctttcagtccgcgtcatttaccagtatactgatcagtacgcattatctgatttgactttagatttcagttcttctaatttggtgatgatttatatttgaaattcaatctaaaaaatgtctaatatttcaacagtactaggaatgcatcttcacttcaaaaggacccgatcgtttcggatcgacgtagcagccacccagctgcaacatagatatagatcgccgaccgacccatcagtaagtaggtaggggccgggccggccagcgccggcggtggtctgatagtgccacgggaggcccgtcgctgtccgtgccgcaggacgctgccgctggatcggggcaccacgatccgggcggcaattaccggcaccaaagcgaatcccagcttcctgtaggtcgggcaggcgcgggcacgccgctgcgctgcgctgctgctgataagatggtcctccctcctcacctcacaaagggtccatcccacgcgctgctcccgcggtgcactgtctggaccacagcagcagcgacccggctctcacgccccgcgcgcgtcgtcaaaccagaggacgaggaggagccaccgcactccaccagcgatcgaaagggaacttccatgcatgggctcaggctcacccgaccgcagatcgcagaagcgaaaaaggccccagccgccctgcgctgcgtgctccaccagcttttcgtggtgccgcccggccgtgcctgtcggccagtggctggctggcgctcggccggtcgtcctcgcctgcctctgcagcgccagacaccgcaggacggccgcccctgttcgcggaaccgatccgcagtgcgggcacggggcagatgccagtcggcaagagaaggagcgattgccgccgcggcgtggtgtgtggcgccaccagcgtgtttgccttttgcccgatcgggccggccgagcgcgggagtcgaatcgctgtcggatctagcccccccgcccgcgcgtggcccgctgcgctcgccgcgcgacatggcccgggcccccggccgacggacgggcccgcgcgcctttgaatgattgaatcggccccgccaagcccacatgtaggtgcaacttgcaatgcggtcgaaacggcctgatgttcatttgggcccgaggtttgtttaaggagcccaattgttgatcgtcgcgtcagccttcagaaactagattgcagagcatctttccacatggtggagcacgagcacgggcacgagcacgggtactcgtgttttgagaactacgttatcacggatcatcagatccgcaccctttcctcccgtcagcagattaggcgcgagaagtcgtggaagacccgtatcccttcccagaagcacgacagagaaaacacacgagacacgaatgtagggttgggcctttgacctctttctcttctctgtaatatgaagaggtgtacaagttccttatatatagatgtgagacaccctcaggggcaaagccggtatttacccacataaccctaactcgggttacttaacactcccccttgggcgaataccgcgaccaacacatgcctcgttaaaactctgaaaacccagtaggaaaatgtggagaaagagtg

SEQ ID NO: 29835 - DNA, 1894 bp, Zea Mays
aggcggtggagtatgccaccaacttcaactggaaactcgtaagaggaaaaaaaaacacacccgccccgccgtccacctctccgcctcctccggtgccggcgctggagcggccgacccacgcaatctatgggcaacatgacccgctcaaactcgcccgtctcccgccgcatcgtcctctccttcctcgacttccttaactccgtcgaattagctcctggtgttgatcctgaagctctggaagttgctaaggattgtctggagtccatttttagtgttaactcaacagccactggtgacgcaatacaaccaggactgttgtttgagctatttgcttctctcgaagcaaatgaaagagaccagagcgacagccaggtggaggatacatttgaactagatcattcaggagatgaactatttgcaaaattttatgctgcacttgatgaaatcaatttctttaagacatcacctgctggagctgaagatcctggtctactttcaaaagcaacacaatactttgatgatgcattactggcgatgcagaagttgggaaagaaaagggcaagcttagtagacattgcagagtcctttaaatcaagagggaatgaattcatgagatcaaaccaacaccttaaagcggtagagctgtacacctgtgccattgcattgaaccaacaaaatgccatttactattgcaacagggctgctgcatatacccttcttaatatgaacaacaaagctattgaggactgcctgaagtcaattgaaattgaccctcactacagcaaagcatatagccgactcggatctgcttattttgctatggggaattatcacgatgctctgtacaagggatacttgaaagccgccgagcttgatcccagtaatgaaaatgtcaggcagaatattgaggtcacaaaaaagaaactggctgaacaacgagtcccaccagaagagcagaacacacatgcaggccaagctcaaggaccacatccaatatttacaagtggtggtgttcctttcaatctgtttccaccaggaaatgaaggaacgcaggcacgccaagcttctaatggacttgaaggggaacatggtgaaccaggcatacacagggatgatgacgtccatataaatttggctggacccgagcaggctgcggaggctttgagagctgtgatgcagatgcttgggccacagatgggtcaacatgagggtgcacctagaggaccaggttaagcgtgggaggtaggaaaatgtgttacgtggcgtattgtggtctgcaggagtcttatacgggacattattttgtcttctccatcctgacgaagaatggagattctcgtgcgccttattattatagcagcttatctgtgtgctacaacaattccaccgtaatggttaccggcgttcaacttatctgccctgttcatattggcgtaggtgtgtcattagctgtgctggggcctgggtcttgttttgttgagacttgtctcgtaatggctgtcggtccatcatgtgatcttaaattaaagcctttttgcccccctcccctgcttttccgctgcttgtcggttcccagttgatacttggaaaatatttgcaaggttggtgaaaaaaaactgtcactggaatgaagttcatcatcgttattggctggctggcttgctggataaatcataaatgttggaattggtaaatcatatcctcttggactggagggaagttattattacgttactaagctgggtatatctaagatgtttggttcacatgtttataatgtgatgtttataatgtgatgggtaactgataacggtaaatcatgtttgtttaaatccaacgtaatgagataccatgctaagaaatgatgttggtttattcaaatttgttaccgctg

SEQ ID NO: 29836 - DNA, 161 bp, Zea Mays
tgaaaactcaaataaccttcagaattgaaaaggagatacgagtttccaaactagtcctcaatatcatttgtgcacaaaattcgttgaagagctgtacaactttcccacggcttcacattcgccactagctgactgaaacacgcactgaggcaatgattttg

SEQ ID NO: 29837 - DNA, 2650 bp, Zea Mays
ggcaggcaactgaaacggggcggagacttcgccgaggccgagcggcgagagctcggtttcttgtcggtcagctgcactctcttcgtcagtcactctccctgcatatacttatatatccccctccttgacttcgccatccccctctgctacgctttgttctgggctcttcctggctgcctcctcttcctcctcccctgtacagagagagaacccagagagagggtccagagggagcgggctctgagagaaccggagatggggaacatctgcggtggctccgggaaggatcgggtggccgaggatttcaggccgtctagcccagggacaacaatgacctccaagacgagcggcagcataaccaccagcctgagcaccacggggaagctctcctccgtgggcagcagcttcatggcgtccgccagcagccgcagcaccagcggcgggttcgacgagggggccaagtactccgacggccagatcctcgaggcgcccaacctccgcaccttcacattcgtagagctcaagacggccaccaagaacttccggccggacagcgtccttggcgaaggagggttcgggagagtctacaaagggtgggtggatgagaagaccatggcgccgaccaggaacagcaccggcatggttgttgcggtcaagaagctcaactcggagagcatgcaggggtttgaggaatggcagtcggagataaattttctaggaaggctctcccatccgaacctagtgaagctcttgggctactgttgggaggacaaggaacttcttctcgtgtacgaattcatggccaaagggagcttggaaaaccacctattcaggagaggatgtgcccccctgtcctgggagctgaggctgaagatagccattggtgcagctcgaggactcgcgttcttgcatgcatcggaaaaacaagtaatctaccgtgatttcaaggcgtctaacatccttttagacgcgaactataacgcaaagctctctgatttcggccttgctaagctggggccaactggtagcaactcgcacatcacaaccagggtgatggggacatatgggtatgcagctccagagtacgtagccaccggtacgtgtcctcatttctcccacgtaacaagctggtatgatcatacccttcttccttataatgaactgtcaacgcttcctccacgcgctagtcgtttcgaagcagaaacatacaccgcgacgcagactcggttgtctgtccgccacaatcagtataacgcggttgttctcgccctgcagacctttccacacttgattgtgtgaaacagcaggcatatgcatcgttcacgtcactttgagttatattgacacctttggtagtctccatccagctgctcacgttttcagtgtgcacagagcggacactgaaaacgtgagcagctggaaaatgcagacactggacaatgggcattgggtgtaggaacagaatccggattgcagaactgatgtgtttcatactcttaactgctagtagtagaaggggagggagcagagtcgatttgctgtcactgaattcctagagtagtggggcactagtaaaaacgacctgcaccagcagttgctgcggccaagtggataaatatcgcacaagaatcatgaacggccattccagtgccttgtcactttccaagagaaaatgggcaacctgtttttttttatatatatactcctatatagttgaagcacatctggaattctgaattcctagaaatagctgctgatgtttgctgactgaccgcgaaagaaaccgccatgtccatccatattggcgaacagggcatctgtacgtgaagagcgacgtgtacggtttcggcgtggtgatgctggagatgctgtcggggcagcgagcgctggacccgaaccggccgagcgggcagctgagcctggccgactgggcgaagccgtacctggcggaccgccggaggctggcgcggctcatggacccgcggttcgagggccagtacaactccaggcaggcgttccaggcggcgcagctgacgctcggctgcctggccggcgacccccgcagccggccctcgatgaaggaggtggtggagacgctggagcgggtggaggcggtgaagagccgggcgcgcggcggcgggtccgggtccgggtctggccgcgccggtgccgcggcgcaccaccggtcgccgcgcgtcggtggcggtgcccgtgccgcgtccaggcccgccgccaacggccacaacgccaggcccgcgcgatgacgctccggcagggtggtgacgattcttcatgtaaatggcgtctttttttttttggcctggttcgcgtgctgttcttgcatggcggccgctgttgttgtaagttgtagccaatagtgtaatagttaaaaaaaagtgctagaagaaaggaataaccattcaatcaaaaacgtgtttttcttttcgcaaaaggaacaaaggaagaggacggtttttgtgtatgtgttgttgtttttctgttaaccattggtggggggaaaaggacgacgagtttatactgaagaagatcttgtgctgaacgtgttgactttatcgttgctggatctatcaaaaatctgaagcggatcatcgtgacatgccctaacaagtgcatcgagtcaaagtggcga

SEQ ID NO: 29838 - DNA, 228 bp, Zea Mays
ggaggatgaaaaaccaatactacaatcaaattttcaccatgattgcaactgatcaatctcctatatcgtcacatgacagatcgacggaagagatggggaaggcggcagggacgcccggccacagcctggagaagccatgcctttttcagagcgctcaacgctgtgtccaagaccgtttccttggttcccagccagatccatcagcttctgacatgttaacgatccacg

SEQ ID NO: 29839 - DNA, 1909 bp, Zea Mays
tgtggctgctggtgctagtgcggggacgtcgctttgctcccggccttttaggcagggttcttggtgcaggattacgggccgagtgcgatggccgccttgctgcatggatgaaacaggggtttataagaaccttctacaggaggtagctcaaagagttggggcgccgttgccattgtatacaacagagcgatctggcgttggccacctgccggttttcacatgcactgttgagctagctggtatcacatttacaggtgatcatgctaagaataagaaacaggctgaaaaaaatgcagcttcagctgcatggtcagcactaaaacaattggtacgcgaggaagtgaattcatccaatgagacagaaaacagtgatgagcaggagcagatcaggattgcccgagccctcctcaactatcgcttgaaggagaagatggcgatggccaattatcctcatgtttcaccattccctaagaaatttcccatgcagccagagaggaagccttcttttggtcaatcttctcagtccagctactcaaagattctccctctattccgccctaaatctaactcaagatccagaccagagtcaccagcatctactgatggcgcatcacaaatgcctggccgggccatggatatccacactccaagcccaagatcaagatttccagctgcagaggcagccccctacgtgccagttgggcacttccgtatgccttgccacagcatggctccttcagtcacaattaggactgctgttcctgtgttctctgctccacctctcccaccgccgtctgcacgcccgcagcagcttcctccactcatgagccacccaccaccgattcggatggcatccccagttcgcatgaggccagcctctccaatgtttgcctcctcagctccagctcaagggccgaaacttgtgaggcctgttcaattgaaggatgtgcaagatcaaccaaggaaggaaacagctccatccgtgatccctgttcaggtaaaggacgtgcaataccaatcaaggaagagctcaatgtctcctgtgattcctgtcgtggtaaaggatgcacaacgccagcctctcccagttcagacgaaggatgtgcaaacccaaacccaagccccaaaggaatcacttgcagatccaattccagcaatcaggcctgcagtcaagattgatttgcctgctcaaggcaagaaggaagcttcagctggtgctaccagcgaagcgccatcttctgccactggcaataatggtgctatggaacgcggtacatcatcagacgttctcttggcaaggcgatcaagggctgctgtggacggggatggcgacaaggtggaagcaaagcacgaggccgaggctcaagcggtggcagaggcagccatcaggcagctggagatcaattgacttcagaaaatgcgcgccaccatcttctcccagattttgtaattagctgccttgcctcctgtgcacattccgttctgcttagtccgtgtatgtcttgttccggttagggctgtctgggcaagctgcattgtggtaggaacacctaggttttctgttgaggagaaaaaaacatggagtggtggtaggcggtttgcccagtgtttagttggagacggttattacttcgctggatatgcaattggtctgcttttacccccgaatgatgaggtggactgcgaggtgcctctaagggaaggattctgaattcctagttattgtcgaaccgccgtaatcctatccagcttcttttttactagtagtactacaatgcaaatgatgatgcattggtggttggtgtatgatgaaaagtggagatgggtttttatgccgcttttcgtcctggctactacagtatgatgaaaagagaaatcgttggatgaacaaaagactggttggtagatt

SEQ ID NO: 29840 - DNA, 2110 bp, Zea Mays
tcgatggccctattgcgtaaaacaataaacccgccttccccaccactggtcatcagtctccactccacgcccgacagagcaggaggactcagaaatggcaatcccagtgcgatcggctgccgcgccccgccgcctcgttccgtcgatacctccggcgagctctggacatgttcgaggactggcgtgcttcggtacccgaaccgggcctcgcggtgcaagagggttgtcaatggtggtcgccgactccaccagccgtcgggccaagcaagcggacggcggggacggcgtccttggggcgcctgttctcggagggctcgggatggagggattgggggatcagctcagcgtggtgatgaagttcggggggtcctcggtgtcgtcggccgcgaggatggctgaggtggccggcctcatcctgacgttccccgaggagcgccccgtcgtcgttctctctgccatggggaaaaccaccaacaaccttctccttgctggagagaaggcagtagggtgtggagttatccatgtttctgaaatcgaagagtggaatatggtcaaaagcctacatatcaagacggtggatgaacttggacttccaagatctgtaatacaagacatgctagatgaactggagcaactattgaaaggtatcgctatgatgaaagagctgacgcctaggaccagtgactaccttgtttcatttggagaatgcatgtccaccaggattttttctgcttatttgaacaaaattcgtgtcaaggcacggcaggtacttcttgatattttcttgatttgcacagtgattcagtgagcttttcaggttatgaatgcagcagcctacaagaatttgctatagtatccctgccctatggtgggggtgtcttgaaactttgattagtcattgatatttttactacatatgcacttcgtgatctcaagtttcagctcattatgttagttgattgccactagtattctgcggaaatttcacatttcgataatgattcgttcattgtccttttatgtgtgcgtggaaaatattcttagtattttttagattttgtgattaatttggtattgccataaaattgtaaccttttagatgatggagataatctccgtccacttcaccaaccaggttacacaaaccattttatcctttaaaatgtggacaacaggatttgaacccttatagtagtggagtcacacacccacaactcaattgagtgtttgactatgatctggatttccctttatttaatatctcaatttgatacaggggccatgtaaccagcctagctgcaaatccccagtacatccatatacatcccccattcttctacattatgcaatgatgtgaactcacgttcattattaattttatttgaaattttttgcagtatgacgcatttgatattggtttcattacaactgatgaatttggtaatgcggatatcttagaagcaacctatcctgctgttgcgaagagacttcatggggactggatacaggatccagcgatacctgttgttactgggttccttgggaagggctggaaatctggtgctgtaactactttaggccgaggtggtagtgacttgactgctacaaccattggtatggaaagatgttgatggtgtacttacttgtgatccaaatatctacccacatgcaaagactgttccatacttaacatttgaagaggccacagaacttgcttattttggtgctcaggtactctttcttttgagtgaagaatcaaaagtaacatttcccccaagaaaaattatttgtcttggactgttaaaggggctatgatggttgacatgcgatgattcatttttgtcactaatgaatctttgtacaaattatattttgaatgctcaagaaaaaagttctggaactaaacaacaatgatatcgggtacatgatatttcatctttattgcacgttttcaggacttgaaccctgtatagtgtgaccaggctgcttctcagtgaataaacaaatctttcagttgcatacttctcaaaaacgaaagatcctctcatgatgtcagtctcctgaacagaagcgagaaatttaggatcgttattgtggactgttcactcca

SEQ ID NO: 29841 - DNA, 2587 bp, Zea Mays
cacacatcacgcatcactcagtcgctcgctccctcgcttcgatccaccggcggcggctgaggtgctgagcggcgaggcagcgagcgccactgcgacctgcgtgctgctgtgctcctgcgcggctgcgcgccggtggacgaccgggccgtcggcgtggttccggctctccgcgcctgcgcggctgcgtcgcgacgagcagtgcatcggcacagtggcggtgcgccccccgcggcgaggcggcttcacggaccgcggttaccgagcgccgtcgcgccgaacgggcgcgggcggcaggcctcctgccggctgctggcgagcgctgctgcctgctgcaggccagggcgagcgggcgagacgctgagaccgcgtgggccgcgcttccctaagccagagcagccgagctcttcgtcgttcgtgattcgttgggccatcgccagcgacgagctgcaaccagaggtgaactggtgaagtgatgggcacggcgatcgtaagcgacgggggcggtgagggaagcgatggaaagtcggttgacgggtggcaggcagagaaggccgtcgcgggcaaccgtagggcactcgaggcccttcgggagctcgtggcttatcctttcctctacgcccgcgagtcccgtttgctcggcctcaagtggcccagagggttgctgctccatggcccccctggcaccggaaagacaagcctggttcgagctattgttcgagaatgcaacgcgcacctgacaacgatcaacccatattctgtacacaaagcccatgtgggagagggagaaaagttcctgcgtgaagctttttctgaagcatattctcaggctttgcggggtaaaccagctgtgatatttattgacgaacttgatgccatatgtccacgccgcaatagtaggagagagaatgagtcccgcattgttggccaacttcttactctcatggatggaaacaaaaaggcgtcaaagatgcttcctcacatagttgttgttgcatcgactaacaggatagatgccgttgatcctgcattgagaagggcaggacgttttgactcagaggtagaggttgccgttcctacagttgaagaaaggctgctgattcttaagctttataccaaaaacctacatctggatgaaaaagtcgatcttcagactgttgctgcgttctgcaatggctatgttggagctgatttagaagcattgtgtcgagaagctgccaagcttgcatatcatagaatgttaaacttatgtgagggtgacaaagtacttaaactacttatggaagactgggaatgtgctagatctatggtgggaccaagcataacaagaggggtaaccaaagaaatttcaattgtttcgtgggatgatataggaggcttgaaagatctaaagaaagagcttcagaaagttgttgaatggcccatcaagcatgctgctgcattttctagacttggaataccaccagtccggggggtgctgttgcatggcccaccagggtgctccaagactactcttgccaaggctgcagcgcatgctgcccaagcttctttcttttctttgaggttcatcaggaaacaacattttattttacgaaaataacagttcactttccgttgtgtgaagaacatagaacttttagcccacagtatttaaaacagattaacataatttacttatttctgccagttgagttaatatcctgtacccagaagtcagcgaatgcttgaaaataatcaactaaaacatgttcagataaagatactctcatcaacactcactagcttttcacataaattcttataacagtggtgcagatttatattccaagtatgttggagaaggggaagctctgttgcgtagaacatttcagaaagctcgtcttgcttctcccagcattatattttttgatgaggctgatgccattgcccccaagagaactggccctggtgggaattctagtggcaatgccacagtcggagaaagacttttgtcgactttattgaccgaaatggatggtttagaactggctacgggaattatcgtattgggtgctacgaatcgcccaaatgcaattgatgctgctcttttgcgtccagggcgtttcgataaggtgctgtatgtcccgccaccagatgtggaagggcgacacgagatactacgcatccatacacggaaaatgaagttgggagaggatgtagatctttggaaggttgcagagtgtaccgagctattcaccggtgctgatcttgaaggcctttgcagggaagctggaatggcagcattgagggaagatatctcagcaagtttgatacatgacgctcacttccaagccgcacgaagttcattaagcccctctcttacaaaagcagtagttgatgagtactcaaaggtagatataaatgatccatcgagtaggaaacattgatatgttccttttctatttctttgttgcacactaggcgcaatacacatttgcaaccttgccaccaagacacacagatggagatagagagatctttttaagaatattctttttaaaccaatcctcttaccgtcagctctggatgttatttaaaaaaaatgccctca

SEQ ID NO: 29842 - DNA, 4683 bp, Zea Mays
cccctcgagctcaacctcaactcctatgcttgccacacacctcctacttcgcttgccccgaagctttctttaagcacccccaagtgcccggccaaaataatccgtgcactacggcgacagtggtgctcgcctgttgtataaaagaacaaggcgaacagcgggtgctgctcgaggaggaagaagaggagcggcttttgagctctgaggtctcggtcaccgcccccccaccccaccaccaccaccaccactgggtttttagatccaatgccaaggccgtgaggaagctagctcttgcgtcgtgaggaagagccgaccagagaagctaggagcgcgtggcaatggcggagggcgatgcgggaaaggcggaggcggggagctgcagcgccgccgccgcctccggcgccggcgggtgcgacgcggtcaagaagcggccggagcagagcgtggcgttccacgagctgttcggcttcgcggacccgctggactggctgctcatggctgcggggagcgcgggcgccgtggtgcacggcgccgctatgccggtcttcttcctcctcttcggcgagctcgtcaacggcttcggcaagaaccagcacaacctccgccgcatgacggacgaggtgtccaagtattcgctctacttcgtctacctcggcctcgtcgtctgcgcctcgtcgtacctagagatcgcgtgctggatgtacacgggcgagcggcaggtgggcgcgctgcggaggcggtacctcgaggccgtgctgcggcaggacgtgggcttcttcgacaccgacgcgcgtaccggcgacgtcgtcttcagcgtctctaccgatacgctcctcgtgcaggacgccattggcgagaaggtcggcaacttcatccactacctcgcgacgttcctggccgggctggtcgtcgggttcgtctcggcgtggcggctggcgctgctcagcatcgccgtcatccccggcatcgccttcgccggcgggctgtacgcgtacacgctcactggcctgacctccaagagccgggactcgtacgccaacgccggaatcatagccgagcaggccattgcccaggtgaggactgtctactcctatgtgggtgagaccaaggccctgaattcctactcggaggcgattcagaacaccctgaagctgggttacaaggccgggatggccaaggggcttggcatcggctgcacctatggaatcgcctgtatgtcatgggcgctggtgttctggtacgccggcgtgttcatacggaacggccagacagacggtgggaaggccttcactgcgattttctcagcaatcgtcggtggcctgagcctggggcagtcgttttcgaaccttggagcgttcagcaaagggaagattgccggctacaagctgctggaagtgataaggcagaggccaacgatagttcaggacacggcagacgggaggtgcctcgacgaagtgcatggcaacatagagttcaaggaagtggccttcagctacccttcccgcccggacgtcatgattttccgagacttctccctcttcttccccgctgggaagaccgcggccgtcgtcggaggcagcgggtctgggaagagcacggttgttgctctcattgagcggttctacgatcctaatcaggggcaagttttactcgacaatgtggacatcaagacgctgcaattgaagtggcttagggaccagattggcttggtgaatcaggaacccgcacttttcgcgactacgattcttgagaacattctttatggcaagcctgatgcgacaatggcggaggtcgaggctgcggctacttcagctaatgcccatagcttcattgctctccttcctaatggctacaacactcatggggcttcagctctccggtggtcagaagcaacgcatcgccatcgcccgcgcgatgctgaagaacccgaagctcctgctactagacgaggccaccagcgcactcgacgctggttcggagagcatcgtccaagaagccctcgaccggttgatggtcggcaggaccaccgtcgtggttgcccacaggctatcgaccataaggtgtgtcgacatgatcgcggtgatccagcaaggccaggtcgtggagactggcactcacgacgaactcctcgccaaaggaagctcgggagcgtacgccgcgctcatcaggttccaggagaccgccaggaaccgcgcgtgcccgtcgacccgcaagtccaggtcgtcccgtctgagcaactccctctccacccggtcgctgagcctcaggtcggggagcctgaggaacctgagctactcgtacagcaccggcgccgacggccgcatcgagatggtttccaacgccgacaacgaccgcaagtacccggcgccgaggggctacttcttcaagctcctgaaactgaacgcgccggagtggccctacaccatactgggcgctgtcgggtccgtcctgtccgggttcatcggccccacgttcgccatcgtgatgagcaacatgatcgaggtgttctactaccggaaccccagcaagatggagagcaagaccagggagtacgtgttcatctacatcggcaccgggctgtacgccgtcgtcgcctacctcgtccagcactacttcttcagcatcatgggcgaaaacctcacaaccagggtgcggaggatgatgctcgccgtgattttgaggaacgatgttgggtggttcgatcaggaggagaacaactcgaaccttgtcgccgctcgcctctccacagacgccgccgatgtgaagtcggccattgccgagcggatatcggtgatcctgcagaacatgacgtccctgctcgtgtccttcgtggtgggcttcatcattgaatggcgggtcgccctcctcatcctcgtcaccttccctctcctcgtgctcgccaactttgcccagcaactgtcgatgaagggcttcgcgggcgacacggccaaggcccacgccaagacgagcatgatcgccggggagggcgtgagcaacatccggacggtggcggcgttcaacgcgcaggacaagatcctgtccctcttctgcagcgagctgcgcgtgccgcagatgcacagcctgcgccgcagccagatctccggcgcgctcttcggcctctcccagctctccctgtacgcgtccgaggcgctcatcctgtggttcggcgcgcacctggtccgcacccacgtgtccaccttctccaaggtcatcaaggtgttcgtggtcctggtgatcacagccaactccgtggccgagaccgtcagcctggcgccggagatcgtgcgcggcggcgagtccatccgctccgtgttctccgtgctcaacagccggacccgcatcgacccggacgacccggacgcggagcaggtggagtcggtgcgcggcgagatcgacttccggcacgtggacttcgcgtacccgacgcggcccgacgtgatggtgttcaaggacctgagcctgaggatccgggccgggcagagccaggcgctggttggggcgagcgggtccggcaagagcaccgtcatcgccctcgtcgagcgcttctacgacccgctcgccgggaaggtgatgatcgacggcaaggacatccggcgcctgaacctcaagtccctgcgcctcaggatcgggctggtgcagcaggagcccgtgctgttcgccaccagcatcctggagaacatcgcctacggcagggacggcgcgacggaggaggaggtcgtggaggcggccaaggtggccaacgtgcacggcttcgtcagcgcgctccccgacgggtacaggacgcccgtgggcgagcgcggggtgcagctgtccggcggccagaagcagcgcatcgccatcgcgcgcgcggtgctcaaggaccccgccgtgctgctgctggacgaggccaccagcgcgctggacgccgagtccgagtgcgtgctgcaggaggcgctggagcgcatcatgaagggccgcaccgccgtgctggtggcgcaccgcctgtccaccatccgcggcgtcgactccatcgccgtggtgcaggacggccgcgtggtggagcagggcagccacggggacctcgtgtcccgccccgacggcgcatactcgcggctgctgcagctgcagctacaccatggctgatcctgcgcctggaatagatactggagggcgcacggccggtgtagatactggagggcggtgttagcgtggcgtggctcaaccgtggccggagaagacgtgttttgatgtgaacgatcaggattgtgccgacaaacaagtgatgccgtattcttcttgcactcctgccggctctgccaatgtttagatcatcccctcctagtaattctcacacctttttttttcttcctttgagaagatcctagtaattctcagatggacccaattgtttgatgtgtaacggtcagaagccagggttcgtctttgctacttgtctaggagttgttgcctctaataattggcttcaaaccttacgaagggatctgcttgaaacagccttgcagttgcagcagccacggagagcgtcactggatctgggtgtccgctgccgccgacatctctagcggagtaacgagaaagcctttggatcgatccataattcgtgcaggctgctttgtaagcacgttatacagcttaaacctctatagtaatatttcgtgcaggtaccttatgttgctacggttt

SEQ ID NO: 29843 - DNA, 1999 bp, Zea Mays
ctccctctttccccccgggcctcgtctgctctgttcgactgttgttgcagtgccttcgcctctccagcaagcaaagccgacccccacaccagccagtcaggaatcgccgccggcggaagccaagcatcatccccagacaccccgtccgtcatggatccggcggcgtggccgccgtggacgtcgctcctgctgcgggcgctgagccggcggcggacctgggtggcgctcttcctcgcagtgtacgccgcgctgctctcctcctcctggtccctgctggcctccgtccgcgcctggtactacgccgcctcctccgcctccgcctcggcggccgcctcggcagcgcccgcctggcccgcggcgctctacgcctccgtcacgtacggcgccgtgttcggcctactctccatggccgccgcgctcgccgtcgccgcccccgccatgctggtcacctggaccaccgtccttgtgctcctcgccttcgcggggcgccggcccaggtcgctcgtcgccgagggccgacgcgccaccagggacatcgcgggcctcgcgctccgcgtcctcctccgcgagggcaacgccgtcgccgcgctctgcgctgccgccagcttcgccgcgctcctcctcggccggcgcgacgacgatgccgcacgccgcgcttcctagttcgagctggttgtagcctgttgtagcatcgcccccctccccttttacacctcttcctcctcttctctcaagctagatctccagccctgttgttcctctccgggcgtaaccgcctgcgcaagagattatgatttgtttgttgcagctagtaggtgtaaattatcacaccagtttgtttcagttactccacaaattggacactgatggcatctgtaatgaatgtagcttgtcttacagctcttgacgatgaaaatgattccgggggctaactaaccttacatacagcgtacatttgttactgttagcacagctttctttcagatgacgtgatctttttgttaggaacaatattggtcgctgtggtggaacactggaagccatccttaatgggcatgcatctgcgaaagtccagttggagccaactattacagatgaaatctaaattgaaaatgcgtgagctctcccctttgtcatgggtgccatcatcttcacatgctgatctggtggggaaaatcatcttaagttggcttgatgcaaccatctcttgtccgtcatcctgcctccagcctgaggaaagtactaggtatcgaggacttgatgcaagtagcactggcttgttccccattgagtatggctgtaacaattttaaacagacgagcaatagaccagtgatgcccaaagatcattagtgttggctccctttcagaaatgccgcagctttgtcattgtccagtacggaaacacaaacaccgatatttttaagtacttttagtcacctgtttcaccagtggaagaaatgacagatggcacagatgattcatctgtatgaaccagatatcaagctcaacagattatttggatgataaaactgatctcaaggctaactaaccttacatacagcgtaaatttgttactgttagcacagctttctttcagatgacgtgatctttttgttaggaacaagaacaatattggtcgcctacgcaagggattgcaccaagaattatttctgttgatcataacttatacaaatcagagaagcaatccgggccggaacagtttcggtcttctattccctgtcaaccgaacgggccctaagctaggtggttattggatcaggcgtctatgctgtgagagaactggcaaagaggatcctccgtttgtccttggcttctggtgttacagaagaaactgcagaacccatgagcgaaaagggtggattagttttagcaaacaagtggttacactagttgtagctgtactatgtgtcctctgaatttccctgtgaaagcaatatgatcaaagactgtcaaatatatccttttttaaaaaaaaa

SEQ ID NO: 29844 - DNA, 758 bp, Zea Mays
ctgagcccctgcttctctcttcctcccgtgccgcgccccctcagtccacctccctgctcgccctccagcttccacagcccagctcagattttttccatggtcgctacgcactagtcgagcgctctacaccagcagtcgtcgtttgccttagcgccagcagggctttgtctcgctcgtcctgctgctcttgccctggtcagcagccgagacgctcgcttctgttccttatgttcaagccaccaaacgccagtgccctctcagtctccaggccgtatgctgctaattccctgccgcgccgagctccctgtccactcatcggaccatgccaagtcatggcactcgccctggtcccgtgcttgcgcagcttgctggtggcccggccactcgccatcggcctcaccttcatgacacaacgccatcggctcccctgtccgacgcgtcgtcaacctgccgtgcgagctagctccacctctcctgctcgtgtttctctccgtcgtgcttggcagcaagtacttcatgtcgaagcaatagctacgattgatagcacctagaggggggtgaataggtgatcctgtaaaaacttgaaacttaaagccacaaacttgattaagtgttagcacaatgaaatcaagtgactaaggagagctcttgtgaaccacaattaacacagtaagaacaagcacaagagacacaagaatttatcctgtggttcgaccaagtacaatacttgcctagtccacgttgtggcgtcccaatgg

SEQ ID NO: 29845 - DNA, 1499 bp, Zea Mays
ctcgcatccatgtgatgatctcttatgataaggttttatttcgctaatcttctcattttgaacaacttatgcatctgatattgaggaaatgtgattcccatgaacatttcttggaattattttcttcattctaaattgattaagtcattccgtatatttatctctttacttgctgatttctacttatcctacttgtccattgtgcagcgcaattgccgttattttttcctatttgttgtctcttcaagtctcctctgcatttatttgtttgttatatcggccttgtacatcaagtttctcatggatggagactatcctacagtttggaaggcattgaaacattcccctgcttctctagcactaatgatatactgttttatctctctctggtttgttggtgggctcacaggatttcatacatatctcatcagcactaatcagaccacatacgaaaattttcggtacaggtcggatggcaggcttaatgtctatgatcaagggtgtctgagtaactttcaagaagtagtgtgtgccaagatagagccttctaaacataagttccgggcgcacatacaagaggaagtgcgaggtccactagctaaccgtgctggagagactgaagaagaacaagttggtggtcctcgagcgtaagcgggggatggcctcgatattgatggtgatctgatgaagatttcacataggcataaccatgaggacatcgatattgaaataggatgtggggatgctaatgaggtggaatgctcagtttcagattccaaagttaaagacaatatggatgcacatatgtgatatgtagagttagaaataaggtaaatggagaacagtcgagttgggttccagcggtttaatgaatgtgtttgtttagttcataagtaggcaaaatgccgtctcctccggtggtttcagcattattctttttgtaaatggctagtgcaggatacttaggatgctaccctgcaggttctcttgtgcattccgaccagcgtgtgtgttgaattcttaccctcggatccttcagaagacgtttgtgtatagtgtcttggttgagaaatcccaagatggtgtatgaattcagattggtagttctaaacttgttgtctttcagttccacacaggcagaagtcattgcttttcagctcaggctgtctactttagcatcagtttgctctgtccagaaagaaaataaaaaaaaagaactgcagcaagattggcatggtgctatgaccaccagagtcacatctgtctttgaacgctaatctggttggttcatgccaaacattcctttgttgccttgtggatttaaaagacttggacgcttggctgggctttggtcggcgctggcagtatcatgccgaactctgaagacaccaaaactgtcagctcctcctcttgtcaattcaacaaaatgtctgcttcaaaatggttctgcgatgccgaagaaaagtccgggagttgataaaataataccatgggacgtg

SEQ ID NO: 29846 - DNA, 1713 bp, Zea Mays
atccgccgcccgcgcacttcttccttcgggcacacaggacaccaccgtcgacggattcatcgcgacgatggggctcgacgtcatggagatcgggatgggcgccgatttgagcctggatctgaggcacttcgcctccaaggccgtgaggcagagcaaggacgacacgccggcgccggacatggacgcatgcatccgccgcctcgaggaggagcggggtaagatcgagatgttcaagcgggacctcccgctctgcgcgcgcctcctcgccgacgtaattgatgtcatgaaggaggaggcggggaagaagaagacgacgacgaggaggaggagtgatcgcaggctggcgtctgcggcagctgatgatgaggaggaggaggcggacggcgccaccgcggacaagagcaagtggatgagcacggcgcagctctggacgggcgattccgggcgggaggacgcggaatcagagaagcaagacaaggggcggtgctcgccggaggccaggtcccgcggcgctctcttaccgttcaaggctgatgtgggctctggcgcgccggcgttcgcgccgctcttcttgagaacggacgacaaggctgcggctgcgcgcgtcggggtgccggatctgtcgtccttgctgtcgccgccggcgaccatgcctcctgcggacgccggcgccgaggagagccgtcgccaggttgtgggatttgcgcaagctgcggccagggcggctgccatggcgccgtctgcccctgcgcttgggctccagtcgcagcagcagcagcagcagcagcagcaggcaaggaaggctcggcgttgctggtcgacggagctgcatcgcaagttcgtcgccgccttggatcagctcggtggcccccaagttgccacgccgaagcaaatcagggagctgatgaaggtggatgggctgacaaacgacgaagtgaaaagccatcttcagaaataccggctgcacaaccgcagggcgcctggatccggcgtggtgcgccagccgatcgtgctcgtgggagggctgtggattccccaggagcaaggcagccctcagtctggatctccccacggccccctccaccacctgtccacctcggtggccgccgtctcgtccgccgccaccgccagctgcgaggaggaagacggccggtccgagagctatggctggaaatgatgaagaggctgctgctgctgctgctgcgccaccaatgtgtgttcactgtttagagaggggagggaggtttcttggcatggtggggatcgccatgggccatggcggaggccaccagttgcagcttcaggaatcgggaggggaattgagtgtagtgtagctgtctgtacacatacatacatacatacagtgagatgggatgagatgagagcgggccttgagcgctcgagatcagaactgatggtgcttcgtcgtcgggtttgtacatcccaaagagaaagagatactagctacagttttgcggcttgttaatccatgctctgggggcagagctacagttttcgccccgagagagttcacccatacccgttgttgtcgattagacgattaccatcttcgccttcttgttgccgttgaacaaaatgttgcttccgctgttcgtctcggaacgaacagtccggttgaaaagttgaatcgttgcaggagtacatgctactcaggctgtaatgtggtctatctaactgaaagagcagcaaaga

SEQ ID NO: 29847 - DNA, 2009 bp, Zea Mays
cacatgcagtagtgatacagaggaacacctgaaccacaaatggtgccgtcggttccttgtccaagtggcctgtgactgtgaggctgtgaccagagataagcagccacagcccacagctccccctggccggtggccgccactccacgctccacgacattcaccaccaccacggcaccaccctgtcccttcagctccaacgtgcatgagagacgccactcgcggtacccacgcggcggcagaggcgctggcggcccgtcgtccgcgccgagcaatggcgtccccactgctctgcggctgcgccctcctcctctacctacttggccacctcgcgacctgccacgccgccagggacaccatcacgccgagcagcccgctggcggccaacgagacgctggtctcgggcggcgacggcaacttcgcgctgggcttcttcaccccgccgggcgccaacagcacgtacctcggcgtgtggtacaacaaggtctccctccgcactgtggtgtgggtggccaaccgcgaggccccgatcgcgggcgccgtcggggacaacccgggcgccacgctgtcggtctccggcggcggcacgctggccattgccgcggggaacgggaccgtggtgtggtccgtccggagcgcgtccagcaggcggctggcgagcccggccgcccagatcctcgacaacggcaacctggtgctgaaagacggtgccggcggcggcggcgccgtggcgtgggaggggttcgactacccgacggacacgctgctcccggagatgaagctggggatcgactacgtgaaggggaagaaccggacgctgacgtcgtggaagagcccgtcggacccgtccacgggccccgtcgccatggtgatggacaccacgggcgacccgcaggtgttcatctggaacggcggcgagaaggtctggcgctccggcccctgggacggcgtccagttcaccggcgtgcccgacaccgccacctactccggcttcaccttcagcttcataaacagcgcgcaggaagtaacgtacagcttccaggtgcataacgcgtcgatcatctcgcatctgggcgtcgtgagctcgggcaactacggcctgctgcagcgttcgacgtgggtggaggcggcgcgggcgtggaacctgtactggtacgctcccaaggaccagtgcgacgcggtgtcgccgtgcggcgccaacggcgtgtgcgacaccaacaacatgccggtgtgctcctgcctgcgcggcttcacacccaggacccccgcggcgtgggcgctgcgggacgggcgcgacggctgcgtgcggtcgacgccgctggactgccgccgtaacggcaccaccagcaccaccgacgggttcgtcgcggtgcggcacgccaaggtgcccgacacggagcgcagcgcggtggactggagcctgacgctggagcagtgccggcaggcgtgcctccgcaactgctcctgcacggcgtacgcgagcgccaacgtcagcagcggcggcggcgggcgcggcggcggcgccggcggagggtcgggctgcgtcatgtggaccacgggactcaccgacctgcgcgtgtaccccgacttcgggcaggacctcttcgtccgcctcgccgcctctgatctcggaggatggacatcatatgaaggaggaggaccaaacatttgagaacaaagaaggagcaccatatgtatattcatatggatatggtggaggatatggacaaatgaatgatggaggaggagtgtcggtggtaagaggagcgtcgatggtagtagtttcatcattagagaaccggagcattcgtgaagggtcggtcgagatacaaaggatgagattatgggtatggaaagagaggttatagtatgaggcagcagagacaggcaaaaacgtccttatgatgatgatgtacggtagaaatgctatcgaagaagacctaccccacaatgggaggttgtgtcaaaaagttgtggatattgatcgttgatcaagtcggtggaagtttggg

SEQ ID NO: 29848 - DNA, 2179 bp, Zea Mays
agaagcgcgtaaggattaaatccagcgaagtgttcaccttcttcaacttgaactccttgtggtccggactgacgaatcggggacggagattcacatcaacgcagatgtggaccccacgaccgagtcgtcgcgtcgtctcctccgcttccgacactctcctgctctgcctcctcctgcttgccggcgccgccgacgccgcgccgctgctcgtaggcgtttttcccaaagatgaggcgtacttcgcgacgcaggtgatcgcctgcagagacggctcgggctctttcccgaggagccggctcaacgacgggtactgcgactgcggcgatggaaccgatgagccaggcacttcagcttgtccagaaggcaagttttactgcagaaatatcggagatacccctcgattgttgttctcttcgtttgtgaatgacaaaatttgcgattgttgtgatggaagtgatgagtacgaaagtggtatccattgccagaacacctgtagaaatataaaggatactgctgaggctgatggtggtggtggcgacctcgcagtaacacatttagattctactgatgattttatgagtaaacatgcaattgctatggaagaccatatccagaacaacagcaacagagaccttgtccagaagataagaggattgagaacagccctagttattgagctgggccttgttgtatgtatttttgctttttgcattgctcggcgtcgcactagaacacgcaggagacagcatattttgaaacgttagctgaacagtagtaatatacaaagacgatagatcggtgctcatttgcaaacattaaagcttccggagatggtggagaatcagagatgggatgaaggagcctgcacgtcatcctctttaaatcacgaggaaggatccaaattacaaaaggatggtaatggcctgcttcattcaagcagtctacctgcttgaactggacaggcaggacatgaaaggcgaagaggatggccttgctccaaaatggtggagacccttcaagtacaaggtcacgcagacattggtggatgagagagatggttccatctatggcgccatgctggagtgggatcgttcttctgccttgtctgactttatcctcatgagaccaagcggggcaccgagggctgtgttagctctcagaggaaccctcctgcagaagccaactatgaagagagatctgcaggatgaccttcgcttcttggtatgggagagcctcaaaggttcagtgagatttgttggtgctttagcagcgctaaaatcagaagttgagaagtttggcagcgccaatgtttgtgttgccgggcactccttgggagctggctttgcactccaagtctgcaaggagcttgccaaacatggagtttttgtggagtgtcatcttttcaatccaccttctgtttcactggccatgggtgtaaggaccatgagtgagaaggtcagctacctgtggaagaaagtcaaaggaagtctgccattgaaggaagacacaacaccaccacttgagactgctaaggctgatgcaagtgacaagaagagattgcgcgccgagaagaaatgggtgccacatttatatgtcaacaacagtgattacatctgctgccactacaacgctccatcttgctcgtccacaacaacagatggtgcttccaacgaacagcagcaacaacaacgcaaggctagtgaaattgccggtgatgtggtcgcaaagctctttgtgacatcaaaagggccacagaaattccttgaggcgcatgggctacagcagtggtggtcagatggcatggagctgcagctggctctctatgacagcaagctcataaacaggcagctgaaatccatctacgcaacaacaacagaaatgcaatctcctgccaagtcctagacacggcttaagccgctgttgcatcggtcattagaaatactctttctaaccagtgtgtgtgttcctttatcaactgagaatgttttattactccagtgatgccccaaaacagtcgaataatttgattaaagggatagtgtgtgaacagtttcgacaaaacaacattgtatttcaactcaaatctctacttatatgtaaagtgggaatttcttccacgtcttcctcccacataaaccctaaccctctttctcttaggcttagtttctaaccactgaaa

SEQ ID NO: 29849 - DNA, 2383 bp, Zea Mays
ccactgttgtcttacatgccaccaccacccgagcacgtgtcagactcaggcatcaccctttgcccgcctctctttggtgggattcttatcacaaccgcacacaccaaaaagcagagacaaacttataagaactttacggcgtgctatacctatcaggctatcactggctctccccgtcaactaaactctagccagtgagtggatgatgggtcggacgggtgacggccgccgccgcgacgtcgacggccggctggaggcgctgctctctggcgccggcggcgaggagccgtggctccggcgcgtggcgctcgcgacggctctggagctgcggctgctggcgcccctggccgcgccggccgtggtggtctacatgctcatcatcgtcatgtcgtcgaccacgcagatcgtgtgcggccagctcggcaacgtccagctcgccgccgcctccctcggcaacaacggcatccaggtcttcgcctacggcatcatgctgggtatgggcagcgcggtggagacgctgtgcgggcaggcgtacggcgccgagaagtacgagatgctgggcgtgtacctgcagcgctcgacggtgctgctcacggccaccggggtgccgctcgccgccgtgtacgcgctgtcggagccgctgctgctgctgctggggcagtcgccggagatcgccggcgccgccgccgagttcgcctacggcctcgtcccgcagatcttcgcgtacgccgccaacttccccatccagaagttcctgcaggcgcagagcatcgtggcgcccagcgcctacatcctggcggccagcttcgcgctccacgtgccgctcagctggctcgccgtctacgggctgggcctcggcctgctcggggcctcgctcacgctcagcctcacgtggtgggtgctggtcctgggccagttcgcgtacatcgtgtggagcccgcgctgccgggccacctggaccgggttcacgtgggctgccttcgccgacctgcccgggttcgccggcctgtccgccgcgtcggctgtcatgctggcgctcgaggtctggtacttccaggtgctcatcctcctcgccggcatgctgccggacccgcagatcgccctggactcgctaacggtctgcacgtcgatccagtcatgggtgttcatgatctctgtgggcttcaatgcagctgccagcgtgagggttgggaatgagctgggcgccggcaaccccaggtccgccgcgttctctgcgtgggtggtcaccgccctgtcggcgttcgtctcagggatagctggcctcgtcactttcctgctcagggacaagctcagctacatcttcaccggtggcgaggccgtctcgcgcgccgtcgccgacttgtgcccgctgctcgttgggaccattgtgctctgcgggatccagcccgtgctgtcagtgatgcgtttgttctgttcttcttcccactggtactgaactttttgctcactggacgacgacgggtgatgaaaggtgtggccgttggctgcgggtggcaagcgatggttgcctacatcaacgtcgaatgctactacttcatcggcgtacccctcggcgtgctcctcggattcaagttcggtttcgggatcaagggactgtggggaggcatgattgggggtaccctcatccaaacacttgctttgatctggatcacgttaaggactgactggaacaaggaggtaattttaagccaccgtaaatttccttggttaccgtgccgtgtcactgacagatggtcctcaaatccaccgcgcgtgccgatgtgttcgtcttcgtccatatgctcggttattccttccaagctcaggcttctgttgtgtggccattttcttctctgtgttttgattttttttttcttgtgctgtagtttatctgttctttttttctctctttttggtgtctgaatgtaggtcgaagaagcgcggaaaagattggataagtgggacgacacaaggcagcctcttgtcgcaagcaaggagtgatggatgatggtacaggagtggatgaagaagattcagaacataccataccacagtcagtttcggttgatggggccttgcgagccgggcgtccgttcaatcggtatgcgtggacatggcggccgttggctttactcccgtagtacgagcgacagtgccattattttttgtttgctccggtaattttggtggctgccttgcctttttttaaaaaaaaaactcttatgtctccactcacgtcacagtgagttcgttttttgctatcgtttaggtggagattagtatctgatacaaaccaacccttccgtgcaatcgtaaaaaacttctaatatgtaccatataatcttgatcaagtggacacacgggaatgaataattttgcactt

SEQ ID NO: 29850 - DNA, 3495 bp, Zea Mays
cctttcgacatgtcattttcaggttgcttgcctcctgcaatccccctcttgcacagttgcacacaccaacacagatcttgagagctcgcgagcatggatctggtgtctggggcgattggcaagctcgcccccaagctcctccagcttctgcaagatgagtacaacctgcagaagggagtgaggcatcaaatccagtttctttcggaggagctggagagcatccatggcgccctccgcaaggtggctgccgtgccaccggaccagctggatgagcagaggatgggcaagctgttcgtagatgccaaggctcgccgcgacatcgcaagcgccattgaggccatcaaggggcagctacagcaggtgtccgagcggcgtgataggtgcaaagtcgatgatattgtggccaagcttgccgcaagctcaacaattgatcctcgtctcgaggccatgtacagagaggtgacacaacttgtcggcatcgacggggcaatgggtgagctgataccgatgttgtccctcacgggggatgatgtgtccaacaaggagcttaaggtagtctcggttcttggaattggaggattgggcaagaccactcttgctaaagtggtgtatgataagctcaagtcccagttcgattgtggggcttttgttcccgttggccgaaatcctgacttgaagaaagtcttcagggatatccttatggatcttgatgaacacagatacacggatctcaacatgttaatattggatgaaaggcagctcattaacaaactccgagacttcctcgagagtaacaggtacatcattgttattgacgacgtatgggaagcaaaatcttgggaaacattaagattggctttcattgacaataataaaggcagtagaataatctcaactacccgtaaatctgaagtcactagtggtaacaaggtttacaagccaaaaccactttcagatgataactccaaacgattattttatacgaggatatttggtggagaagacaaatgccctgacaatgaagtggatgaggtatctaataaaattctaaggaaatgtggaggaataccactagctatcatcacaatggctagtttattggtgggtaagtcatggggacaatggtttgaggtctgcaactctattggttttggcgataaagatattgagcaagtagacaaaactatgtcaatattgtctcttagctactatgatcttccctgtcatctaaggacttgcttattatatctaagttcattcccagaggattacattattgataagaattctttgatatggaagtggatagctgaaaattttgtccataagaaaccaggagtttggttatttgaggttggagagggatacttcaatgatcttgtcaacagaagcatgatccaggcagtggcatcaaaagacagcagtataatagatggttgccgcgtgcatgatatggtgcttgatctcctccgttctttggcacgcgaagaaaacttcgtgactgtcttatataatgatgaggacatgttgtcagaaataagcagcacgcgtaggttagcccaccaaaagagtacaatggatgctcatctgcacaattataagcagggcatgcaacatttgaggtcattaacagtctacaggtgtggtgctgataaggagctctcgtttcttctgagctttaagctcttgcgagtcctagatttagagaatgtatatactacgagctggcacaatgctaggcatattgggaatctaattcatctgaggtaccttgggttaaaacacacatatatgcctgagctaccagaagaaataggagctctgaagtttctgcagacactggacctggtggagaatttcttcatggaggaactgccatcgagcatagggcagctaacacagttggtgtgcctacgtgcttcagggttgataacaagcatgccccgtggggtaatcaaaacgctcacggccctggaggagttggcagtacaatgtcaattcaacgagcgtttctgcaggtaccaagggcaattcaaggaactaggcagcctgagtgaacttagggtgctaaagattaaggtcattagcacgatggaacagagcatactgccagatcttatgcaatctctaggaaatctccataagatccagagtctaaaactggagagtcatcctggttgcggtcgtgccgacaatgcaatgtttgatgcaatggcgctaccgggacatctcagacatttgcttgtgtcagagtactttgtccatttgtacaggctaccgtcgtgcattaatcccctatgccttgttaaactctcccacctggaattatatgtgatcgatatggacgagcatagtatgcaaatcctcggggagttggccgagctccgccatcttgtgctgtcaacgagatccacagtaagagttaataacgttgccgctgatggtttcttccacaagttgagatcctgcaagttttatacctcgatggtcctgtttgtgctcaacgaggactcgagtgtctcgtttaccctgtggaacgggacagatgatctagtgctgagctatggaaagaaggatggtgagtgtccaagtgcgccggccgtcatgccaaacctagaagagcttctgtttagcgcccagccgaagtggtccctgatgaaatgccaaggtagccatggcaacctcggcctggagcacctccgttcgcttcagaaagtcacagcggtgatcagctgcgaactgtatatgtttgaggcggagaagatggaagcagagctcggcatcagctgcgaccggtatttcgttgaggcgtgggtgatggacgcggaggatgggctgagagatgcgatcggtgttcatcccaaccaccctactcttgttctcggtcgcaagaatgaaggtgtcctcgcaagtgatgtgtcggacgatactgatgctgattcagccacaagaagaacatgagggtgagggctcttctgttcacctaaacgcgtgtaaacagccgactacacgcgttcaaacactaaacgttggacatggattattatagggagtggctcctggataaagaccttctctaatagcgaaagtgtacgcggcgtaaaagagcaacccgaaggtgataggagtaagcgctgaagctattgccagagaggttcggcttgatatggtaacaaagaccaaggacaataccaacttaaagggtgaaaaagaccacttattccgtgataatttatattacaattacgagtaaatatcaagggcatgaatgtaattttgtttgggctgtgtcccgtgcctataaatatatgaacagtagtaccgtattgttcaggctggattgtaatcactcccacgtcattctcgctcttacaccttttggcaagccgaaagtacaattataatacaactattggcaatgtttattcatgctcaatagagatgataataatgataaatcattggtatatgacaattattatctttatccctccg

SEQ ID NO: 29851 - DNA, 2359 bp, Zea Mays
gacccggacgaccggaggcagatacgtgtgcgaccctggacgcgcgagaagatccatccctccacacggatctcctcctgtccaccaggctacttaactgatgagacggcacggccaaaagattctcgtggacgtctccggcgcccaattgtatagtagcccgcgcgctctagcgagaagctagcgcgccatcgccgccggcgtcgtgtcatggaaatggtagagtgctccctcgttgctacacttgctccgcgcccgctgcccggacaggttcggaaggccttgccccggccggcggcttttggggcgagagcgagactccgggtgcggtccgtgggccgagaggagcctctgcatccgcagcagacggcagtccgggcttccggaccggatcacggaggccgggcgctggggcaggctgcggtggggttcgccgccgctgccgttgtgtcactaaccgggttctccggggatgtgtccccgctgccgacgccgcctgcccgggccgagtcgctcaccgtcgcgttccccgtctccaaggcgcgcgaagtgaacagagtgcagaggacgctggtggagacgtgggggctgatccgtgagacctttgttgatcccaccttcaaccaccaagattgggatcagaaactacagcaaaccatggtagagatatttccactgaaatcagcggatgctgcctacagtaagattagtgggatgctgtccacactcggcgacccatttacaaggatcatcagccccaaggagtaccagagttttaggataggaagtgatgggaatgtgcaaggggtcggggtgtttataaacaaggagccaagctctggacgattgcttgttatggactgcattcagggaggcccagcagatcgagcaggcatacatgaaggcgatgagctagtcgagatagacggcaaaagtgtttctggtttggatggagaggctgcagctcagaggcttagaggccgtgtaggaacaacagtgaaagtgaagttgttagatgtatttccttaccttgagcttcatagtagatacttagcttcagttaaatctattttgctggttgtgaagtatacttcaacttgagatgtgccagttcaacattaaggcacttgtttaaaaaaaacattcagagattgaataagtggccaaggttttggtttatagaactaaaaaaacatcgcgtttttttggttcaccgaagtctggcatactaggcttctattatattatatcatatcctgaatcccctttatgtaatttggtgaactcagccatggaaacgttgctcctcgtctttgtatttactttcttaccgatgcatatttatatccagggaactgacgatgaaaggggtgggggtttaagacaaaaggaggtccagctgtctcgtgaaattatcaacctttcacctctgtcaactgcaattatctctcatagaacagacgatggccatgagtgcaagactggctatgttagattagcttccttttatcagactgcagcagctgaaatggaaaatgccgtaaaaaggatggaggatatcggtgtccagtcttatattctagatctgcggaataacccaggaggtttagtaaaagctggtcttgatgtggctcaaatttggttggatggagatgaaacccttgtcaacactattgatcgtgaagggaatgtgctaccaataaatatgatccaagggcattcattaacgcatgatccccttgttgtgcttgtcaatgaaggaagcgcaagtgcaagtgaaatcttggcaggggcattacatgacaatggacgagctattctggttggccatagaacctttggtaaaggaaaaattcagagtgtgactgagctggacgacggatctgctctgtttatcacagttgcaaagtatctatctccagcgctgcatgaaatcgatcaagtaggaatccaacctgacatacaatgcagccctgacatcctttctttgccaagagcgccttcgctaagagaaaacagcaacgccacaaatttggagatggattcgtgtatcatggtagcagaacaagcgttggaaattcagcaaagcaagggttccgcttcttagatgcactatgggctctgtacattatttgcattctacagtagattggatagcttaccttagagacttataaagttctgtagcggtatatagagagaggctgatcctcacatgtttcattttaggcattatctattcggtgattcatgggaatgtatataagttgaccttgtcatatatctgtgtcgggttcattcttgactatccatactcagaaatataacgtgcaatttttttgcaaaaacaaaaaactaa

SEQ ID NO: 29852 - DNA, 600 bp, Zea Mays
ataataaaagtgaaattccattaccttgctgtctcggtctgtcggccatcgccggttgcgcagcgggcagcggctcacgtcgacggggaagactccggaggccacgggcgttacattctcctgccgtatttttgcggtatgggaagtttagccttaacacaagtctaattctcccacaaaagatggtgatgcaactacgtaagacatatatgatcaaattgatcatgccatcaagctcatctccttcgtcaatcatgagcatccagcaaagatcaaggccttcggcaacgaagccgtcagcttcgtcccatgcctttgcagcatcaatgtttacgcggagctccgcagcttttcttcttcagtatgcaagttgcacctgccgaaggtttgcttcattgtctatccgtgttgtacctgaaatacattttctcaatccgaaggtaaggtattttgagggccttcggctaagtaggccctcaaaatgcatgatgctcaaatagctcacttacgtaatagttcattctatttcctttcttttttgtgcaatcgacagcttgtgttgaacagttcaagtaaccatatatatgattttcatatgta

SEQ ID NO: 29853 - DNA, 1111 bp, Zea Mays
tgcagaaggtcttggcgctggtattgaaagtcttgtatcttttctttgttgtaggttgcacagagcaatttgagagatctacttttgcaatgctgcatggatgaagcagctgatgttcgacaaagtgcccttgcacttcttggagacctttctagggtttgcccaatacatttgcatccacgccttcaagaatttcttactgttgcagcgaagcaactgaaccctcaatctgtgaaggatgcggtatcagtagctaacaatgcttgttgggctattggagaattagcaatcaagattggcaaagaaatagcgcctgtggtgatcaccgttgtttcgtgcttggttcccattctaaaatccccagagggttcgaacaagtcacttgttgaaaacagcgcgatcactcttgggaggcttagctgggtgtgtccagacatcgtggcccctcatatggagcatttcatgcaagcatggtgcaaggcgttgtgcatgatcagagatgattttgagaaagaggactcgtttcatggattgtgtgcaatggtggcagcaaaccctacaggaggcgccggttcattagcttacatctgccaggcctgtgcgagttggactgagataaaaagtgaaggtcttcacaatgaggtgtgccagattctgaatggctacaagcagctgcttggaaacggtgggtgggaacaatgcatggccaccctgcaaccggatgttgtgcagaaattagctagatacggagtatgatggcagtggtcgtgtggtttcatcatctttttacgctggagacagagatcaggatggttggttgggtcacttgctcgtccctcccgcctcccagtcccaggcaaggcgacattgatgaaagaaaggtttttgtagcgtgtaattcttttcttcctcttcctcttagcaggtgagtccaaaattacattaccaattcatttttgcccaataataaaagatgaagatccatgggatttgtttatcccccactcccttgtttctgttactaaccatcttcggcagcctattcatacccttgtttgtagtacaatctacaatacaaaacggtgacatttttagagaccatagatatggg

SEQ ID NO: 29854 - DNA, 7340 bp, Zea Mays
ccgccttcaacttttggcgcgcctttctccccttgccaaaacccaaatctagggttcactcttccccttccccggcgtgcaacggcagtccaaactatccaagcggccactgggccagcgcgtcttccattcccgctcaacggagcgcacctgccagcatgagcgggcggcggggtccagctgccacaggaggcggacggggaggcggaggcggaggcggcgggaactggcggcggagcgggtcggcgaaggcgaaggagcagcggctgcgcctgggcgcggaggagctcctcgagagccggctaggattcgcgccatacactgatggggagcggcgcctcggatggcttctcaccttttcaccgtcatcatgggaagacgaggacaccggaaaaatctacagctgtgttgacttatactttgtatcacaggatgggtctacgtttaaagtgaaatacaagtttcggccttacttttatgctgcgaccaaggacaagatggagttggaagttgaggcatatattaggcgacgttatgaaggggaaatttctgacatagaaataattgagaaagaggatttagatctgaaaaatcatctttctggcttgaagagaaaatacctgaagcttcagtttgacaccgtacaacaattaatgcgtgtaaggaatgaccttttacatgttgttgaaaagaacgaagaaaaaatagatgctgtggaggcatttgaatcaattcatggtgtaaaaagggtagaaaggccacaagattacataaattacatcattgatttgcgtgagtatgatgttccatatcatgttcgttttgctatagataatgatgtcagaagtggacagtggtacaatgttaatgtatctggttctgatgttttgcttcagagaagggaagacctgcttcagcgtgcagaagttcatgtctgtgcatttgatattgagaccacaaaactgcccctgaagtttccagatgctgaatacgacaacgtaatgatgatttcatacatgattgatgggcaaggatacctgataatcaacagagagtgcgttggagaagacattgatgatttggagtacacacctaaacccgaatttgaggggtattttagagttaagaatgttcaaactgagttggatctacttaaagcatggttttctcacatgcaagaggttaagcctggcatttatgttacatacaacggtgacttttttgactggccatttttagagaagagggctgcacaccatggaataaaaatgaatgaggagattggtttccaatgtgacaataaccagggcgagtgtcgggctaaattttcttgccatcttgactgttttgcttgggtgaagcgagacagttaccttccacaaggaagccaaggtctaaaggctgttacaaaagccaagctaggttacgatcctctggaggttaatccagaagatatggttcgctttgcaatggagcagccacagacaatggcttcgtattctgtatcagatgctgttgcaacatactatctatacatgacttatgtccatcctttcatcttttctcttgcaaccataatacctatgtcacctgatgaggtactgcggaaaggaagtgggacactttgtgaaatgctgctaatggttcaggcattcaaggctagtgtcatttgtcctaacaagcaccaagctgatcttgagaagttctacaataaccgtttattggaaagtgaaacctacattggtggtcacgttgagtgtcttgaaactggcgtctttagatctgatctccctacaaagttccaacttgaaccattagcatatgagcaactcattggaaatcttgatcgtgatctgcattatgtcattgctgtagaaggaaagttggatattgattctgtcacaaattatgatgaagtcaaggatgccatagagcaaaagcttgttgcattgcgtgatcacccaattcgcgaagaacgccctctaatctatcatctggatgttgctgctatgtatccaaatattattttaaccaatagactccagccaccatccatagttacagatgtggactgcacagcatgtgatttcaatcgtcctggaaaaaattgcctcagaaagcttgaatgggtctggcgaggagagacctacatggcaaaaaagaagtatgtttctaaaaaattatgtactatgatttttatgaatattttttaatgcagttatgttttgtagtgactattatcacataaagaggcaaattgaatcagagctgattcaatctggtggcattgcatcgtcaaagccttttcttgacctctcaaaaccagaacatttacttaaattgaaggatcgtttgaagaaatactgccaaaaggcgcacaaaagagttgttgataaaccaattactgaagtcagagaagcgggaatatgcatgcgtgaaaattctttctatgtagacacagtgcgtagctttcgtgatagaagatatgaatacaaaggtcttaacaaaacatggaaaggaaaactcgcagaagcgaaagccagtggaaattctatgaaaattcaggaagcgcaggatatggttgttctatatgattctttgcaacttgctcacaagtgcatattgaattctttttatggatatgttatgcgcaagggagcaagatggtactctatggaaatggctggtgttgtaacatatactggtgcaaagattatccaaaatgctcgattacttgtagaaaaaattggaaggccactggaactggatacagatggcatttggtgtgttttgcctggctcttttccagaaaactttactttcaagacaaaagctgggaagaagctaactatatcttatccctgtgtcatgcttaatgctgacgttgcaaggaacaacactaatgatcaatatcaaacattgaaagacccagtaaacaagacatatacaacacacagtgagtgttccattgagtttgaggttgatggaccttacaaggccatgatcttacctgcctctaaagaggaagggattctgataaagaagagatatgctgtcttcaatgaagatggcactttggcagaacttaaaggttttgaaatcaagcgtagaggtgagctgaagctcataaaagtttttcaggcggaggtatttgacaaatttcttcatggttcaactttggaggaatgctattctgctgttgcctctgttgctaaccggtggttggacctactggataatcaaggaattgatattgctgacagtgaattgcttgatttcatatcggagtcgagcacaatgagtaaatctttagttgactacggagagcagaagtcttgtgctgtaactacagcaaaaagacttgccgaatttcttggagattcgatggttaaagacaaaggactacattgccaatatattgttgctcgggagccacaaggcactccagtgagcgagcgtgctgttccggtagctatattcgagacagatcctgagatcgcaaagcattatttaaggaaatggtttagattctcctctgatgcaaacattcgatctattgttgattggtcttactacaagcaacgcttaagttcagctattcagaaaatcattacaattcctgcagcaatgcaaaagatctcaaatcctgttcctcgagttcttcatccagattggttacacaaaaaggtcagggagaaagatgatcgatttcggcagcgtaaactgcgtgatatcttcagtcccttggctaaagaagaggggctgcataacttgaataggactggagatatggaagatttattaatttcaaacaaggatttgaggaaaaatccttctcatggtttagacattgacaaagaaaacaatccaaatggagcatcagtgggatctggtttgaatattagtaaaaaacaacaaaactgtatgactgggttaaatgttccttgcacttcacaaatccaaaatgctgcttcttatgaaacagttgataagggtactgactatcaaggatggcttgatgctaagaaaagaaaatggaaatatgtccgtgaacaaaaaaaacgtcgaaggttgggtgctgccgccacttttgacgatcctaacgctttgctctcggccagacatgccaatcagctacctgtcaacagtcggaatagatctacatttttccagaaacaagaattggccctctttagatcacattggcagataatccagcttgcttcaagtacagtgcctggtcacttttttgcgtgggttgttgctgaagggattatgttcaagattcctattaatgtgcctagaactttttacctaaactcaaaggctcctgtcacagaagagtttccaggaaggcgtgtcaaaaagattctcccacatggtagaccttgtttcaaccttattgaggttgtaacaactgaagaacagttcagggctgaaggcaaaaaacttgcagctcatctagcagagccagatgttgagggaatatacgagacaaaaattccaccagagctcaatgctgttctccaaatcggatgtgtctgcaaagtggacaagtctgcaaaaagacgaagtatacaagatggatgggatctagccgagttgcaaatgaaaacaaccgccgagtgctcatatctggaacagacattttcatttttctatttataccacagcttgagtgaaggaagggctgtatatgtattttacttccccacgtctttccgaatacatgcagtgattgtcaatcctttccgtaacaaagaaatatctccgtcatttcttgaaaagcaatttggagatgcttgccaagcccttggttctgtccctgagaatctgtctttccatgtggactaccaaacatcaattgatgctggaagcaaatacgcacaaagaatgttacttgagtacaggcaacaacattctggacctgtcgtaggcatcatagagtgccctaagctccaagctataaaggtagctatacgagcacttgatgatttgccatgtgtaaccattcctagcaatgcacgtgacaacaactatcagctggccgaacaagtatgcagcgttgtgctgcatcaacccaatggttcaatgaacggatttcactcgctaaatatgcacatgtgccactgggtaattttgaactagactggcttctttttactgccgatgtattcttttcaagggcattgcgtgatcaacagcaggtactatggatatctgatgatggcattcctgatttaggaggcacttatgaaggagagacatgttttgctgatgaagtcattcagcctgcacttacttatcctggtgcatatagaagagtttctgttgagcttaagatccaccatttggcggttaatgctctcctaaagagtagtcaagtggacgaaatggaaggaggatcaatcggtagctttggaaacgacgtgcctccgggttcaaatgccactgaaactgactttgatgatgctagcttatgtatacctgctttccaggtgctaaagcaacttattcaaagatgcatttcagatgcagtgtcgtctggaaatgtatttgctgatgcaatattgcaacatctctaccgctggctttgcagcccacgatcgaaacttcatgatccagctctccatcgtcttcttcataatgtgatgaagaaagtctttgctctattgttggccgagttacgaaagctgggggctaatgttatttttgcaaacttttctaagataatcatagatactggaaaagtagatttgtcatctgcacatgcatattgtgacagcttattaaggaccttgcagacgagggacctcttcgagtggatagaattggaaccattgcacttttggcattccttactgttcatggatcagtataactatggcggaattcaagctaaaacacaaaacgtagactcttcagatggtgataatgatattgatattgtctcaagctggaacatggcagaagatttgcccaaagatacacaggatcattttgtcttaatcgtatcagaattcctatatattccgtggaaattcatgaaggaacaagtagctgctcaagctaccataagggatgatacctcatgcactccatctgtaacaatcatggctgctgagaatcttgagggccaggtgatagaacacctccgtgacaagattagcaattactttgcagacaagcttctaagaactgtaagtgatatacttcaccatttcaaagggaaaagcaaacatgagtcagatgaacctgcaaaatctgatcctcacacgcataaaggcgatgctgcattggagttcattaagcatatctgtgcagttcttgctcttgatcaaaatgttcagcatgatattttgagaatgaggaagaacctgttaaagttagttcgtgtaaaggagtttgctccagaagcacaattccaagacccatgcgcctcattcactctgccaaatgtgatctgcagctattgcaacgattgccgggacctggatctctgccgcgactcggcactccagggccaggagtggagatgcgcggtgccgcagtgcgggcagccgtaccaccgcgagcagatggagaacgcgcttctgcaggtggtccggcagcgagagaggctgtaccacctgcaggacctggtgtgcgtgcgctgcaggcaggtgaaggccgcccatctgtcggagcagtgttcctgcgggggctccttccggtgcaaggaggagccttcgtatttcctcagcaaaatgcgggtgttcctgaaggtggcggtgagccaaaagttcccgctcctgcaggactgcgtgcagtggattcttgaagccagatgacgcgggctgctacttcaacatagttcattagttcacctgatcgctaggttgtacaacgtgcacaggctgtagctccgaagagtgtataaacgggtgtatagcgctgccacagttcattgtagctctgccctgcttgcaaaaggttgttgttgtattgtagatattcaaaggtggatggcgagaaacgatagtaaccttggtatcgaaacatctggataactagccctctcgtatgtgattgctgggcatagactattctaagttatgatgtgggcatgtggttgcataagcggtttcgatgacgtgaatagaaatacacgcgtcggaccgtatgctgccagcctgccagtacactgaccttggccacgtcatactagttgtctgtttctgttgccaatcctacactgtattatctgcacaaaggaaaatgaaacggaggacgttgtgctttcgaggggccaggactcgttgggtggatgaagcacgcgtgcccggtgacctcagccttta

SEQ ID NO: 29855 - DNA, 1435 bp, Zea Mays
gcaatttctctgcaactttcattgggcggcggtacttatctgaatgtttatgtcctactacctttttagaagtatatgacaagtaagaaaagtaacagatctacagtcacaccacacactgctctgcatatggaatgggacaggatttcttgccctatttgtatggagcaaccccacaatgctgttttacttatatgcagttcatacaagaatggctgcagatgttacatttgtaacacaagccatcgtcactctaattgccttgatcggttcagaaaaatgaatggtgatagtaagacgttcacggagcccaagactcggaagacatgttgataatgagggatcttatcataccgatgtaaacagtggcccaaatccagatgacatatctagatctgaatttgatttcgctaaccatcaagaatttgagaactcaaccttaactgttgaaggtggtattgtatcgggggaatgccatgatgccatgcaaagttctgctgaagttaagtgtcctctctgtagaggatctgtatctggctggattcctgctggagatgtgagacagtatctagacaataagttgagaacttgctctcatgaatcctgcaaatttactggaacctatgaacaactgcgtgaacatgctaggactgcacacgttcttacagagcctgctcatgtagatctgtccaggaaaagagcttgggatcgccttgagcgtgagcaggaggtcggtgatgtcattagtgcaatcaggtcccaggtacctggggcaataatagttggtgactatgttattgagactagagatgacatgtccccagacatagactctggcgacgatgaaagtagtgaatggtggtcagaccaagttgaatcaccagatgctagacttgatcccccaagggtttggccacatgaagccctagggtcacctagcatttggtcagatgaaaggcgtaatttggcaaggataccacagaacaacagagtaccacccaggttttcattaggcagtaggcgacccctgcattcaggttggcaggggggtcgtcggtcaagcacacggaatcgactgcaacggggcttctcaaatcaccactctggacaccgtagcaactatcgtggacatcgtcacttgcttctggataggtcctatgttggtacccgagattcaggctccggcaggagcctaaattcgtcagtggtgccaagcaggcggcagcggctgcggtacacgcacagaagccactactgatggaagcaatatcagttctacgtgtagagctttattggttaatccattcatgctatctttgtaaatatatgttaaggttatgtttttatttaatgtatttaatctgtctaaacaatctatcctagatgcaaaaagaactacattatttatcataaatgtcatttgtggtgtctctgc

SEQ ID NO: 29856 - DNA, 6918 bp, Zea Mays
cagagttgacaagtatgtctctggtgcaagtgtgctgaagatgaaggagaggagctctttatgtgaaagtgcagccgatggaaactggggtttgaaatataaaaggaaaagaagcaagttaaccgttagcccatctaatgagaatgaggctacctcaccaacatctgactctccaatgagccatggttccaccaaaaagaagttgaagcatgacactaacatttctccatcagccaagaagataagaggacacgatgggtatttttttgagtgtgtagaatgtgatcttggtggcaatttgctatgttgtgatagctgtcctcgtgtttaccacttggaatgcctcaatcctcctcttaagcgtctaccccctgggaagtggcaatgtccaagatgccgtccgaaaaaaggtagcttgaagatgttaggtaatgcagaggttggcacttctaaacatgaaaaaagtacaaggacatatgcaggtacgacatcaggtagtccaccttcgcatacaaaagtctcctttaagaccaggaactccacacaagacaaaactggatcaaaagaacaaggaaaacagtcatctggtggcacaatgatgggtggtgacccgaataatgaagttgagaaaaagaacacattgatattacatttgaagaagcactcaatgaaggaattatcagagaatgctaaacctttgaagtcaaaatttgttggagagccttcagaagagaaaattgttaaacatggaagtgtcttgaaactcaagaaacattcagaccgtatggacttgtctccaaataaatctaaaagcagggggcaaaatagtcagagagagagtaaaaggcctggcacaaaaaagcttaaatattcaatgtctgatgatgacagtgtttcctcatcagaaccatcgacatctcttgataacaatgaaccaccaccaaaaagaaaaccctcagatggaaaagcaccttcatccagtaccaagaaagggaaaaagaaagtgaagttcattgagaaaaggcactctgaggaacagtgtgtggtaggagacaaaacaacgacttcccaggaggatcagcaggtcgatcgcattctaggctgtcggcttcaaacaaacaaaatcaacccactgtcccatgcttcattcaagcagtttgaatcagctaatctccaggtggaagatatggctcttccgcttgcttccgctggcattcctaataaatctcatgatggaactgagtcttctagaaatggtacagtcgaggatatatgtgctgatgaatcagccaatcatagtggtcacagtttggaaatgcagaaggataggaacagtaaatcccatgaaaacgagtcatgtaaacgagaacaaggcaataatatattgtcaatatgttttgttgatgagaccagtataatgaaagatgatcaagtaggcagagagaatgttgcagcttccaaaaagggtgaagatgcgacatatgatttacctgcagaaaaggatgataccaaactaccagtcactagagctgatgcaatgaccaggaccaatcaagagcatacagatgagagcaaacagcatgggaaaataaagcaaataacagataaagactacaatgatgctggatatgagttcttgatcaagtgggttggaaaatcaaatatccacaacacctgggtttctgaatccgaggtaaaaatattagcaaaaaggaaactagaaaactacaaaacgaagtatggaacgagtttgataaacatttgcaaggaacagtggtgccagccacaacgagttattgctcttcgagcatctgtagatgaagtggaagaggctttaatcaaatggtgtggtctttcttatgatgaatgcacttgggaaagattagatgaacctacactgatgaaatatagccacttggtcactcagttcaagaattttgagtgccaggctttggataaagatgtggtaaaagattatgcaaacacaaggaaccgacatgagcttaatgtgttagctgatcagccaaaagaacttaagggcggcatgctcttccctcatcaactagaagcattgaactggctacgtaaatgctggcacaagtccaaaaatgttatccttgctgatgagatgggtcttggaaagacagtgtcagcttgtgcttttctatcatccttatgttgtgaatttaaaattaatttgccatgtcttgtcttggttcctctttctacaatgcccaattggatggctgaatttgcatcttgggctcctcatttaaatgttgtggaatatcatggttctgcaaggtcaagatctatcattcgccagtatgagtggcatgcgggcgattcaagccagattggcaaaacaaagagatcgtacaagttaaatgttttgcttaccacttacgaaatggtgcttgttgatgctgcatatcttcgttctgtctcatgggaagttcttgtagttgatgagggacatcgccttaagaattctagcagcaaactctttagtttacttaattcgttatcatttcagcacagagttttgttgactggaactcctttacagaacaacattggtgaaatgtacaacttattgaacttcttacagcctacttctttcccttctctgtcatcatttgaggagaaatttaatgaccttacaacagcagaaaaagtagaggagctgaagaaacttgtagctcctcacatgcttcggaggttgaaaaaagatgcaatgcaaaacatccctccaaagacagagcgaatggtacctgttgaactgacatcaatccaggctgaatactaccgtgctatgcttacaaagaactatcaagtactgcgcaacattggaaaaggtggcgctcaccagtctttattgaacatagtaatgcagcttcggaaagtctgcaaccatccttatcttattcatggaactgaacctgaatctggttcacctgaatttttgcatgagatgcgcataaaggcctcagcgaagctaactttgttgcactctatgctaaaaatattacacaaggaaggccaccgtgtccttatattctctcagatgacaaaacttcttgacatccttgaagattatctgactttagaatttggccctaaaacatttgaaagagttgatggctcagtatctgtggcagagcgccaggcggcgattgctcgctttaatcaggataagacacgttttgttttcttgctgtctacacgatcatgtggacttggtattaatttggcaactgcagatactgttatcatatatgattcagatttcaacccacatgctgatatacaggcgatgaacagggcacacagaattggacaatcgaatagactcctggtttacaggcttgtgaatcacagaaagaagtggaagatatcattcgctggggtacagaagaactctttgggagtagtgacagtgtggatggtaaagatagcaatgaagcctcaggttctgttgctgatgttgaatttaagcatagaagaaaaaccggtggcctaggtgatgtttatgaggacaaatgtattggtggttctaccaaacttgtttgggatgaaaatgctattttgaagctgcttgatagatcaaaccttccatcatcagtggccgaaagcactgatggggatctggacaatgatatgcttggtactgtgaagggctctgatgagggagatgaaccaaagagagaatatacagcagctggactggtcttgaaggaaaaatatggaaagcttcgagctagacaaaaggaaaggattgcgcagcgacacattatcaagaactatgctgttgataatcttgaggagttcatgactccatatatctctattgctaatgaacctgctgaaaatcctttgataatcgtagaagacccaagttcttcacagctatgtggtgctaaatgtttcagtgaatcaactggagaaatgaggcaatcctccaagaaatcaaggagatattctgaaatccctcaagatctttatgccagaattcctgataacgctgcttcatccaaggacaactcaaaggccaccgatgtcttcaatccagggaccccaaatcacctgctacctgtacttggcctttgtgctccaaatgctgatcaggtgaactcatacaaaaactcaatttgtgcaccaagcataaaggagcataaaagggccagtggtgacgtagtcaacaaacaactgtcaactcccgctgaccattctaatgagcttagaaacgaagttcaatcagcttctgataaggtcatctttcctggtgcatctgaggaagctttgcgaaggataagtaacatgatcccagataattattttcccttcagtcatattcctcctatatcagggaaggcggttgatcctgttgaatatattggagcttcgaatgcatcatttcaagggaaactgggtcttccaaacttcagtctggaagacaacactccacttaagcatattaagcctatacctgatatatttccttacctgtcactgggtgctcataaggattatattcgtagttctgtcccagagttgccagatagttcattattaccaaacttcatggcagatattgctggtacttcaaagcaaaaatcattcatgtctggtccacttcctgggctgggtcttagcccaggacaaccaatccatttgactatgcctgataatcacaagaaagtcttggacaacataatgatgcgtgctcagtatgcctcaaacaaattcttgaagaagagatcaaaactagattattggtcagaggatgaacttgatgctctgtggataggagttcgtaggcatggaaggggaaattgggatgctatgcttagagatccaaagttaaagtttttgaacaaccgaactagtgaagagctggcctcgagatggattttggaggagcaaaagattatagatgaacctatgtctgcagccacaagacgttctaactcaacagcatttcctggaatatctgatgcaatgatgtctcgggcgctcaatgaaagtaatttatctaagatgaggatggagcagcctaaattgcagtcccacgtaactgatattcagttaggttcgagtgatatcctatccagatttcctcatgttgaggctcctaattacattaactcaggggagggtggcccacctcagataccatggcaggatttcaagcatagatcaagttatggtggtgattttcctggcggtgcatttgacaagttggagaaacctgatgttggactgatcccgccatttatgcctaatcctttcatgactgatagcattgattcacttcccataaacagaaaaaacaatagttccattccgcgtagtgaaatcagatcaagttctcgtgagaacattcttttttctggtgtttcggatggacaaatcaacttgcttcatgagatgcagcgtcatgtgaggtcaggcaaacaacccattgagataaagctcaaccacatagaccactcaaatcctcagcttggtaatgctagtgacctcggaggtttaaaatcaaacaagttacctcattggcttcaggaggctgtacgtgctcctgcttcatctaagccacctgaacgtgggctaccagcaactgtctcagcaattgctcagtccatgtgccttcttcttggagaacaagaaccatcaatacctccattcttgatcctgggaacccctctttctcccccaaaagatccaaggattaattcaaagaagaggaaactccgcaaagctcatcaatctacctctcatgtaggtgattgcatcgctacccaagcacccccatccgttaaagcttcagctgctcctcttgctgtcgattgcaatgatggtgcgccttcactcaacttgaactctgcattgctgtcatcttcagctgtaagcaagaagctagatgagttacctcccacatttaaagaatcaaaccaaaccatggatggttcagaagctgttgcaggcaagttggaggctcctgaaattggttgtcaggtaactggttcctctccagtagatgacaaagctagagaatcttcaggatcaccagtgaaggatactcctgatgctggagtcagattgcaaggatcagataactcagctatggcattttctgcactcccacttgaagcacctgtgacaagcagcagagcagagcctgtggcatgtgatggcagtgacatgaaagaggatattccactagacgctgaaagcaacgggaacctggaggagcgatgaactggctcctcttgtgaacatggatgcatcacatcaagtatctgctaaaacgtcaacggagattggatgaaatgttctcagatgagcattagacttgagccagttagctcgacattcctttctcttccgttgagcagaatactgggattttccctctcccaatgtttccagtgttgatgatctcatgttgtgtaatgctttagtgcagagtgcagataggataaaattcaacgacaagtggtgcttcttagcagtagttgggcactagtccgtcgggagcaactcttggaaacctgtatacaagaaatgtatatttttgctaacatggtgttggttgggtgtgtagactgtagaccgctattcatttatttatgcgtatatggttcagtaatttgccgtctgtctagcggtcgctgtaagagtagacatggtgatgataatacctcgccttgagtggtggcctgatagaacatgaaactcactttccccagctgttattgtttgataattgtagcggatgcctttatggttggactaaagagaaagctgagatgttgtgtttacttcgcaaaggagagtttttactgtttttgtgggaaaccctatccctcacaaggggttgtgtaatgtatatatagactgagttagatgagtcag

SEQ ID NO: 29857 - DNA, 3492 bp, Zea Mays
cgggtcacatcaaacgtttgacttttaaataggagtatgaaatatagacccaaccaactgaactagattcgtctcgtcttttaattttcggctgacaaattagttttataatccgactacatttaatacccggaacggaggttcaaacattcgatgggacatggctaaattttagcgggttgtgcgatacggcccaagtgtggttcagcaacgccgaagaaaaatcagacaagaagcccctccggccctcgccctccctagtccctattcgccgcgcccgcgcccgcgccgtctcgaggtccgccggtctccttccgccgcaagctttgctccattccaccgccgcctcttccgcctccgtcggcaaaatgccggtctacagcatccgcggcgtcaacgtcgacttccccttcgacgcctacgactgccagatcacctacatggaccgcgtcatcgagtccctgcaacaggggaagaacgcgctgctggagagtcctacgggtacggggaagacactgtgcctgctgtgtgcgtcgctcgcgtggcgccgcactttcggcgagttcctgcgggtcgggcgtgggggcggtgggactaagcagttgccctacgggagtcagccgtccgctagccagcagtcagaggactctacgtctcagaagcagcagcagtcgcggtacccagtcatcatctacgcctcacggacccacagccagcttcggcaggttatcaaggagctcaaggctaccagctacaggccgaagatggcagtgctaggttcccgtgagcagatgtgcatccacgacgaagtgagcaaactccatggaagagcacagaacaatgcctgtcacttcctctgcaagaaacgacggtgccctcataataaccatgttgctgagttcataaaaaacaaacctgagcttgggaatgagccttttgatatagaagatttgataaatattgggaggcataagggcccgtgcccatattacatctcccgggaactttcaaagtcggttgatattttgtttgccccttacaactatcttattgatccgggaaaccgtcgttccctaaatggcataccatgggacaatgcagtacttatatttgacgaagcacacaacttggagagtatatgtgcagatgcagcctcttttgatttatttccgaataacctcacagcttgcatagcggaagctcatgaatgcatcaaactgtgttcagcaaagaggtccattgaaaattctgctgataaacaatttgatcctgaaaactatgcaatcctcaaagctcttttaatggcacttgagaaaaaaattgctgagctgttaattggatccgagttgggctacacaaaagctgggagttacatatacgattttctctctgaactgaacattacatcagacacatccaaaaaactgattgagacaattgattgtgcttctttgctactagaggaaggaaattctgctcaaactgggccaggggtccaggcaaaggctgcagtgtctagattggagtcaattagggacatgttagacataatttttaggggtggtggtcaaaaccatgcaaaatattatcgatttcatgtgaacgaatctcaacaaacacatggagatgcattgaaatttttgggtaagtcttcaaggacccttagttggtggtgtttcaacccggggctggcgatggaagaatttctcaagttgggtgtgcgctctatcatattaacctcaggcaccttgtctccgttggattcactagccatggaactaaaccttgaattcccagttagactagaaaatccgcatgtcatttcttcagaccaagtctgggttggagttgtgcctgtcggcccttcgggacatgctcttaattcttcttatcgtacgcgtaatactatacaatataaacaagagttgggcactgcaatagtaaatttcgcacgcattgtgccagacggactccttgttttcttcccttcatattctatgatggacatgtgtgttgacttctggaaaaataggaaccattcaaattcagcgtctgagaacacaatttggcagcggatctgtaagcacaagcagccagttatagagcctaggcagtcatcaaactttcagagtgcaattgaggattatagagccaaattacacgattcttcttctggggcaatattttttgcagtttgtcgtggcaaagttagtgagggtcttgattttgctgatcgtgctgggagggcagtaatagttactggaatgccctttgctactccaactgatgccaaggttcggctcaagcgcgagtatttggataagcaggggacaccatctaataaaaacacaaagatgttgacaggagaagaatggtatgtgcaacaagcagcacgggctgtcaatcaggctgttggacgtgttatcagacatcgccatgactatggagctattatttattgtgatgaaaggtttgtgtggccaaattatcaatctcagatgtcatattggctccgacctcatataaagtgctactcaaagtatggggaagtagtccaaggattgacccgattttttcgagataaagcttcttcagatcctttgacactagagccaacagattgtaataattgtatagcaccaccagcaaacaaacacatgcttaaagagaagctatcagatttggctgccagtgcacaagatgagtgcccacaaatcacattatcaggaaattcaaccatgagaagaagtaacttcatgaagttggctcagatcactcctgctaatcgttcaacccttactacaaaacacaactttgtgtctacatctacgaagcacaacctcccagaagaccagctgtcacaggataccaatgttgatattactgttgacttggcaatacaagggcatttgaaggaacataccttcaagtctttagggcttaagaaagctaaaacaatggacagatccaaagatgctgttgttttagatgacgtctcttcaaaattgcctcaaaatatagggtcaagagctttggccagataccaatgtggtggacctacacctgaatcaaagaaaagcactatagcaacagcatgcggaaagaatgatggggcctgtgaaaaaactgaaggccaggaatctaactcagggccagccttcttgaagctggttcaagaaaagcttagtcctgcagagtacacagagtttgttgaatacatgaaggccttaaaattgaaaactatgcataccaaggactcacttgaagcaataactaagcttttttcgtccccaggaagacttccacttcttgaagggttcagggtttttgttgcaaagaaccatcttccattatatgagcagcttgttcgaagacacaataatgtttctagtacatgacaaccacttctgctatgttcgcaggtaatagaagtacaccattttatgtcactcaagaaacaacagaagtacaccgtttggcgcgtcactcaag

SEQ ID NO: 29858 - DNA, 1086 bp, Zea Mays
tccaggtctcgccggggggcccgacgtcgagggctcgaggccttagttccaccacttgctgccaccgacgcgccatcgccgcgatgatctccctgctccgacgcgccctcgccgcatccgcctcgtctccggcggccacgtaccggagactcctcgtcgtcgcgccactctctcgcgcggcggcccctccaggcccatgccaggcgcccgcggcagggtcgcaggagccgccgaggcgggcgttccactgttctacgacccccctggggtttaggtccactccggcgtcgtgggccggtccctgtccgggggagggcgagggcgagggcgtggatacgggggctgagaaggggctggagatcgcgaggctggggacctcgcctcggatcgtggagaagctcgccgcgcggggcatcaccaggctcttccccatccagagggctgttcttgagccagcaatgcaaggaaaagacatgattggccgtgctcgaacagggactgggaagaccctggcttttggtattcctatcatggacaagatcctaagctacaacgagaagactggaaatggcaggaatcctttagccataatcttggcaccaacaagagaacttgctcggcaggttgagaaggagtttagagaatctgctcccttggacaccctctgtgtatatggaggtgttcctatcaatcagcaaatgagagctcttaactatggtgttgacatagtggtcggaacaccaggtcgagttattgaccttctgagaaggggtgttttaaacctttcacagatccagtttgtggtcctagatgaagctgatcaaatgctggctgtgggtttcgatgaagatgttgaggtgatcatggagcaattgccacagaatcgtcaaagcatgctgttctctgcaacaatgcctagttggataagaaaaatttcgaacaagtacttaaaggatccagttataattgacctttcctgcattgaatagatcttcctgggtctagaaacattgctgaagcatctgatgaacaccaacactttcatttctaaaaagtataccaaatcagcacctggacattatctga

SEQ ID NO: 29859 - DNA, 1068 bp, Zea Mays
acctaacccttcggccttcgttgcggacccgccactcacttcttctctcgaccgcatcttttctccgcgccgccgctcgcctgcacttctacgtgtgaaccgcgtccgcgcctatggcctgcccgtgcccagctgccccctctccacacgagcctctctaggcgtcaagcgtgccattaagcaaccgtggcccccacccctcctcggctctctgcgtgagcacaagcacgtctctgtagcccatgttcaacggaagcgaaagcccattaattccactgaagaaaacatagaatgtgcatcataatgtcacagaaggcctaaaatgttgtagtgtgcggccattgctcacgaggaggcagagtgccgtgttgccgagtgccgctggaccacatacgattgttgatggtaaagaagttgtgaactttgcatcagcaaactacctcggtttaattggcaacgaaaagattattgattcttgcatcagttcattggagaaatatggtgttggttcttgtggtccacgtggcttttatggaacaattgatgtccatcttgactgtgagtcaaagatagctaaatttttggggactccagactccattctttattcatatgggatttctacaatattcagtgtgatacctgccttctgtaagaaagaagatatcatagtcgcgtaagttcaccgtattacaaaattatgaaattcacaagtattattggaaccttgacttgtttggtgtatcgagttaactgtacatgggtagtttgatgtgattgcggtgacgagggtgttgactgtttggtgaaatgcttgggacaaagtggccaacaagaatggagtcatggaacatcgacaggaggggtgcggcagcagcaaccgatgtatcccttggacaatctggttttgacaagatgcaaatcaatccgctgtacactgtattccgcacttgcacagattgtttggttaattacaagattatctcagtgttttgattggtacacttatgtatgaaatattgattggtactcatctatattatatgaattatattattattaaatata

SEQ ID NO: 29860 - DNA, 1141 bp, Zea Mays
caagttacaattcagaaatctggaacattgcttgccttgcgaaagtgaagataatgaaaaaatctggaaaatgggaaaccatggaaattccacaaagtattcggtccattgtttgtctcaatttgcccagcttctctggtggactaaacccttggggaacaccaagtaagaggaagcaaagaaaacgagacttggtgatgcctccacttgtggatgatggccttctagaggttgtgggtttcaaagatgcttggcatggccttgtcttgctatctccaaaaggccatggaactcgccttgctcaggctcaccgtgtccgattcgagttcctcagaggcgcaactgatcatgcttacatgagaatggatggggaaccctggaagcagcctcttcccacggatgatggcaaagtcgtggtagagatctcccatgctgggcaggtgaagatgctcgcgaccaaagactgcatagccaaaggggtccatgaccatgagtcgtgcccagctatttcaacggttcatccagagtccatctacaacgacatgaacgatgacttcgaggaggaacggaggaactttggtgccgccttgtcgtttcgatacttgagtgatgtgaacaaacaataagaactcatgtttttattgagccttgggacaggttgcttgcatagggcgtagcaaagtagtttgatgcactaacttatgtaagattgtaagttgcccatgtaagataacttttgctggcaatacaacggattctgggttgactgtttgtatcatcagtattttaagaagtgtttcttcagccactcattccttacaatgggtttagcaagggcagtcggtcgtagaaatcatacagtcatgatacaattagttacttgtgaacttggatttgaaacaatattttgtaattaagcaaactctattattataaaatggaaactgaacatgaatgtgactaggaccggacgaaatactcgtggctcgttggcttgctcggtttatggtcagctcggatcgactcgtttgaatttttttacgagctgagttgacatcctagcatggttcgttaacaagccagctcgcaagctaaacgagctaccacattcgagcaaaacaaaatcatatgtatattattt

SEQ ID NO: 29861 - DNA, 4296 bp, Zea Mays
cccgcctgtccggtgtcgcgtgccgaggctgtgaggccgtcgcgtctcgcgtcactggctccccgctcctcgcagcaccaaaaacgcggcaggccgagaaatgttcccgaccgcgaggaccatgacaccgagcaggagacggaggaaggggagcgggaggcggtggcggttacccgcgcctgcacctggcttcaagcctccgatccgcccaaggtcagttgcggtgcggcatcctgccttccatttcggccattactctcagcttcgctcgagctcctatcctcgccctgcaatcgcggcggatccggcgttccccactccgtgtgggtctaggtccggtgcgcgcgccgctgcctagatgctagcttttgcacggcgggtcgctgggctccgacttctcgtctcctgctgtttccgacgccattgtgacccccctggattggatggaggctgcaaatcccccgcctccgacgatccgaccggtggcaccctgttattacctgattcatcagtcattcgattcggatgctgcatgcatgatgctggtgtttcgattggagtataagcctgtgcatttgataattgattttgttattggtctatcagccaaggttgcacgtctgtttttttggtcgaatcccacgactacttttttactgctagtggagattcttttttacttcacatgaggcgtagggtagacgagtccaaatgagttgttgagcaggtactacttgggtcttgggaattccatatgctaggggtaggacgagtcaacatcgggagttgctttcagctactgttcctagctcggttttttctggggacggaaaataatgctaaataaaaaaataatctgaaaaacgacacatctccccctagatattttgaactgttaatctggcactttgttctcgcaggcatcataaatgatgaatatgggggcacattgtatgatggattccttggagtgctaaatgctactccggggttgtcccaaatcatttatagcttggcaggagtagcaacaggcatctattcttcactgtcagggtaaattaccttcggcagtctccactttatataccacatgcttcttcaagcacagtgagcatttcctaattcctattataccgcttaacaataatctcgaaggagaagtgcaatttctttgtcttccttcgtaccagacaacccttcatatagttatatgtaattgaatgtcgtcaagttttgtataagctggaagtttatttttctgttttctcatagtttgggaagaaagagatgcctgcttgtcaatggtagtgaatcatgcccgatttaggtcaatttatggttggatttatctcacctacaaatatgctttctatccttacactattagttagctttgttactcttgtggcccgaacctgtcagtttaagtatttcaatatttttgcctaagcctatagtgtgatgatgagaagtactacaacaataagctggagcttgaatggtccagtgtgaaagtaagttttcaactgaaatccttgaaatacattagacttgtgatctttttacaagcttaatgtaaaacgcattaagaaaactgtatatgcttagcagaaagtgattgattggtgtagaagttcttttcagttgacgttaaagcttaatggagatcaccgctcaggatgctaaatgaagtagaaaatagtgcccagaaataagtagtaggaaaaaaaactattctgttttaggataaacttctgagtggtagcaatatattttattttcggagtttggatttattccaacacagtgagtagtctgggttaactgtggcttcagagctgtgtttgctatcacttttctgactgtgatagtgtgatatgatctttttgagtaaaagtttgattttatcaactttctgattccgacttccaccacggttgattagtagatcatacacagacatttcgtgctatctgtaaaatctgatctggaacttctttgcctattgaaattttgtagttcttcttcattgaagaaccgagaaagttatatcattgtatatatgcattcacactactatatgagtatatttttgttgtgccttttgctacaactttgctgtggttttcgattttcatctctaccgcaactttgcttgggactcaaatgttatattgtgttgctatgacgccagatctgtaaatgttacctataataataaatcttacatatacctagaggtggtaatggatcatgatctaaatgcttcttcacaaaatggtaaggttctaaataatttttagtttaaaaatgaatagaaatagagtttgatcctaatctgatccgatacttaaatcttatagtgtaaaatttagagcccattatcacccctacatataccatgtacaactccattgtttttctcgaatgacacattcatagttttaggtgttttgataggcaaatagccctcaaataaataaccagaaactcgcacacacaagacaaacacagtgggtttggtgactggactgacttagccttttctgattctctctctctctctctctctctttctctaggcagctgtgagctacattttaagatttgatagccttctaattaatgcagaatattacacgcttaatcagcctattactgctaatctgctattccttcatgctaaaattaagctaaagataagtctatgaacctagacactagtgtgcacctagacacacaattactctcgacatgtttaactatggttgcatggaatggattgactaatagtcattagtcaatggttttaatggctcatgtagtgattgtggctaattcaatgggtgtaaatcataattggtttatgaggagagatttttttaaaattttagcgtatatatgtaatactgataaaattaatgatctagcagacctaccatgggtgttaggacaagttttttagattttgacactggcagcaatcctccatctctgaccaaatttaattatttcttttgctccatatatatacataatgctttagtttttttttatcgtgattggactttattagttgcatgcttatttctctgacatcacctccaacaagaaatcaatagtgacaatgttgtcttgaggatgcaaaacatgtaaagaccaaaactggctgccaaaatgacatccatttcaaatggggagtagtaattacttagctattgtttgtttcctaagatctgcatttaaattggtgaacatattgtttatcttaatacttgccacacattgttttgatcttattttctcacatagtcacatacatataaacagccataactcataatagctctagaattcctgcaagactgatcttcagtgttcatgacaactttatggcttatgttctgatgtagttcgttacaaatagaaagaatcacacttcagaatgccacaaattttctgatagccatgaatattgcgtgtctgatattgtttttgtacatgaagggagcatgcttctttaagtacatggtatggtactccctccgttctaaattcaaagtcactttgacttttttggtacatagattttgctatgttatgtctagatacatagcaaaatttatgtaccaaaaaaaagagtcaaagtgacttataatttggaacaaagggagtagcctagaacgaccttgcttttcctttcctgcttctcatatcacaaatcaaatggatcatacaaaattttggctggccatttaatcgagctttggttgcaaagattatttcatattttgaagacattgctgccgattttcagaattcagtggaatggaagatatgacatatgccagaaccgagaaaatgtttggaaagtgagaaggtgctttgtattgggtgttaaaggactactatgtctgctattaaacatgtagaagaacacatttcagcataatctagtctacataagaatgttgacagcaagctgaaaaaagttcccatgaaactggtatctgtcaagaggatcactgaggcccagaataaaggcttcctttgttcattccaatccttaactggcagtcacttgcactattgagaatgagaatagatcgtctctgagacttggaactctatataggagtcagaggcaagagtctagttacccatttcgatgtatcatcatcactgtagttgagtatttacatggcgcggcgtgacgaggaagatatctgttccgccaacatcagcttggtcgtctttgagctcatcaatcaagcacgcgttgcattcaagcatcat

SEQ ID NO: 29862 - DNA, 259 bp, Zea Mays
tagaggttcaatacatgaatcccagcgggcatcgtctaaataggagcagttagaccattggcgggaagctccagtgtcgaggggctgattaggagggacctgacgtcaacttggctcatgattgactgagcgtgggggtggacctggtcttcgataacgtccaattacttgtcgctccggacactggcttagccctcggcgataatggtgacgtcgatctcgtcaaagtgagagaccatctggccaaggccgattccac

SEQ ID NO: 29863 - DNA, 2422 bp, Zea Mays
gccatcgcgcgctcgcctccctccccgcgcccgcagtccccgccgcaatccccgcgtccgcgcccgcagtccccgccgccgagcagtcccgccgcgccccctctccctgcaaaccccgccacgacgcagcaactgatccaccatcgacgcgcgcgccgcgcgccccgacgcggaacgctggatcccgcgcagcagaaggcggccaaccagtcgccgtcgcccccggcccccaccccgcctgctgcagcaagcggcgtccgctaccgcatgccctcgtccccggacctcctcctccccgccgacgctaccaagatgcgccgctactccgcgctgcccaacggcggccgccaggagacgttggccgaccgcgtgcaccgctaccagggcgtcatgctcgtcatcctcgcctcgctcgcgctcgtctctctcgtcctcctcctcatgccacgctcacccgctggcaccatgggcggcgcccggggcagacagcgagatcgagctcttcgtccaggtacgcactcccccgcccggtgacccgttgccggacttggagtcacgctgcctagactcgcccgctgggtggattcgtcgcgttggaggtcggattgtgaccacgccgtccagttaggatgtcgtcgtctccagatccaggggatggggttgctcggcatggcggccaagggcccctcgcccacgcgtcgcctcctatcgcagccgcacttggccatctcctcgctggtggcctccgtggctctgatccactgcttcctcaacacccggagatggttgacgtcgccttcgccgtctcctcgccagtggcctccaccagccccgcagtccaagacaaagccgcgacatgagtcaacccaagtccggtcgcacctacaccgatgaccgtacccaacgtgagtcaagccaagtccattcccctcccttgcttcctcaacttgttgtcttgtggtctgaagtttgtctcggagaaggtgatgccatcatcatcagttgtgattatgaattatattctactgataggtattcaatctctctattcggcaacaccttaaaaagtggattgcaggcttagataatttttggaacacaacattgctccaaaaaagtttttctgaagaaaaggtatcaatctgcagtttggtaagtgagtctgaatctgcagcaccaaggacttcaataattagtttgaacctgcacttacagttctatgggtcttctcaattcttaataatattatatttttaatgaataattgaatatatattgagtctgtgtcatagattcagtcgccttaacaccctttgttgttttcccacttaagttagttaatgagatgaatggatggaaattacgtagtgaatgtatgataagtccaggctacatgttaaaagacacacttggctacttgagctctgtatttccatgaagaaatcttattgacgggtgctttcatctgctatttggatccgttgctgatggatcttacaaagaagaagttgagctttaagaggaacgtggtgtcattgtcatctgagctcaagggtgtgaggagcaagcttgcttcctaggagcagttgtttgtaagggaatctcaaactagaaagcttgcggagacaaaaacaaggagcatggaagaggaagtaatcaagctgcagaaatgcttataggacaaggatgaacaactgcattcattcacaagtagcacagaacagtaccatcatgagttggatgatcttagaacacatctgtcatttactcaagctacaggagaagcaggaacccaactgaaccttcaacttgcttgttctgggagatctgtgagcaagcgagttgtcctataacagttggctcctcacaatgggtattcgacatgagccccatccctgccacagacttgggaaaggcacagtgatttttatggtgacatgaagacattcctcttcaaattatatctttaagcaaccaattttcgccctactggtgcaaacaagaatttgcaatgggtatggtgcataaaaaagtaggaaccacaatgagattgtgatgctgcacatggcacatcaaggtgcgcaagatatgtaccatagaaattatcgtaaagtgcacacagctgtatgtatagatgtttagaagtgaccgaagttaggcttgctcaaccggggcaatgatttacttagcctgctgaaatgtactataggtagcattcaagtttgtgaccatcatgcaagtacatgtgggtttgttgaaattgtgtggtcatcggagatgtagcaaaatgttccctatcgagagctcgtgtactatatttgttttatgaacttaattttgttgatgtaggactattacaaagttctagagacaacttaatttttattacaacataatatgtggtcatacatatgttaatgtt

SEQ ID NO: 29864 - DNA, 1765 bp, Zea Mays
ctgctgcagcctgcaggcagccgcccgcgcggaggaggaggaggaggaggaggaaagcaacaagcggagggacagcttcatcacccaccgcgccttctgcgacgcgctggctcgtgagagcgcgcagatgccgcccctgggcgccggcctctacgtcggtcccggcagcatgagcctggggctctcccagatccatggctttgcagatcaagcccagtcctcttcagcagcagcagccccgcagtttgaccacatcatgccatcgtcttcgggctccagctccatgttccgttctcaggcgtcggcctcctcgccatcttacttcctcggcggcagcgcccctcctgccgccgcccaggatttctccgaggacggctcccaaggcagccagggccctctgctccacggcaaggcgcacttccacggcctgatgatgcagctccccgagcagcagcaccagccgggcagcagcaacgccgccgtcggcgccaacggtagcaacatcctgaaccttgggttcttctcagccggcaacagcggtggcacgtccggcagcctgcaggacgcgcgcattgccatccaagaccagttcaacctcagcggcagcggcagtggaagcgcagagcacggcaacaacgtgatggtggcgtccatcggaagccacctcggcagaggcttcccttccctgtacagctcgtctccgtcggccgggatggcccagaactcggcgacggcgctcctgatgaaggcggcccagatgggctcgacgacgtcgagcaccacccacaacaaccacaacggccctactacgactagcacgctgctccgtgctacgggcttcagcggcgccaccggcagcgggcagctggggactactggcggcagggccgccgcgggagaagaaggggcggcgtcccacgaggcacacttccatgagctcatcatgaactctctggccggcggcggcttctccggcaccgcagggttcggcggcggcgtggacgacggcaagctgagcaccagagacttcctcggcgtcggcaggggcgccgcgacgatggcgccgcccgggctccacatgggcgccctggacccggcccagcagatgaaatgaggtatgacagtacgatcgagtatgatgggtcggtcagggaatgatatgatgaagagcagcaacgtacgataagcacatgacaagagatgcgagaagggaagtcaataataaaacagacgatcatgcacgtgaataagggtactagctttcgcgcgcatgcatgcatgggaaggtaagctagctagtgacgagggatcagaaggatggagtagtagtaaaagaaactgttttgttttaagttaatttccgtgttcatatgcatatgctggctgcatgcaacttgttggtttttcgccatttcccgtacgatttcgtggtgttaattcaagtggtttactactctatatatatatgagtatttaaatttggctggagatggcggcgcgcggtctcccccgatgtgaatgaaacgaagctcatgcatcatatgtggagctaggccgcgcgggccagagaccagaatctaagcaggatgctttggacgtttactgcttgttgcctcgtgctcttctggatatgccttttttttctcgctgcatgcatgcatgttgcatgatgatgcggctgtttatatttcatgttggttccttctctgggtcgcgctgctttcaaagctgaaagggggtcggcgggggtccgcgcagagaatgc

SEQ ID NO: 29865 - DNA, 1089 bp, Zea Mays
gtcatacaaaagggaatttttcatcttaattttgcctatactcttcactttctccaggaaaaagaatgtttgcatttatttctaatgtttccaaatcagacttcaacaaaatcaaataattcaatatattatctcctacctacaaatttcaccaatattggtttttgttatggtcctaccgcagcatgattcattttgtcagcatctgatagatatggttttgttcctttcttgcctgtacaagatttttcttaaagagatcagacaacagcaatgacacacacatgcacatgcaaacgtgcgcccactctctctctctctctctctctctctcttctcatgactttgagaactttgaagtgtgcattttggccatttcaatctgatcagtctagtagcttatttctaaatgctgttgctgcaaaccagcgtggccctggtactttaggtgataaccaagcgaggtcatatgggaacacaagtgccattgagatggctgctgctaaagctgctcagcatagattgatgcgtggagtatggactaatgctcgttttggtgatatgcgtcgtgctttagcagcccttctgtaccactgtgggtactatgaagactgcctacactacttatcattgtaccaaactgcaaagtctgggaaatccccaaccaatcgattggagatcttggaggacgaagctgtgaatactctcaaagcgcggttaatgcttattttagcagaggatggctggagcagatgtagacctgtggcaaggtactggaccaagaactctgagccgtggtaattagagctggccaacgttgcggctgaagcaaataactacagattgtacatagcattttcaactgtggatatgttgtacagtcacttggtaatccatgcgggatgtgaatcaaattcctaattttatacaacaccgcgttgttgctttatctgagattcgcagggcttttttatatttttgaataaatttgatacaatacaacaacatcctcaaatctgtatctacattttttagtcaaacaatattatgttacagaactatcagttttccgtaagttctttcaggcac

SEQ ID NO: 29866 - DNA, 2367 bp, Zea Mays
atttaaagaaaggaaaccgttttcgatttccttcctacgcgtctcgcgttggcagcgcgatccttcggagccgacgaatcccaccactgcccgcgccgcctccgcagacgacgcaactgacagtcaccgacgcgacgcggctcgcctcctccgcccttctgttcagcctcctcgcccgcgatggctccgggcaccgacgccggctacggccagtgggcggcggcgtgccccccgctgcggcggaacctgcagctgctttcgcccgacgaggttgagctagcaaaaatgctgttgaatgaaggccagattcacctgttcgaacactggcctgaaccaggtgtcgatgatgacaataaaagaggcttctttgatcaggttcgccgacttaattcaagctatcctggaggtctggtatcttacatccagaatgccaaaaaacttcttgcggattcaaaggaaggcaaaaacccatatgatggtttcaccccttctgtgccttcaggggaggttttgacttttggcaatgacaattttgtttcactggaaacagctgggataaaagaagcctgcaatgctgcatttgttcttgtagccggagggcttggcgaaaggcttggctacaaaggaattaaggtagcacttccccgggaaacaactactggaaaatgtttccttcaacactatatagagtctatcctggcttttcaagaggccagctgcaaaatggttgatgaggggtgccaaacaaagattccatttgttattatgacttctgatgatacaaatgcgctaactatcaagcttttagagtcaaactcctacttcggaatggaaccatctcaagtgaaaatactaaagcaggaaaaagtagcgtgtctagctgacaatgatgcaaggcttgcattagacccaagtgacaagtacaaaattcagacaaagccacatgggcatggagatgttcattctcttctttattcaagtggcttgcttgaacaatggaagactgaaggacggaagtgggttctctttttccaggatacaaatggattgcttttcaatgcaataccatcagcattaggtgtcagtgccaccaagggttacaatgtaaattctctcgctgttcctaggaaagccaaggaagcaattggaggaattaccaaacttactcatgtcgatgaacaatggtcatcaacgtagagtacaatcagcttgatccactccttcgtgcaactggacatcctgatggagattcaaattgcgagacaggctattctccatatcctggaaatataaaccagttgatactggagcttggaccatatattgaggagctcaagaaaacacatggcgccatttctgaatttgtaaatcccaagtatactgattcgaccaagacagcatttaaatcatccactcgtctagaatgcatgatgcaagactatccaaagacgttgcctccctcagcaaaagttggattcacagtgatggatacatggcttgcttacgctcctgtgaagaataatcccgaagacgcagctaaagttccaaagggcaacccttatcatagtgcaacatccggagagatggcaatttacagggcgaacagccttattctgagaaaggctggtgctcagatagctgatcctgttgttcacaccttcaacggacaagaggtagaggtttggccacgcgtaacctggagcccacggtggggtctcaccttcaagagtgtcaaggagaaagtgcacgggaactcttcagtttctcagaggtcagctttggtcatcaatggtcagaacgtcttccttgaaggcctctcgttggacggcactcttgttgtcaacgccgcggatgaagcagaggttaaacttaccggtcatatacagaataaaggctggactatccagcatgtcgactacaaggacgcctcggagaaggaagagatcaggatccgcggatttaagttggagaagattgagcagctagaggtgaactacacggagccaggaaaccatagcttgagtgcatgaaacaaaacattcttggttgacccgactagcttcctaccgattgggaatagttcgcattgcctcccagattctgggaggccattgccagcataagttgaagctgttgtattttagttcaaaattaaactagtggatgacaaatatttaagaatggaggtagtaataaggagccaagtgcttcaccaatcattccaaattcaatattctttatgtatatacgtactatttcatagccaaacgttttctcctcacctgtgtaatcggagttgattatttatctgggatctgatgttcatgttacaattttgaattttagaattgtgtgtgtattagttat

SEQ ID NO: 29867 - DNA, 1356 bp, Zea Mays
cagctttaaaagcatcctctccgccgcggcgcaacggccacaccttccgtctcccggcctccgctcgcctgtccctgtctctctctctcctcgctgagtcgccgccagccatgaacaacctcctcacggattcctttgagctcccccggcgggactcctcaagagatgcagacattgaaatgggaatgcatcaagctgatgcttcagacaacttaaaagatttcttgaagaagactgcaaatgaggaatccaaagcagttacaaaagcaagttccatgaaagcaattaagcagcggatggagaaagatattgatgaagtggggaaaattgctcgtcaggcgaagacaaaagttgatgaattggaaaaagacaacttatcaaataggcaaaaacctggatgtggaaaaggttctgccgtggaccgatcaagagagcaaactactggagcagtgaaaaagaaattgaaggagcggatggatgactttcagaccttgagagaagcaatcaggcaagagtatcgggaggttgttgaaagaagggtttttactgtaactggtaatcgtcctgatgaagagacaattgatgacttgatagagaccggaaaaagtgagcaaatattcaaagatgctatccaacatcagggaagaggccagatactagacactgttgctgaaatacaggagcgacatgatgctgtaagggatctagagaggaagcttctggagttgcaacagatattcatggacatggcagttcttgttgaggcgcaaggagacatgatcaacaacatcgagacccatgtctcgaacgccaccaaccacatacagcaaggtgtgagcgcgctccagaacgcgaagaaactgcagaggaattcgaggaagtggatgtgctacgccatcatcatactgctggtgatagtcgtggtcattgtcgtcgcagtcatccagccatggaagaagggcacctagcgtggtggtgccttttttcctgtttgtgtaatatgtgtgcagttttttttgtgggtgattcgtgatttgttgttgtacctatagtcgacgcaacaggagctctggcatttcgattcattctgtctagtgaaaggacactgccatcatatgccgataaaaataacgcttcgtatccgtcggtgaaaagattgatctctccacttggtctgggtgtgcagtgtgctgccgccccttgccgtcgtggacatgggatggcgccaggtgttcactgggatccatggagctactgccatagattagatttgtcctcatcatcaacatgctccacaatcccaaaatcttggatttgctgttgctcgattacatctctactacttattaatgctac

SEQ ID NO: 29868 - DNA, 3793 bp, Zea Mays
ttctattacaacaccgatgagaacccttgttctacctcccaaagtcgggttcccacccagcgtgcccgccgccgaccgcctgcacaagcctgcggcgagatccggcgtcgccggcgagcttcagcaccggcacgtgctccggaaggaaatagcttccggtgacgtacgctaccctctccgcggcgtcccggggagcggggacggggagcgctttttgctgtcacccgcacacgagcgacgagctccaccacctgcccagggttagttgtgtatggaacaatgacgaacatggcaccacggcagggacccgtcactcagtgctgttgattctggaacatcgcctcgctaccacccatggcaggtagcactgtgttccctgtgctgcgctcctccgagtacttcacaagtccgtcaattgatgagctggtagagagggaggtggctgatcctggctactgcagcagggttccaaacttcatcatagggagggctggatatgggcaggttaggttcttgggcaacaccgatgtgaggggcattgacctgaatgaaattgtcaggtttgaaaaacactatgtggtggtttatgaggatgagacttgtaagccacctgtagggcatggtcttaacaaagcagcagaagtatccttgctgctgaatccgaaggatcatccggagcccagtatccttgttgaagtgctaaggtgtcgtgcaagaaagcaaggttctaggtttctttcattcaatccagtgaatggaagatggaaatttgaggttgatcattttagtagatttgggcttgtggatgaggacgaagaggatgctgtgatggacgaggcagctgttcggcagccaattactgaagtaagagaaagagatccaccttcaaatagttatgagattgagctctcacattcattgcctgctcatctcgggcttgaccctgcaaaggtgcaagaaatgaggatggtgatgttttccaatgaggaagaagatgaatacatggaggatgggttcccttctgacaagaggtaccttagcagagaaaggatgaatgtggattcacctacctcaagcagtaaaggttcgaggttaaggtctctctctcccttgcacatgtcttctcagaaggctggcaggagatctggtatgcctgttcggaaagaacgtcaggcacttttggaatacaatttgaattcttcagagcttggttcatcgaatcagggtattcttatgtctgggcaaaacagaggatttccagtgagtatgaccaaggtggaaggctttaagctgccgcctgagcaagaaactcctgttgctggaaacacgtatactgtctgtgtagtggatgctgctttattcatgggtagatcatttcgtgttggttggggaccaaatggtttacttgtacattcaggtagtctggtcaatagtcctggaactggcctatcttctgttattcacatagagaaagttgcaagtgacaaagttgtgcgtgatgataaggataagattaaggatgacctaacagaactatgtttttctgctccaatggacctccataagagtcttgatcatgactttctagagactgagtctgactcgttcagattgaagcttcaaaaagtcatgacaaatcgtttggttttgcctgacatctgcaggtcatatattgatatcatcgaaaggcagcttgaagtcaatgatttatccatgtcttcacgtgtgctgttgatgcatcaagttacagtctgggagttaattagggtcttgttctcagagagagcaactggtagccagttggactctgttggtgatgatgatcaggaaggcatggttttagacaaaaaagaaggctctgtcgacatagaccctgaagcactccctttgtttaggagagcagattttagcaattggttacaggacagtgtttgccatcgggtccaaggagaggtgggttccttaaatgatgccaggtacttggaaaatatcctcgtccttttgactggtcgacaattggacacggccactgaaattgctgcctcaaggggtgatgttcggttggcaatcttgctaagtcaggcaggtgggtcaatgtcaaatcgatctgaccttgcgcaaacactggatcagtggaaaatgaatggtctagattttgattatattgaggaagactggttaaaggtatatatgttacttgctggtaacgtacaggccgcttttctagatttaccaattgactggaagaggtaccttggtttgattatgtggtatcaattatcacctgatacaccactcgatattatcattcgttcttacgatcaactccttggtgagggcaaagttccctatcctgttcctgtatatatagatgaaggacctcttgatgaagcacctcagtggtccccgggtgaccattttgatatctccttctacctaatgcttcttcatgccaataaagacgagaagtttgggctgctaaagactatgttcagtgcattctcatcttcattcgaccccttggattatcatttcatatggcatcagcgttcaattttggaggctgttggagctttcagttcaaaagatcttcacttgctagatttaagttttgtttatcaattgctttgtcttgggaggtgccattgggctatctatgtcattctgcacatgccgtatcttgacgatgccccatacattcatgagaaattaatcagggaagttttatcacagtattgtgagtcatggagtagagatgatgctcaaaggcaatacattgtagaacttggtataccagaagaatggatgcatgaagctctgtgcatgaaaattattacacatgaagcatgtgtagctaatgagctctatatacaggctctttatcacgaatactatggagataaacagggtgcactggagaatttgattcagtgtggcaactggaagaaagctcacactattttcgtgacttctgttgctcattctatgtttctgtcatctaaccatcaggaggtctggaggatcacaagtgccttggagaaccacaagtatgaaattgctgactgggaccttggtgccggaatatacatagacttctacgttctgaagaactcaatgcaagaaagaaatgccatggatgattcggattcactcgaggagatgagtgaatcatgcagaagtttctttggtcgattaaacgaatcgttgttagtctggggaagcaaattacctgttgagtcaagggcatgctactcgaagatggcagaggagctatgcgcgcttctggtggacaccccaagcgagacgctgaacctacccatggggtgtcttctgacgatgctcaacgctccagttccagacgagagcaggtcgtcgtacctgcaggatgcactctccgtcttcaccgaaatcctttgcagcgatccgtaggtgaaggggagtgaagcctacaggcaacacgccgaagagtttgtacgtctcatgtttgatacttgtagaaaattaggaatgtataactatgacctgatgttgctccggtgaatttgtaacgccatctgaagacatgtgtcgggatcttcgttgtatgtgagtaccaggtcttatgaaacgttgacttgcgagctgtaccaatggggagtgatttcctgggcttcattttctctgtgtgtgtgtgtgtgtttattacagggaagggcagcgtcacggcgacccgtgcttcggtgtacattggagattactgaggccttcgtttcagccgtaaatcacatggatcgaagagtactttaacttggaa

SEQ ID NO: 29869 - DNA, 806 bp, Zea Mays
tgcaagctgcctcacacgcaacgggccgccgcgttcctgccgccgaggccatcgctcaggcgccttccagtcccaggaggtgcgccgccgccgcggcgattggtggtcaggaggagatgccaggaagagaataagcagcagcaagaggccgaggagggaagcggcgctgacgagcaggagcagcagaagagaacgttcctgagcctggaggaggccgggctggtggagatgtccggactcagcacgcacgagcgcttcctctgccgcctcaccatatcgtctctgaacctcctgagagtgatctcggagcaggagggcgtcccgatagaggagctcaacgccgggcgcgtctgcgactggttcctcaaggacaagctcaagagagagcagaacgtcggcaccgccgtcttgcagtgggacgaccctggcttctagctagttccagcttcgttctgagccaatgatcatgctattctacactgcagcgcacgcaggggctatatatttcagggcttcaggcccttcacgggatgagcaaccaatgccacatgttcagtaatctcagaatttcagtttcaagaatgggcgcatcaatcctggccattccatttatatatctttcggtttggtttcatctttacaaattttctgtagcgacgaacatttttcctgtgcggaaaatgggaaaggaatttacgggtaaactgattttgggagatagatcgagtttcttgcaaataaattctgtcagctccaatttatctcctctgatcgttaatccggttattcaatcgaaaccaaagccg

SEQ ID NO: 29870 - DNA, 1239 bp, Zea Mays
cacacatacacctgaaacctagtacctattttacatttaacctcttccatataaaactgttggatatatattgaatgctttggattgtttgattgcacgctggcaccaaatgagtgattgcacgggatatatcaccacttatgtaatgtaacagtgcaagtttgcatccaaattctttatgataatgttgacaatatttggtgataggtgtatttatgccctacatatttgctgtcatgatacaggttcatcttgcatcgactgagccagacatttccgaatatgccgattttcgcattagtggattggaacccagcagggcttgctatactgtgcacttacaaatacggaagcatatcaatgggcctagagtcatacagatatgcttgcaacgtgaaatggctcggggtgagaggaggtgatctgcatcttatccccgaggacgcgtttcaagagctgaagccacgtgatctgcagattgccaaaagcttgatgtcgtcaaagttcctgcaggagagtcacagagctgagctggcgctgatggtggagaggggcaagcgtgcagacatcgaagccctctactcccacgggttcgatttcttggggaagtacatcgcgagaaagatcgtgcagggcgattacatctgacgattggccgctggaatgttagcatggttgcacggaacaatgagctgcatggactgtagtacagtagctatgtccaactgcctgtagactgaaacgatgtggcggtgcccggtgtatggtccggcactccggccgatgcagcctgtggatggcaggaccgggaatggatgcagggtgtagggtgtcagtatactacgcaccttgccggcgatcacctccgccatgcctaacctttgccctggcttcatcttcgccgttgcagcctgcttgaggtttgagaggtttcactgcaagtgcagccgtgcaggtacacctgagcgaagatcttgggcactcagcactctggtgtgccccatcggggcaatgtgcgtgagcttcctcaagaacccccgcccaggcggcgaagaaggcaggcacgactggatactgtcttctggccggggtcacgatctgtcatgcagatggtgtacacgactacccaactacaagtggcgttatttgttcaatcaacaggcacaggcaccggcaccctagggatagcgaccagcagcagctcagagcgtgggggcatggtgatcccagccgcctccg

SEQ ID NO: 29871 - DNA, 1907 bp, Zea Mays
cctgcaatcctgcaccggcgcgaaagccccctcacggcctcacctccactccggtgatggccgcctctcctttacttctcagatctcagtgctcacgccgtccacggtccactagttgcatcggctcccgcataaagatccacaccacttgagcagcagctagctcaagggaaggagaaggctggaagtggaaagaagtgggttcttgcttgagctgagctcttgctgcccttgaatctgttagggagtggagaacggagtatggggcgcggcaagatcgagatcaagaggatcgagaactctaccaaccggcaggtgaccttctccaagcgccgggccggactggtcaagaaggcacgggagatcggcgtgctctgcgacgccgaggtcggcgtcgtcatcttctccagcggcggcaagctctacgactactgctcgcccaggacctcgtctgtccattgcccctctcattctttttattcttttgcttgtttattatcgtccttcttcttttcttgtgtgcaagcaaaactgatcgcaaagacccaaacttggttggaaaggcaaaactgagtaaaaaacacgattaagcgtaaaattgaggacaccaataaaaatgagggcaccagcctaaaaaacccaaatttggtttggtggcaggctgtccaggatcttggagaagtaccagaccaactccgggaagattctgtggggtgagaagcacaagaacctgagtgcagagatcgacagagtcaagaaggagaacgacaacatgcagattcagctcaggcatctgaaaggcgaggacctgaactccctgcagcccagggagctgatcgctattgaagagggcctccagaatgggcagaccaacatgcgcgagaagcagatggactactggaggatgcacaagacgaatgggaagatgctggaggacgaacacaagatactgacttttaggatgcaccaacaggctgttgatctgagcggcggcatgagggagctggagaccggataccatcaggtccagcacgacagggatttcatttcccagatgccgttcaccttccgggtgcagcccaaccaccccaacctgcaggaagacgagtagctacagcctgctggatagtgttctgcatgccgctctgaactgaagctgcaggaagacgagtagctacagcctgctggatagtgttctgcatgccgctctgaactggagctcctcacctgcagcttctatctcgcgtttcatcattcagcgttagctgggtatctttcttttcatggcaccctggatgaagtctgtcagttgttactacgatgtggtcttgtcttgtgcgtctcttttgactttgctgggctgaggtcttgtcttgtgcgtctcttttgactttgctgggctgatttccgtgcatgtagtgatgatgatgttggggcgaaggcggagacgctacccttggctcgatgccttcgtcgccttcgtcgtctcgcttcaccaacgatgccaaagacgtcggtccgatgaggacttcgcgactggacttcgcgggcgtccttcgcccttctccattgcgagacgaaggcaagactccgacgatgtctgctagcctcacgtcctcatcgggtccggaagcccaagggagattcggtccactgtaacgggccccgcaaggataagcgtgttacgggcctcatctgtaatagtcttttctgtaatgacggtctgtaacctcccctggggaatattctaaggatactttgggttcccgagggcataaacgtcatttttttagcgcggtaggcactcgggcacctataaatacccccgtacagtacccttgaggggacagattaacagagctattgtcgttccccgttgaaccttgcgaactatttcttcactctcc

SEQ ID NO: 29872 - DNA, 2965 bp, Zea Mays
gtcctgttcaccacccttttcgttctcgtcttcctggctcccggcggcacccacccgttcccggagcaaaaataaaacgatcccaaaacacaaaagaatccgccacctcgccggcgacaggggcgacctcgcgcgccccggccggtgctgaccccgacttctccatgcatccattctgctgcgcgcctctcgtgcccgtatcgcccgcggcctctgccgcccccgctgcgtcctccgctgtggcgggcacccaggccgtgatgccgccaccgcagcccccgccgttgccgcctccgccgcctcgaaacaactccgccactggcggtgagaggcgcgcgcgcgcagcgggggtcagcggtggtggaggaggcgattcctcgccgctcgagggggtgaagctgaacgagatcgtcggcggcggcatctcgggaatcatgtacaagtgggtgaactacgggcgcgggtggaggccgcgctggttcgctctccacgaaggcgtgctctccttctacaagatccacgggcccgaccgcatcatcctatcgcgcgagaccgagcggggcgccaaggtcatcggcgaggagtccctccgccgcctcaaccgcccctccgccttctcgccgtcccactccaacggccaccaccaccctcgaaatcccatcggcgaaatccacctcaaggtgtcaaccgtgagggagagcagatcggacgacaggagattctccatcttctcggggacgaagacgttgcacctgcgggcggagaccagggaggacagagctgcgtggctcgaggcgctgcgggtgaccaaggacatgttcccgaggatgtcctctagcgagatggtcgggccaggggacaccgctgcggcagtggccgtctcaaccgagcgcctaaggcagcggctgcagcaggaaggggtcagcgaggcggccattgctgacagcgagaggatcgtgcgagaagaattcgaggctctgcacaagcagcttgtgctcgccaagcagaagcatgcgctcctcttggaaactcttcgccagctagagaaaaggttgatttggagaatacccttgttgatgagagccaaaggcagtcaaaagagtatggatctgcttctaaaccaaggcatgagaagtatagtgaaggaagtgctagcgaatctgatgattataatgaaccacaagatccagctgaagagactgacgatgaagcaaatctttactttgatacaagagattttctatcctcaagctcttttaaaagtagtggatctgatttccaaaggtctgaagctggttcggatgatgaagatgattatccaatggatggaattaatccttctatgaagtctatcggagttagttatgcatatgtaagaagacggaacaggctgccagatccagttgagaaagaaaagggtgtaagtttgtggtcaatgatcaaggacaacataggaaaggatcttacaaaagtttgtctgcctgtttacttcaatgagccactctcatcgctacaaaaatgttttgaagatcttgaatattcctaccttattgatcgtgcatccgaatgggggaaaagggggaatagtcttatgaggattcttagcatagcagcatttgctgtttctggatatgcctctacagatgggaggagctgtaagccttttaatccccttcttggggagacatatgaagcagactatccagacaaaggcctccgttttttctctgaaaaggttagtcatcaccctatggttattgcatgccactgtgtgggaactggctggaggttttgggctgatagcaacctgaagagtaaattctggggtcgttccattcaacttgatcctgttggtgcattaacactggagtttgatgatggtgaagttttccaatggagcaaggtgacaacttcaatttacaatctcatattgggcaagctatattgcgatcactatggtactatgcgcatacaaggtaattgtgaatattcatgtaagcttaagttcaaggagcagtcaattatcgatcgcaaccctcaccaggtgcaaggtgttgttcaggatagaaatggtcgaactgttgctacactatttggaaaatgggatgaaagcatgcactatgtaatgggtgattgctttgggaaaggcatgggaactgaacagttttcagaggcccatttgttgtggaaaagaagcaaaccacctaattttcccactagatacaatctcactcgctttgcaattacactgaacgaacttacccctggattgaaggaaaaattgccaccaacagactcaagattacgaccagaccagagatgtctggagaaaggtgaatatgaaagggcaaatgctgagaagttgaggcttgaacagaaacagcggcaggcacgaaagatgcaggatagcggatggaagcctcggtggtttgcaaaggataaagctactgacacataccgttacctcggtgggtactgggaatccagagaaaagagcagctgggaaggctgccccgacatcttcgggcaagaccctaacgatctgatgatagctgactaggtttgagtaggttataggtcttttggttctctttttcgggaacgcataattccggaaatttttagtggttcatattatagagcaattaaatggccgttgatatgtaagcattggcagtgcctcagggagtattgatctcgtacataataattagacaatggttcgtctcacatgtcaccttatttttttggcaaagtatttttagccctcttgtgaggttttcacgctcacaagttcagtcttcagagtggtggtataaggtgggcgatcagtgattcaccagtatatggctattattattatataaatgtagtcttatactggatatgtaactacacatacaagtgcaggagggcgtgactttgttcatcattttggtggagtgctagtaaagatattaagctg

SEQ ID NO: 29873 - DNA, 899 bp, Zea Mays
cctgccacactcggcgccgcgcctataagtagcgcgcatgcgccggcgcagcactgcacccacggctcgagctcgcagcgacaggcacaggcagcaaggctggtttccttcctcgtcgaacgtctgccgctgctcgcgatggccggacgcggaggaggtagcaagagtagcctgtacgcggcgctgggcgtggccagcgactgctccgacgccgagctgcgcagcgcctaccgcaagctcgccatgaaatggcacccggacaagtgcgccggcgcagggagctccggcggcggcgcggacgccgccaaggccaggttccagaagatccagggagcgtacgccggacaacggcaagggggagagcctggaggacctgcagcggcagttcgaggagctgttcctgaggccgtcgccgtcgtccttctcgccgcagaacgacgcagctgggaagtcggcttccaagagtaggcctgctgggaggaaatagacaggacactgcggcgaataggtcggtccagctactcctgttccagataagctacgacctacgaggtaccgatacctggccaggagcccaggacagcgacctgcgacggcgacgaggctgccagtgctgcacgctcaagtacatgctccgagttgtagctactactgtagatcggcacggcagtcgccagaatggtaccataaggcggccgtacgcacacacgcatgaacgctgtttttaccatctcaggttcgctgcaaaatttccagcgtgttctctgtaaaatccctgcatgattgctataaagaaattcttcgtgggtactaataaatggagtgctcagtaatggccatcgtatgagaggcatatgctaaacagcaaaaaaaaagttttttttttggcaaatatcctc

SEQ ID NO: 29874 - DNA, 579 bp, Zea Mays
atgtacttctccccctcactgctcgctctctcctttgcacccctagctactactgggctcctcctccgacttgctcttcgcgcagcaagcagacggggaaacaagaatcatcccttccgtatatactactactactactactcaatactcatgcatgcgcactgcctcccggtgcggcgtatgaaccagacatgaacagggagcacagcagcagcagcagctccaagctcatcaacgagaagctcgaggaacaccggatctccaccgcgaagcactgcccccactgcggcgagaaaatcgacagcaaaccagattgggtggggctgccggcaggcgtcaagttcgatccaactgatcaggagctgatcgagcacctcgaggcgaaagtgaaggacgaaggctcgagatctcaccctctcatcgacgagttcatacccacaatagatggggaggacggcatatgctacacccaccccgagaaacttccagacatattcctggctttccgagctttgctttccatggagtgatatattgtatgttgggattgcttcgccatgaattatgtgccgtggtttg

SEQ ID NO: 29875 - DNA, 308 bp, Zea Mays
agaagctcacctcgacggcggagcagatcgggcgcgcccgccgagtcccgtggtccacccgatcttcggagaagcagattcagcggacagccccagaccaggcctccccctcctccctctgggctccgcggacggaggaactgccgggggccgccgcctgcctctccctcctcttccgcccgccggagccgcgcctaggagcgaaggaaagcgagagggaaaccaaaactagaccagcagaagggagagagagagggacgggggggggaggtggttgggtcgctgcgactctgggtgagaggaaccac

SEQ ID NO: 29876 - DNA, 3838 bp, Zea Mays
ccgtccgtgcacacctctctctctattgtgcgttgtcgatcccccgcgagcccgccctccctcacccccacgagatggtcgggagatccgccctcgccttgcctccgcgcaacaatcgtgcgcccactcctcatcgcaatccagtagctccggcctcgcctcctcaaccgcgcattcccctctcccacacccgcctcgttcgcccctaccgcgccatcaacgcgcctcccccgccgcacaccccgtcctccccatgccgaatcgtgatggttatgctccccacccacgcgccgcgtgcctcctccttccccgccgctcccacccgagatggttagctcccctccttctggtcccttcccctgcctcactgccagccagcgatggagcaaggccaggggattcgccggattcaccgagcgggctctggtggcggccggcgctgccgtcgtgtccgccattcttgtcaacccccttgacgtcgccaaggtacgccggtgaccctgtcgttgcctctttcgcttcctctcaactgccgcccctcaaccctcgacacttgcccacaactgtcgccattgcccgctcgccatggcgctaaaataaaccccctctgcggccgccccgtatcctctcgctgcggccgcgggctggggagcaccggccttggcatcgtcatagccgcgggagtcttcagcgccgccgcctcgttgctcctcgcctacttcttctggcagtgcaccgggaagggcaaaggaggccgccgtcgccacaggcgcggcaccagcgagtcgggcggtggggaagacgggagctggtggaccgagaggctgcgggcggcgcacaaccgcctggtcccggtctcgctgttccagaagcccatcgtgaaggtcaagctcgctgacctgatggccgccacccatgacttcagcactagccacatcgtggtcgccgggagctcgcaggcggggatagcttaccgagccgtgctacgggacgggtctgcgctgacggtcaagcgcctgcactcgtgcccactttcggagaaggcgttcagggcagagatgggtcgtatggggcagctgcggcatcctaacatcgtgccactgctgggcttctgtgttgtcgaggacgagaggctgctggtgtataagcatatggagagtggggctctttcatcggtgatgaagaagccaggggaagcgccgctggattgggcaacgcgacttaggatcgccgtgggggcagcaagggggcttgcgtggctgcaccatgggttccaggttccgcagattcaccagaatttgagctcgagtgcagtgcttctcgacgaggattatgatgctcggatcacggatgttggactcacaaggttggtccggatggcgcctggcgagggtggtgataccagtcctttcctgaacggggactttggggagtttggctatgttgctccagagtatgctagcaatccagttggtacgatgaaaggcgatgcgtatgcatttggggtgatattgtttgagcttgttagcgggcaggagtctgctgctgtggttactgacgtgacgggtgaaggattcaaggggacattggtggactgggttaaccagctcaaggcttctggtcgaatcagtgatgctattgataaaccattgcgtggaaagggccatgaggcagagattcaggagttcttgaagatagcttttgcttgcacccagccccgtgtgacggagaggcattcaatgtatcgggttttccacgctctgaagagcatcggagagggctgcgatgtcacggagcagtttgatgagttcccattggcctataacaaggatgattcagacgctatttagctgatgatgctgattgccaattcgattgtggaaatgtttggtcaggcttattgatgatatatatatttagccttgctatggacagaccggaagcataaatgagtgataagagaacaatatcgaggcaccaaatctagcgccggatgccgggtggtcaattacatcgttgcatcgacaggggatgtgataaccataagtaatattgctcgaaaatgtagagctgactcttgaagcctttgactaaatgcagctgccattcacgctgaaagcgcattctaacacggcatgatacactagcaactggaatgttgtcaacatcagcggcaacgacgacaacgccacatcgagaaacaacaactgtgggctagggagcacaatcccgtggtgcggtgacttgcccacgtttgccatgctgccttgatgcatggcacatcaacaagaagagcaccagtttggaaggctaattccgaaggaattgagatgtgcagagggagatgaagaatgtggagaaagacatcagggtagctactaagcgcaatgacatgttatctgcaaagagctgatgctgctcggagtcatctcgctgctgctcagccagacggcacgcttcatatcggagatctgcgtgccgtcctcgctcttcaccagccgcttctacatctgctctgagagcgactaccaggacctgctgcgcaacacggacgccaaccagacggcgctcgacaagaacatgttcggtggccagcggctgcacgtctgtggcgagggccatgaaccttttgtttcgtacgagggccttgagcagctgcaccggtttctcttcatccttggtatcactcatgtgttgtacagttttgtaacagtggttctgtccatgatcaagatctatagctggaggaagtgggaaaccttagcaggtccaattgctgctgaggaattgaaagctaggagaaccaaggtgatgagaaggcagtcaacctttgtttttaacaatgcttctcatccatggagcaaaaataaaatacttatttggatgctttgctttttgcgccaattcaagggctccataataaggtcagactatttggcactgagtatcacaagctaccacattcatatgacttccataaatacatggtacggagcatggaagattattacaatgggactattggtatcagttggccactttgggcatatgtgattgtctgcgtattaatcaatgttcatgcagcacaagcagcacgccgtgccgctccaaccgtcttgcttccccgcttagcttcccgccgcgccatggcgtcgaccaaggctcccggcgagaagcaccactccatcgacacgcagctccatcagctggtcccaggcaaggtctccgaggacgacaagctcatcgagtacgatgcgctgctcattgatcgcttcctcaacatcctccaggacctccatgggcccagccttcgcgaatttgtccaggagtgctacgaggtctcggccgactacgagggcaaaggagacacgacgaagctgggcgagctcagcgccaagctcatggggctggcccccgtcgacgccatcctcgtggcgagctccatcctgcacatgctcaacctcgccaacctctccgaggaggtgcagatcacgcaccgctgccgcaacagcaagctcaagaaaggtggcttcgccgacgagggctcagccaccaccgagtccgacatcgaggagacgctcaagcgcctcgtgtccgaggtcggcaagtccctcgaggaggtgttcgaggcgctcaagaaccagatagatccacatttatgcttatgtttattttatattttttgatttgaatatctaaactatgatgttctatgaaagatcattcttgaatttttgcctttaaattttcttgttaaatcttgtatactacactattaaatgagtgctcgtgcgtcacagtcccgagtttctctttaacgtcatcctggacggttcgt

SEQ ID NO: 29877 - DNA, 1559 bp, Zea Mays
gtcgacgcgacgagcggctcatgctcctgtgcagctgtgctccacgtgcacgtgacctgggtcgaacacatggagatcgagcagatgctcccgatcaacgtcctttaccgcaacctggtgctgagcggcgccgcgttcggggcgcaccgctggctggccgcgctgcagcgtgcgtgcgagcggttcgcgtccgtggccaccctcggcgtgccgcaccacgacgtcgccggagtgacgccggaggggaagcggagcatgacgaagctgtcgcagcggatggtgagcagcttctgtgccagcctgagctcgtcgccgctgcagcggtggacgctgctctctggcaccacggacgtgagcgtccgggtctccacgcaccgcagcaccgactcaggccagcccaacggcgtcgtcctcagcgccgccacctccatctggctgcccgtccccggcgaccatgtcttcgccttcgtccgcgacgagaacgcgcgctcccagtgggatgtcctgtcgcacggcaatcaggttcaggaggtgtcgcgcatccccaacggctccaaccccggcaactgcatctccctgctaagaggtctgaacgcgaaccagaacagcatgctgatccttcaggagagctgcacggacgcgtcgggggcgctggtggtgtactcgccgatcgacatcccggcggcgaacgtggtgatgagcggcgaggacccgtcgggcatcccgctgctgccgtcgggcttcgccatcctgccggggtccggcgcgggcgcgtccagcagcgccgtcgtcccgccgccgggctgcgtggtcaccgtcgcgttccagatcctcgtcagcaacctgccgtcgtccaggctgaacgccgagtccgtcgccaccgtcaacagcctcatcggcaccaccgtgcagcagatcaaggcggcgctcaactgtgccggccattgatcgcctcgtcgcccttccaccctcgctccgccgccacagtaactgacgagagttggttggcccgttgaatgctcgcattcatggagtccacctgccgctgctcccgcggaaactgctgacgccctccagcaacctatatccatgatccatccccaccatgcaccataacagcttttccttcctctagattcagcgtcgttttccttggcttaaagttctcaggattcgcccgagtcctcttcttctttcttttttttttctttcctccttaggcatcattcgctcgtgcgccaaagatctgtcgaaggctttatgagactgagggagtcaagaacgcaccatgctaccttgtccctttcctccggctgcagccgttttttcccctcgccatgcacccacccacccaccccacacacacttcttccttttcccttagtaaaaacttgcatgcatgctcacatccttgtcatgtcgccattgtcgttggtgctgccgcaacagaggatgaatggttcgggtattgacttctgtccattaatgtaaagccttcaatgaacattcatttcgattataaatggaaaggagaaaaaaaacacaagttctggtaaaaa

SEQ ID NO: 29878 - DNA, 430 bp, Zea Mays
cgggagctgacttaacgattgacaataatatcgcacgaggaacagtgaaacaggaggtggtcctcctagacgtcacgtacccatcatcctccgtgccggtgcgcccggtgcctggtccatcaggtttgttgccgagtcctaaattttggcttcggcgtccagctgacttgatggatctcccgtctcctctctcccgtgggggtggggctttaatgaccattagccggatatccaggcaaagcatggctatagctagttttgttcccagccctcgcgttgccatcgcgcattcaaagcaagatctccgacccaatcttccgcaactgacctaacggtggtggtaggacagccgggtccggctccagttccttctctctctcttttcggtggtcaccctcctttagcagccggaggagaggaccagcctgac

SEQ ID NO: 29879 - DNA, 802 bp, Zea Mays
gctgcaactctcggactgcagcattccatttccaggaaggccacggcggcgagaactcactcgggcgctgccggcgatgtacggcacttccgaccccacagctgcggagcgcacggctttccggcgtgcggagaaacagtacaagctttacaagacactcaacgtcaagggcaggtccaggtccaggtccaggtcaggatgcaggccgtctagcggagagggaggtggcgctgatctgtcagccgtagttgacttccatgctctgcttgccgccgacggggagcttcctgacgggattggtcggcgtgagtgccccggattcgaccgccccgtgttctgcttcttggaccggccagggttctatttcattcctggtgctttatcaactgaggaacaatgctgttggatcagggaaagcttgaaaacatttccacagccacctaataggactaatttgactgcaatatatggttcaatttcggacttactcatcgctgccgaaaatcaacagatattggttgaagcagaaaatcctgatatccaagaaagaaataaacagaataattgtggagggaaaacagaatccaaatacttcaaatttgtggactcagagagccagaaaggggaagagcataggtcaaacgcagcaactacccttgtgaggaagctccggtggagcacccttggtctgcaatttgattggtcaaagatatagaattccattggagtgttaagtgtatgtcaaggcacatcctataggaccatacaacagatgaggcttgaggctctccatatatagttg

SEQ ID NO: 29880 - DNA, 2673 bp, Zea Mays
gacggcattacctaaaccataccatagaccatcaatcacttctaacacttttcccgtctcccccttcctcgccgcctccactacagggctttgctcctcccaactctcgaaaccctacccacgcgatgagagatcgatcggtcgagcgcgaattccccagccgcgagcggggggatcggccgccgcccggggtgctgggtcccccgcgccgcgggccggcttacaagacgaagttgtgcgcgctgtggcagcgcggcggctgttcccgcgacacatgcagcttcgcgcacggacacgccgagctccgccggttccccggatcgcgcacctcgttcccaccccgcgccgatagaaaataattctcacaagtggaagcttgttgcagtctgcagaattaggcggcattcttactggttgccttttgatttaactaccattcaaattagcagactcctgagcagatttattagattcaactgctgccagaggataagatgacttttatatagattcttcagttggcatttcaacgatttattgtgacctgtaatgcttgtccctacatcaagaaggtgggcatatcagtatcttggatgatgactccactgaatgatgtccataatacatttgatgtgctatggtcatgtgcttagcagctttaacggttaattgcacatacccttgaatattgtgcatcagttagatcattgggaagtgttattctcactggtaattgcaagttattgtaattcttgcaagtcgccgcggaagatatctggacaaatgatagtagatttatattgtgatattgggattatagaagacatcaacttgtcataattgttatgtgatgttgttcatggtcttcatcaatttgattttcaacaatcaacattatgagtttggtatcatcttaatgggtatgtcagtggtttcataccatactttggtatctacccatggcattaatttttggctctactttgttgtggctaatgatattatcctggagacccttctacttattgtgcattgaattatcttatagctcaaaggctgtggtaaggttacaggcttatgggtgacctatctctattagttcatattgacacattttttgttcagcttcatttatccttttcttgtataaatttttctctatcctgacttctagggagaagagattatagaggtggtgactttagagataggtttgataggaggcgctcacctcataggaggcattcccctgatggagattccaggggccatcgctcccttcgtgaccgacgaccaaattcccaagaaagggaatctagctattcacggtctcccagtaggaagagtgaaatgaggcatgataagaagcctgatgatggagaaactaactcatctaggagtctcagtgtctctgacaataatgatgatagaaaaaaggagacactgttaagtggtgatgataaagaggatcacgaaatacagctcaaacaaataagacaggacatggaacttttgcgtgatgataaatctctcttggagataattttggatgagaagaatgctgaagtgcgcaagatttctagcagattaaatgatcttgatctgcagttaaggaaggagaaagaggaatgccacaggatgacctcaaaaattaaaaagttccttaaagcccatgctcgctttttgaaagcacaggaagaattaaaaaggtcacaagctcgttttgagagactcggtgatttacttgcttcagatattctgaagcgtggtgctaatgaagaagtttctagtatcaatgttgatgaagatccaaatgttccttatgaaaggagcccaaatgctgctatagctaagaagagatcaataccatactcaacaagtgaagaagcgaaagccgtgaagaaaagaagagagcgggactctgacacaactaggccagataaatataggtttgaaggtactattgcaggatttgaaaaactaagcaagggaaccgagccaacaaaatctttatatttgaagaagaaactgtgggaagatgaaaaggataagataggcaactttgtctcctcagccaacaccgacaaggtcaaagaatctccggtcaaacatgttttgccctccactggtatggctgctcatgctttggacgatctgtttgaagctgttgaactggaggatagacgtgacacatcaatagaaaatgatgctgatgacgaaactaggtcgcctgttatgcccccacaaccaccaccggtggttaatacttacgagcagtacgaggctgatgacgaggaagtcgacgtggaatgattagaatgccgagatggtactggaatgagctatatagctctcgcgcctgtgtaaagcattatgtaatatgtatttgatgctggagtttaccttgcataaaaagaatcgtcattaatgatccttggtggatgcggtttaagcactcaacttttttgttaatttgatgaaggcaacatgccctgttacctgtacctaatataccacgtggtggctagctagccagccttgtcagtgccctggtacttttgggtggtcttgctgtgctgttcgcggcacttgaaaactgatgttttgtaggactgatgttttgtaggagtattatttgaatggtagccgttgatcttcggctgttgatgcgct

SEQ ID NO: 29881 - DNA, 2387 bp, Zea Mays
gaaaaggtaaagatatttgtactttcttttataggagcagatgaaggcataatatccctacttagacaaatttatctccatattgcaatttaaatggtagcagtagatcattaatctagtatcaatcaaaatattcgggaaggattgcttgaagtattctatggagtttatgaaaaggatcctgacaaagtgcttcaagcaatggttcaaatgggtgtccttgttcctactggagatatgactgttgtcagaagaaccgctcaatttttccttaatagctttcaagagtgcctaacagcacaaaggaaggagagagaaatggcaaccgcagaactgggtttcaaaaagcaattaactaaggaggagaagtttgaaaagaggaagcagagacttgctgcaatcggagaggatcttttggcgattgctgctgatcaaccatttcgcttccctgccacatttacatttgtggtcagagcattctcagttctagatggtactgggaaaggccttgatcctaggtttcatattacagagattgctaagccaaatgccaaggaattgctaagatttaatgacgctggtgttgaaatagttgtgaaggcaagtttcaacatttggtcaaagctgttaacctatctctatgatagcacatctcctaagggttagggcttgtttggctaggagcggattgaaggggattggaggagcctattaagcattgaacaatttacccatgcttgtttcctattctttggtcgtgataacgtttgcaaccatgaatagtacatattgcttttccaggtgtgtggagagacatgtgtattcctcctatgacgaattccttaggctccatgaaggtaagcctgtcttaatgggcttgattgttgaacctgacttagtacttttatccatgtcacggcattgaactagacagtcactcatgtccttaggatattaacggtatacatcaacaattcattctattttaattgcttgcaaaacttttttggcccttcaaatgagttccacgcatcaagaagtcaagattccaggaggcctaaaataggagaggagggcgcagcttgattcaatccatgtcaagtcagaggctgctgcgaggtttgcacatgcaagtagaatttagatgatctctgttaggcatctaactgaataaatgatctccattatggactggttatattattttctgtgcgatcggatgggttaaagaaaagacgtgaaatggtattttccagtatggactgtataaatgtaattatattcctatgctggtcctgcttcgctttcatgtggatttatcttgcaaatggtatgtggatccgttccagaggcaatgagccttgcagccagtttgcagtataaaaaacccaattatgtccactgttggttcgacgcagcgtgtgccgaggatttctactgccaagcataagaaagtgaattgcagataaatggtctgttcgcaactggtgctctcgggcgactccatcactgagcaacccttcgccccggtggctgcggtgtcgcactggctgacacctgctcgcagttgcattacaagttttactgactatgtattttcaggtttattcaatttcagttgtaatgcttctgacagcagttgtatcagtcctcttgttcagcttccatgtatccctcgcatccttccttggatccacataagtgttaatgataattttgttgcatctcctctgctgatcagagctttcaaactcatgacagaataatgtactaaacttcagtttggtgtctatctcagtgtacctacactcagttggaaaacttcaaccacactgcaacaaggtttataaaaggtttgctatgaggaaaaacaaatttatgggctcaaacaaagtgtgatagtgaaagtcattttgcttccagcttaagaaccaagccaagaaaacagatatcaactgtgacgccacactcaaaagcttgtttggtgagagggataaggttgggatgctggagatctctaagcttttgagccgtggcttcccgaaaatctccaagcttttgtggtccatggagccagggatggctctttggtaaaagacttcgttgtggatggcctcttttatggtccatgttaagtcccaagtcccactaggtggttaagcagaaaaatcttgtgatggcattaagactttcagactttgtttttgggtctgatgcatgtaaaaaggattcccagtgtttctgttgctcttgcgatcctgtgaggacacatatgagagaaatatttagtttgttgatggcaaatcttgtcttatgttcatgcctgtacctatctgatcaagcgttatgatatgatcccatgcgtggtactgtgttctttagagatg

SEQ ID NO: 29882 - DNA, 192 bp, Zea Mays
cggtgattcccctccgtgcctgcactcgggtctgcacgtgtggtcgagggtgtacgccgggaaccagtgaagctgcaagagcccacaattcgaactacggagcctcagggcgacgtgaattgttcgccagagttctccatccgccgcggagccgcaacacgtcggggattggctctcagcgctgcacaatcc

SEQ ID NO: 29883 - DNA, 5126 bp, Zea Mays
ctttgggatcgaagcgaaaattaagataatttttcactcatattttgagaattacgaaggaaatttaagctcgtaacaggagaaagaggaggaggaaagtgggaatagaatagaggagaggagagggagaggactggactggtactcgcagtcgcactagtgctaggcgcatccggcatccccatcccttgcctccgaatcggatcgccgcccccgctgccgctgccgctgccgccgagcggaagcagccatcaccccaaaccctagccagccatccaactatggagccgcccgccgccgccgccgccgactcctcgcccgatccgacgccgcaggaccagtttcctgccccgtccccttctccctccgcctccccggccaagcgctccgcctggaagcacccctcccccaacggccccgccgtcatggatgccaaccactggcccgcgctctccgacgccgccaagggcatcaagctcccagactcctcgtcttcctcgcctgcgcccgtcgccgccccatcggccgttgccaattcctccagttcgcaaaagcacggcgcccatcacgtccgccacaagtccgccaggcgtggcggcggcggggagcactctccacgagaccatcctgaccggaccacagccacgggttgggaccacgccggcggcggtgggggtaggggtgcccagaggaaccataataacggaggcggcaggagaggcaacgccgccgctgcctctgccgccggaccttctcaccatggtgccggtggcagcggcggaggtggaggctttggtgccaggcgaagaggggcctacgagccgcccttctatcgtggccctccaccaccagtgggcatgggccactacatgcgaggtgccccaccaccaccacctcctccgccgcccatgaccgtcgctccaccgttcatgggcccgccaccgccgccagtctcacccatgcgccccttcgctggaccaatggtgttccatgacatgtcatctcctgtatcccccatatacttttatgggccaccaccaccagaggctcttaggggactggctattgcgcctcctatggttggtccacctgcttatccttacttccaagcgcagcctgagccacagcctgagcctcagcctgatgctgagcctgacgtagaagaggaacgtgtcaagctgctcaagcagatagagttctacttcagcaaggagaacctgtgctcagatgtttacttgaggcagcagatggatgatcaaggctgggttgatatatctcttatagctggcttcaaaaaggtccaagggctaaagaaggacctgcaatatataaaagagacggtgcagtcctcatctattctggaaatgaaggataacaagatcaggaagcatgatgactgggtgaaatgggtgatccctcgtgagagcaatcctgatgtcccgtcaagctcagcatctgtaccaaggcctgatgtcaataatctgacggcacatcttggaggcatggatctgcaggattctgctagctctgctggcgctgtggagccgaagcataatgatgtggtccagaacggatcgccttctggtaatgaagaggctgcagtagctgaggacagctctgatcagcagtagttacaacaaggcagtggtttggattcacaccatgactgcaggggttttgtcggtgcgcgaatgacagggcacaagtggtaacttttttttggcaacttttggaggggaggcgagaggcgtattagactgacaagcgaacgtgtttactggcgttcaggtaagattttggtttaccttgttatattcaggggtagcgatgaagatttggggcagttggtggaatggagatgaagcagaatagtgggaaaacgaaggtggtgatatctggaggcgcctaggaccgaggacaaagattatgtgtgataagttagtagcccccctgtggttgtttactggggggggttgcgtttgcacacgggcgcttggatgctatcatgctgttgttacgatgaactagttggttttcgtctgcgttaggatgggggatgttgtaggacctccgattttttttatggaggagctgaacttggagagccagggagttttttttttttttggacttgttgttttgtggcatgatggtgttaaattgaagtaagaagatgctcattctgctgtatggtattgatgtgttgtggggttgaaggtgggtaaaaaatgggagggggattgctgtatggtcaggtcttgaatggctagcatactaggtaggagcagcgaccgcattgcattctctttgtcacctgtccaacaagcttctgttttggacggcatcctacaatagggcaccaacagcagacttggtacgtagtagtaaagccagtaactgttttgtgcatccatgtcggtgcgttgccatcatagacgtacctttgcctctgctgtttgtacgtcaaaggaatcagtcagggcgttcgttgctttgattgctggctggatcggattatatatcgtctcggcagctagggcggccagcaccagccatgactccttcgcttctcctctccctcctgctggtggcggcgaggtgctgccatggctggtcgtcgttccagaagccggcggtgactgcggtgatcgctttcggagactccattgtggacccggggaacaacaacgggctgcatacggtgatcaaggccaaccatccgccctacggcaaggacttgttcaaccacgaggccaccggacgctactccaacggcctcattccaaccgacctaattgcccaggagttgggtgtgaagctgctgcttcctgcctacttgggcgtggatctgagcccggaggacctgctcaccggcgtcagcttcgcgtccggcgccaccgggttcgacccgctgactcccctcgtagtgagcgtcatctcgctggagcagcagctcgcctacttcgacgagtaccgcggcaagctggtggatatcgccggcgaggatgagacggcgaggatcatcgacggcgcgctgttcgtagtgtgcgcgggcaccgacgacgtggccaacacctacttcacgacgccgttccgcagcgcggagtacgacatcccgagctacgtggagctgctggtgggcggcgccgaggagttcctccgcaacgtcagctccaggggcgccaggaagatcggcttcgtggggatgccgcccgtggggtgcgtgccgtcgcagcggacgctgggcggtggcctcgccagggcgtgcgagcccaagcggaacgaggcggcgcagctgtacaacgccaggatccaggagatggtcgccgacgccgaccgagacttggcgacgaccacggtggtgttcctggacatctaccgcgtcctggacgacctgatggagcgcggggacaagtacggcttctctgagaccaccaggggatgctgcggcaccggcaccatcgaggtcacgggactctgcgactcccgcttcgtctccgtctgcgacaacgtctcgcagcacgtgttcttcgacagctaccaccccaccgagagagcctacaggatcatcgtcaaggacatctttgacaactacggacaagtgctcatcggatgatatatatatctaccttgcttgagcgatcgagcatgcatgttcatcttcttcatctttatgtacgttcggctagctggcccaaagcctcaaggaggcccatttatcttcttcttactcctcctcgccccaagaataattaattgtaagcatgatctgcggaatcagacggggatggtctggtggaagtctacatatgggccgctggcacgatacaaacccaccaattgatttggtttggtttggcccatatggccacttcctatccatccatccatccattccttcttcttcctcctcctcctcctcctttattctctctccagggaaggcaagctcggccagacctccctcttcaataagaacaagttgaagaaagatgtccacgtacctggtgtcctgctgcctccggccaccgtcagcgggggcggagatgcccaaggcggcttccgccgcctcctcctcttcattggccccgccgcccgacaccaagagagtcggccgaagagactttgtgctcaggagcagtgagattgccacgctcgccgccatcttccacttcagtggcagcaaaccaagctaccttggcgttcagaagagtcctccgtcccttgctctctgccctgcaaccaataactgtgtttccacatcagaggaaataagcgactcaaatcactatgctcccccatggaactacaatcccaaggatgggcggagcggtaaacccataaccaaagaggaggccatgaaagaactaattgaagtcgtcacgaagacaaagccggacaacttcactcctcgcatagtagagaaaaaagatgattatatccgagttgaatatgagagtcctatatttgggtttgtagatgatgtggagttctggttccctcctggcaacaagaccatggttcagtatcggtcggcgtctcgatcaggatttatcgatttcaatgccaacaagaagagagtaaaggagctgagattggctttggaaaagaagggctgggcttcagaaagcaacttctgaattgaagtgagaagggtggaagaggtgcaggtgcatgctactcagacgagccagcacaactgggaactgggattgggtactgcccacgcaaaggcaaaaaagtctctttgtgatggtccctcgttctcattcaggtcagcgattacctagtttgtgtactaggcagcgtaagctagctgctggtgggtggtggtggccatcatgaggattcaggatgcatgatgatcttccatgggtggtgccgggggcgcactaagggaaaaaaaaaaggatattacatggacagcaaccaccctggctagctaataccaagaaatcattcatatactcctagtctcctaccaagaaaaaagatatatttattatgcatcttcttgccatccgtgcatcctactacatgcatcggatctgtccttgcgataatgagatatgcatattcgttcgatatgattgatagatagtcgacccagagatgatttaggtctc

SEQ ID NO: 29884 - DNA, 1029 bp, Zea Mays
cgctatcgtcccatgcttatcgccatcggccttcccatacctccgcggctcggtcgattgcgacgccgcgcagaacggcatgtaccgcttcctcagccgtcggacgagctgtgcctttctctcgtgcgttggctctccacggcgtttcgttttcctcctgccgctgcatggtcctttgtggcggggaacgctgccccggttgccatccccggaggtgcacgccggcctgcagtgattactgggagattaattgggtgtcaattcccaaaagcttggcttccctgaccaagctgcgttgtgagagttcaatgtgatggcgttcacgctgaaaaggccccaaccgtacgtccttctgaccggatcatctgatttaccagtacgcctcctttaacttgaaccaatcaggcaagaaaacgcgcagatccggtgttcttgtacgcactgatcaatcggccggcgccgtcggccgtggtggtgtgaacgagccaacgaggtccctgacgtagtgacatatctccagactgcggcggggctctggttggtcagtagcacagctaaggtcctgttcgtttttatcaaacccatggggattgagagtgattgaatcccctacaagttaaaattcccctcaattcactccaatctccctcaatccccatggattaggatgaaatgaacaaagcctaagggcttattcggttattttcaatccatatggattgaaggggattaatacgaattgggaaggattttgacttactagggattgaaacccctcaatccccctcaatccatatggattggggtagaaccgaacaagccctaagtgggaattggaccggcctagtttggtccggctctatagtgatttgagtcaaatgcgcccaggtttataaggctatttttttttgatcgtattgtatcaatctaaagagtacaaatggtggtccagtccagttctaaagaacgagcgcgtcttcattggatcgtaccggcttaagtccgacccatatatttaaaccttataaa

SEQ ID NO: 29885 - DNA, 2649 bp, Zea Mays
ctccccacatttcgttgtgtaccgcaaacagcagagagaaaacggaatcccagatccacccctccccatctccatccgcggccatggcctccgccgacgccggcacttgcccgtgggatgccctcccgttgcacctccaggagcgaatcctctccctcctccccatcaccgaactacttcccgttgccgccgtgtcccgcgccttccaccgccttctgcgctccccgaccttccatgccctcctctccccgcatcgcctcgacgccttcttcctcctttccccacggctcgccgtccacccgctgtcccgccgcgtccgcactatgcccgcgttcgccgcgctctctcctccttcctacccgctcgtctcctccccgtccccatcactccttatcacctgcgcctcactccagttcctcccgccgatccccgacggagcctacctcctatccgctatcgtcccatcgcgcggctcctccacctcctgcacccttgtcgccgtcatcaccggcgcagccgcgcgttcttacaccctggacaccggcgatccctccccgcagtgggcgtctagaggcgatctcccgctgtctctcacgctcctggaaaacgccgcggtctccggtgaccgcagcaaactcttcgtcctcggccgtggccccgaggcgctcttggtttttcatctcgtgacggggacatgggaggtgctgcatgttgtgatgccacaaggtctcactacggcgcacctgtttctttttgatgggagcctattcttagtaggtggtattgagagctttggagtagtggatcgggtggtggtctggcggttggacgacgataaggtggaggaggtgtggtggagggaggtgagcgtgatgccgacggaggttttcgatgagttgctagctggtaggtttggcagattctggcattttcaggctgcagacagattggggattgtttgcttgtacaatgctgtggatcggaggctggtcatgtttgatgcggctgatggcatgtggacagtgctgccacgattgtccgcgttggatgcatgcgagagcttcaggtggtttggacatgtcttggagccaggagttgaaatcttgatgggactacgttgacatcccgatgaagatttcatgctaacatcattaaattcataaagctagagttactagaagagctgtatgcaaatccctggtgagtaccaatgcattagagctcatgaaggttctttttactcagcttatcatctttttcagaagcgcaagctgcattaatagccacctttcagatttattcacggagtgaaattcttattgtcctttcctttgagagagaagaattttcatggttagaatgtgtaacttatctatcaattgtcatatctctcttttatttttttaactacgatgtacccaactttgatctgtagtagctcctctgttgggacatagataaaaatcaaatatattgataaaaccatgttaaatttattgtcctacatgcaatattcaacttgttagctgataaaacaagattgtcctggttccgcaacttcgttctgtgagaactatttgtacatataggtattagttttatagtaataaacataattgtcggtgtacgaaacccgggtccctagggccacaagtcagtagaggattgatgccaggttcatccaccacgagttaaataaagctccaccccgcgggacaatccctcgaagttgggcaaggcggaaacttgcggaggggggtcaggcgaaccagcgaaaacccactcgagtggatttcacgtatctgaactgaccacaccgacaactttacgtacgtctcattaactacgccagccggcggagcgcgatgcaggtagtgttggtctttccccaccactcatgacctacaagacctaggcctgagttcctagaaggtctacgaccccgtaggagataagggaccggcggataggctacaaaggagggtcggcgtagggagagatgtggacaaaatccagtaatgatggcactctgacttttgtcgccaacacggatcgcaccctactcaggaaatctcggagatatgccagaagacctatgggaaagggcactgacacacgacaagatttaccgagggtgaatcccttttttacctcacattacgctcccttctgggagaaggcattgtgagaagaaaaagaaggaaaaaaaactggtggagcaaggaagtctcataatccgaaagataacaagtgatatctacaacaaagctcatggatggaagccggtcgatagacgcattcagtgatattttggctgttgttctgtctttttgggttcatctgttttgttagatgtaatctggctggctctttagtttggtaaaatcttagctaagttcgtcgctgaagttgtcagaaccaggctgcctttggttgggttgttttggtcccttcggttgaacatcagttttcaggcggtctgaaaacatttcctgctatggaaatgttcctctattttagctgatagttgcgtatgtcttgtcggcttgtagttgatgttggcttgtatggttgtgtaagaactttgtccttgtctatttcctaatgaaataggggtgctctcctgtgtcaaaaaaaacagattttgtt

SEQ ID NO: 29886 - DNA, 974 bp, Zea Mays
aataggtgattgatttctcgatttgggtcgattggagcaatcgttggctattctatcggcatgaataattgatgagacaaactcaatgtcaaacatatttctttgagttttcttcattgatagagtcaaaggcataaagataggacgacaactgacagcacacccctgactaagcagtggagaggtaaagcatcacagtagtctggaggaaaccgacaacacaccggtgaccaagcagtggagaagaggagcatcacagtagtctcgcattgcttatggattgtggggaatggaaccactctgttcaacagcaattttgtttggcaaaagattgtcaaggacacaagggatagaggttgtttttaaatgccactgatgagaaggagttgttgaatgcaattttcaagcttgctgttgagtatcctcacgcggacaatttagctggcgaggagacaaggcagcgattgagtaccaggataagtctattcaatgtcgctgaggcaacagttacaagatcctagaagaaaacccgtggcagctctacactacaataaaggtgataaatatgtctcacccaatggaagatatcatatttagacatgatcaaggtagcaagatgttgaccccatgggtccttttggtggaataatgatagagtgcggcaccaatcaacctattgagaaagtgcttgcagctgaagatgcagcgcgaggatgttgcagcattcgaacaacgccaacgagctgctcttgcgccggaagctggaggagcagcagcaggctgccgaacttcagcacgccattgagctccagagccgccgcctcatgggtctccagctgctcgacctcaaggctcgcgcagctgcgacagcagcggcggcatcggcactgccaacaccagttgccaatgccttcgcgtccagccatcctttgagcaccatggcagtcgagtcgccactagagtccggagagtag

SEQ ID NO: 29887 - DNA, 462 bp, Zea Mays
aacaaaccaccacgtcgctataagtatagggtgggctcgtctcggacaagccccggccgtctcgatcccagcatccgagagagctccacaggccaggtccccatcgccgcggcgcttgccccacctctcccccgcccggtagtagcctcgccgccgttgccgagatggggttcgtgtccttcgtcgggagggtgctcttcgtcgccgctttcctcctctccgcctaccaggagtttaatgaattcggtgctgatggtggaccagcagctaaggcccttcggcccaaattcaacgtgtttgtcaaaaatgtatctgctcatctgggagtagctgtgccacacattgagttgaagcatgtgattgctgctacaattggtcttaagggtcttggaagcctcctttttattttgagcagctctctcggtgcttatctcctgagcccattgttttgctaagcgtcat

SEQ ID NO: 29888 - DNA, 667 bp, Zea Mays
ttcagaattataagtattaaagatgctacaacaacgcctacttcgccagggtcggcggcatcagcctgtcggagatgaactacctggaggtggacttcctcttcgccgtcgggttcgacctcaacgtgtcgccggagacgttcggccactactgcacggtcctccgggccgagatgctgtacctggagctggagggtcctcctcctccagccgccagtacaagtctgcacaggtgctgcttgtcagaagacgacgacggtagcagcagcaccagcagcagctagctgcatagagacaggtacagcggttgcttccaagcaagcaaccatgtatgaatgtgtccgtgtacactgtacagtacagacatgcttgcttgaaagcaaacacggagtacgtgacgtaggcatctgcgtgtgatcggtttgctatctggcggctggcgcttagttgtttttagctttgttattaggtaatctgttgctcttgtagtcttgtatagctgcattgctgttgttcatgtggaaatcggaaaaccgtaaggaacggtataaattgcagtcttggggcagtgtaattgttttcttgtccagcagtttatccatagtttatctaaaatattgtttttgctctcttctgcgctgcagactgcactgttcgcagagtaaaa

SEQ ID NO: 29889 - DNA, 1911 bp, Zea Mays
cccggtcgtctttctttcgggcctctccgagtggtcaataaaccccgcctcccttctgtcatcccgtacgtctcgacctcgcagccgcaaacgcgaaaccctagcctcgagctctatctccggccacagctggtcaggtaggaccgtaggaatctcctttcctcatcgttcctcgggtggttcgtgccccgcgccccgctgctttctggcgacgaaggatgagcaggcgctggagccgcacgatctacgtcgggaacctccccggcgacatccgggagagggaggtggaggatctgttctacaagtatggtaaaattgttgacattgacctgaaggtccccccaagaccacctggttatgcttttgttgagtttgaagatcctcgtgatgctgaggaggcaattgctggacgggatggatacaactttgatggacaccgtctaagagtggaggctgctcatggtggtagaggtaatgcttcctcgcatgatcgttcaagtggctttggtggcggtggtggagcacgtcgtggtgtgtcgagacactcagagtatcgtgttcttgtcactggactgccttcttctgcatcatggcaggatttaaaggatcatatgcggaaggctggtgatgtttgtttctctgaagtgtatcgcgaaggcggtggcaccgtaggaattgtggactacacaaattatgatgatatgaaatatgctataaagaagctggatgatactgaattcaggaacgcctttgggcgagcctatataagggtgaaggaatataacggcaaacgtggtcgctcctactcacgtagccgaagcccaagtcgtagttacagcaaaagcaggagtccgagtaaatcacccaggactcgccgttcatcatctagatcccggtcaagatctgtttcttctcgttcaaggtccccatcaaaaggacgttctccatcaagactcaattatcttgcccttttatctgggattgtgcggtgatctggggattgcgcattaagatattgaggatgggattttcacaatttgctacagttcagttgattttataagagtttggcataagcgcattgtttggaatactggacataggagcgttaaggattggtgatctggattatggtggtacagtggctaggaatgtacttggagttcaatgcttggggaatgagttttcttcgtacctcaggcacacttcagatggttgctgtagttcatatatgcactgtcgacattgttatacaacaatgttacatttgcacggaactgaacacttctattttcatgagcttttattgctttgattcgacgcggcatcatggcttttggaaccaagttgttaaagctgcattttggatattgaatcagttgtttctggaacgttttgcagatcaccagcaagatcgaaatctcctaatgtttctccagcaaatggtgaagcagcaagccccaagaagcagagcccaaacaggagcccatctggctcacgctctcctgatgcgaagcctgaataaaattgctatgctgttaaaggattgcagatggagtcaggagctcttcttttcttaacatttgtcctctgttctagtaccatcagtgtcttatcgcagtacgagattggatgatattaactatctgtatcagcttgtatcgatggactccaagtgttgtcactcttgttgtctagtgtgctgaaggacccatttacttttgctaaacttttccattggtgattgttggatgcatggtgtggatttgtgctgtgttggctaaatcatgttgttctagaccttatgcatttttttcatttcactaaattacctgacggttgctgcatattatgcacagttttgcaccttgtgaaccatatgggctttatttgacaagtgaaatatttctg

SEQ ID NO: 29890 - DNA, 1965 bp, Zea Mays
agttcacctttctcttctaatggcttcaagccggcgacagcagcaacaatgcgacgttcatttcaccgtttgcttcccgagatacggtcatacggagccacagtttgtcgttactgctcccagccagcgtgaaccgatcccacggagctcatcccacaggccacagcactcctccggtactcccctcgcacgacttcacgagcgcggtcgactgccgccgccaccaccgccgatctgcaaggtcccgtcgaccaccgccactctgcaagtgaggggaaagaggcaagattgaggagggaagcatcgctggtgtatccgccgccacattcgtcgccgggagccagcccatattcgagacgaggtcgagctttgctgccttggcgagcttcagtcgaatcaaggttgagcctggcggcaggccagtaaacagagcaacgcaaaacccttcgaatcaatggagacctccgcagcaaccccgacccggccgccccacccggcggccgcttccccatcgccgtcgccctcgtcgtcgctgaggctgtggaggtcagcggcgcagcgcaacgtgcgcaatcagtggtcccgtctgagcgccgccaaggagcagtggctggccgccgttgctgatggccgcgcccacgcctccgcgctcgtcaacgcccacctctgccgcaggaacatgccagcgacggatttgggggtgctcaaggatatgccggggatccgcgataaggctaactccaagttggtgcttagagaggagcaatacagtgggatgcttctgtcggcctacaaggagatggggatggtggaggagccccagtattcaaatggttctccatattagaatttggtgggtaaatcatctcttctatggattaagtcactactatgatctttcgtctgttgggtgtgacaatgatctccaaacccatctgattgccttttaaaagttcaaaaggtcaaatgagtttgatttaggaagactactcagagcactatatattctcatatttgaggatgccggtcaatatctgagacactgcacatattaatgtttacatgttttaaatccacatgataaaaagatattatgtttcctttaatcacctcagagactcttgcccaggagcttgttcagatgtttgtttcagagcaaaagttgaagaggctgctactcttggaatttctctcgattgctttaaaggaaggtgtagaactccagacatcattaaattggggtgatgaactatatgatggtgaatcaaatgaacttcagagtattggccttcagtcaggagatgcctactcaccgcctgaaaattggtgtgcagaacgtttagggagtcagcgacctggcaatctccctctgcatgaagttttacaggtttatttaaccacttggcatgctaatatgaacatcaaccggagtagaattggtgaaatatttgagcttgttgaggaggagatgaagattaaactgtcttgaagattccgattcattttgtttggctattcatcaaggaagaagaaatggaaaagaaagatcaatcagtttactattcaccaggtttctctatccagtgtctttatctgccttagtagaagtcttcagagcttacctatcatcttagaatatagtactggtctccttgtaacccataatatatttttttaatccaatgttcggttaccctggaatcatattgggaggagagcgttggaccaacatatgttattgaaatgagatttccaagttatcaggatcattcgcctagcttcaggtttgttctgtgctgttgtagatgtgtaatatttacttcattcgcctgctgtacagatcttggtgacatgctcgtggaaaatgcatattgcttttagtggtttttcattacgcttatggattgtagatcttctgattattattatgaacacggagaaaataaagctgtggattagtccatg

SEQ ID NO: 29891 - DNA, 1116 bp, Zea Mays
cctgccccaacatcatcacctattagagcttcagcattgcctccacctccaccacctggaacgagctccagtccacgtccaccccctccaccatgctattcatcaaaacaatcatccagccccatgggcaaatcgatgccatcacctcctgttccgccaccaccctcccatggaggacgcaatggagcttctggtaacattgtacccccgccagcaccccctggcagtaatgctaaactgtttggtcctcaggggcgtggacctgcacctccttcaggtccaatgtcaaagagctttcaatctggccaggctgtgttgagaaggtctaatttgaagccacttcattgggtgaaagtaacaagagcaatgcatggtagtctgtgggcggagtcacagaagcctgacgaaactttaaaagctcctgtgtttgatatgtcagaattagaaaatcttttctcagctgcactgccaagttcagattcaaggcgttcagataagtcaggcagtcgtgcatctgggtcgaaaccagagaaaattcatcttattgatcttcgccgggctaacaattgtggaatcatgcttaccaaagtcaaaatgccactgcctgacctaatgagtgcaattctggctctggatgatactgttctggatgctgaccaggtggagaaccttattaagttcactccaactaaagatgaaattgaacttctaaagggttacaaaggagacaagcaagttcttggagaatgtgagcagttctttatggagcttatgaaattaccacgtgtagaatctaagctgagagttttctcatttaagattcaattccgttcccaggtttctgaccttaagcggaacctgaacattgttaattcttcagcagaagagatacgaggttcagtcaagttgaaaaggattatgcagacaattctttctctcggaaatgcattgaaccaaggcactgctagaggttctgctgttggtttcaggttggatagcttgcttaaacttagtgacacccgtgctcgtaacaataagatgactttaatgcactatttatctaagtctattttggaacttctgttcttaatataataattcacagctcttctgcgc

SEQ ID NO: 29892 - DNA, 286 bp, Zea Mays
gtcatggtgggagtcttacctcgccacccatgcccatcctgacgccatcacttgggaagaattcagaggtagctttcgtcagtaccatgtccctgcaggtctgatgacagtgaagaaggaggagttcctggccctcaagcaagggccatcatctgtcagtgagtatcgagacaggtttctgcaattttctcgctatgctcctgaagatgtcaacaccgacgccaagcgacagtaccgtttcctgagaggcttggttgaccctctgcagtaccaactgatgaatcac

SEQ ID NO: 29893 - DNA, 3008 bp, Zea Mays
cgagtacatggcattagaaaattaaagctgcagctagctgcattatacgtgctcgagggaatcaaaagttgagcctctcccatctcaatcaaatctataggggagtagctcttgctcttggcttcgctcgctaacaatcagtgaactgaacaccttccgcctcccggtctcctccctgcccggtgctgaagaaccctgccatccccggaactggatcgatctgccgccaactctgaaaatccatccgatccatctctgtcgtccaagtctactccccgatggacattatttaccaggacagcagttgtcttgccctagagcaggcgctacatgatgaaggcgtgggaccaatcgacctacctttcatgcttctcagggccatcacaaaagatttctctgatactcaactaattggcaggggtgggttcggagaggtttacaaggtatgcatggagtgcttccaaatgggatggtcgtcgccgtgaagaagcttcttgacaagatcgatgtcctagaggcgaatttccaaagcgaggttgcttgtctcatagaggtcaagcacaggaacatagtccgatgtctagggtactcatccgagacgcaacatgtgagggcaccctacgaaggaagatttgtctgggcagacctgcgccaaaggttgttttgcttcgaatacctaagcaaagggagccttgccgattatctgaccggtaacatcgatcagtcgccacaaacatctcatcttttacatatagcaaatgttttgagcactactatatatacattttcctggcttgtgtcggtgttaaggtttgcatcgttctgttgtgccagtgactatatttgtagattttcattatttttgaatttttcaaagtacctcaaatcgagaagatacctaaaccaatttttttttattcaaagagtcataaaactaacttcttcagaatacccttttaacaaggcgaagaaagacatcgtatacattgaaagtctactaaccactaggtttatcagtgtaaaacatcttccaatagataagtgttttcctcttcaactactcaaacgtttcttaaagcattcatccacacttttccaatctacatttcttagtttcttataaaggatgggacacctaaatatcacattggattgcaccagacttacaaccaaataatgatgtgcattgttcgatttcttattgggcatctccaaagcaaaataattcttttatgaaagttgccttttagatctgagacttgctcaataatttcatatttttgagctttcccaaaccatgataaaaaaagagaattatatgatctgcaattatgcatgctgaagaattatatcaataagatgtgggactacactagtaatatacccctcttctttagcccattttattagaactacttgttctacccctcttctttagcctgttttattagaactacaaacatatctgcaacaatgttaaagagcaaaggagacaattgatcttcatgttgaaggtcttttctggtttggaaaaaaaacgcccgacatcattattgacatttcttgcatgctggcaagcccatattattaatttctgcagattgccacaccccacattttgaccataccaaattttagcacagaaaaatgtgctttatttgcacgtaatgcaaccagcaaagttgggaattcctacctttgtgttagactggcatataactagaattaattgttgtactttatactcttcacaggggcatcttttgcacttcagtggagtgtgcgctaccaaataatcaaggggatttgtgagggtgtgggttatcttcaccagcacaatattattcacatggacctcaaacctcaaaatatacttcttgacgataacatggtgccaaaaatcgcggattttggtctgtccaggcgcttaagtgaaaatcagagcaggatcattactaaaacaataattgggacgccggggtatttggcacctgaatttctgagcagcaatgcaatcacattcaaggcggacatatacagtctaggtgttataatcactgagattctgacggggcataaggaatgcaccagtgttgacaaggtgcttgaaagctggacggacatgtttcagacattaggaagccatccgctactagaacaagtagaagtatgcgctgagatagcgataaattgcatgaacgatgacccgagcaacaggcctaccatacaggatattatctccagtatcgatgaaacggacgctcgaagtgtcacaagttcttcaccaggagggcaggttattaccatggccggcagcgaaagcagcagcagtaggagcaggtcgccatgcgcgtcgtgcaggatgctgcgccagcagtgcacacaggagtgcgtgttcgcgccctacttccccgccgaggaacctcacaagttcgccatcgtccacaaggttttcggtggcagcaatgtcttcaagttactgcaggagctgcctgcccaccagagaggggatgcggtgagcagtatggtttatgaggccaacgttcgcaccagggaccctgtctatggctgcgtgggcgccatctccgtgctccagcaacagatctcccagctccagatgcagttctccatggcccgtgctgagatcttaacattgcagcaacagatggatgtcaatgatagcctacccagtcaaaatagctttgacagatatggcaatggtgatctgaaacctgactccccgcccgaaattctttcatcggaggatgaggttgaggaagtttcttccccaatgtctccatagagatttggatttttccattataaagaataggcttcacaaaattgccactggtctcgcatttcatagactcagatagtcagatggacccatcgttcataaactaagtgacaattataatcaaagagatgatctttcgagtggcaaaaatcctaatttctcgtgtccctgtggggatccattaaacttacatatgacgatgtttttt

SEQ ID NO: 29894 - DNA, 2593 bp, Zea Mays
catcaatcatcaaagcgtctccctccccacgaaacccccttccccaaactacctctgctgctctccttgatccccaattctctcttctgcctacttgcctccatctcggcctccacctccactcctcgcccccgaacatccggcgctgtccgcaccccgactcctctcgtcctttcgcggtcgcgatggtggcgtccatggcgtcgccgtaggggcgatcgatctaggagaaagtgctggagaatgtggcgtcgtaccaccagcaacaacggaggcagaagctacgcaagagcctcacctacaccggcggcgagctctcgttcactgtctgggcccgtggggatgaccccacctccacgtccgtcgaggcacagaaggaggacatgcctcttgagcacgtcttcaaaatcatcagatctgatggcaaaagtgtgtgtttatggttcctgagtcagatgatctttcttcagttttagtgcttggtggatcaccgtctaaacgatccaccaccagaaccgccctaccccaagatagctatgtgcaggttcaactactcatttagatattggtacagcctgtaatagactttggtacaataggatttggttttgctattcacttagtttttagttccaaacaaccaacaaattgcatgtcctttaggaaaaatatcacatgaatatcagtaatataacactgataataaaaaatgcttcgattctatatatttttcatgttataaggttgaaaacattctgtctcacggatcagaatgtgtacaaggcgacatactgtgtttacaaatatatttaaccataataaaaacatatttggaaactgaatatcatttaagtccaaaaatgtttttgctgactgttcattaagctagagtaaagagtaaacttagcatttcttttctatatctctctttcgtgctcatgccgccgcagtctcctccatcccacctttcctacgcaggcagctccatctcagtcgttgtacccattcaacgccgagctggtggcagcgatgcaggagatgatccagccgaggtgtacaagtacatgttagtggacgtcacctgccaaagatacacagtttctactgtttttcagttggagaaaatatttaagacaacattttcatcgtttgttctccatatggggcttgtttcacgccacttgaaggaaggagggaatgatggtgttaagttcggacaatacatctacacatctatgaaatgtacaaccacgatgtagagcatagagtttctaaagttgggtaagctgtttggctgttttatagaaatttgtatcaacatcaacatagatttttagtcccaaacaaattggggtaggctagatttgaaacccaacaagaagtcaccaaaaagagaaagagagataaaggggaggggaaaagcttttgagagaactaaaagagaaaatgcctaatcacggttcgggcacgtggatagcttctttccaagcatttctatccaaacacaactcctttgggtgtgtggggtgatattagaagcttcatgttaggtgtttgatactttcttgaatataggatttttgtgtgtgtggtgtagtataaataatgtccatagttgaataccaaaatgtggatattgtacagtgggagttatggctgccttcttcattgcttgatcttagttgttggttgcaatcttctaacttagagtatgatgcttgaagagatttggatgatgttggagatgtgctttggtgtagttcatctctcccgaatcaagagtctggtttatggggctaaggtagaggctgccatcgccattggattcaatgacttcattacatatgctctgagaggcattgggttctaccagaaggataacatggagatcaagaaggccaatggcaatggcacactgatccctgagcagatctttgaaaagactaggagaagttctagatgaattgatgcttggctgaagagggatgtcagatttgtacaatgctcacccacaaagaataatacatttctccaatgtccactgttttgaaaaatacctccattccaatgtttaacattctaacgatgtctgaatttattgtaaagagacacatgattgttcattgttgtaacttatgtacaatatatgcgtgtgtgaaataaagatcatcttggagcaccggcatcaatgttatcaatcttctcaaatttcaaattatcctggtctcttcgtgaaaccataaaagtttattaagtcacttatctgagtggtctaaaagtctagcatatttttgttcctttgcctgtcgagacggatcagctggcatgaataatatccggtgaatactgcaagagctattcatgatcccccgtgaactagctggtatgatataacttagtttgtgaagtgctaatgccacaaacaggaaataggatgatacttcatgtatatttttttctttcttgaaaatgaactataggatactgtttacaatccataccaagcttctgcagttatcaacatttttctatgttcaaccttgttaacatattaagacgagtttttctttcatttttcaaaaaaataaatcaa

SEQ ID NO: 29895 - DNA, 1743 bp, Zea Mays
ggaaactaatttcatgtcaagtatgcttactgtttatttatttcttattcccttataaagagtcgtaaaactttttctggcccatggggtagtttcatcatcatgttatcactagatgtattcttttggttcattgtactcattttatagtaataataactaactgtccagtggaccgaccatgtttattgtcatgtcttatttatttaggggctgtttggatcccaggagctaaaacaaaagtgactaaagtttagttacttagagcaactccagtagttctctaaatgactctctaaatcaagaatttagatagttagcacaaaaacctctctccaacagctctctaaattgacttcataaatttagtcacttctcatgtaaccctatttcctccctacatttgataatcatgtagcaagtcacgaaaaaaaactgacgccattttctcactcgtggcaatctttccctgttcctgctgcttcgtatgtcacacatgcctttgactcttcctgttttgtacggcagtcgtgttgcatggtatccaaatgacccaccaatttgatttttcaaacagattaactacctaaataatagcaactgttggagatccacaaattttttttgaacgcccaatagctgtttacaaacttgctaaatacaattttaaggagatatattttacataactactggagctgctcttaggagctaaagatccaaataggaagcactaaaactgattatagtggtgaaaaaagtatcaatttagtcacttttagctcttcctgtttggatatttagctcctaagtaactaaactctataatcatttttgctttagctcctggaatccaaacatgcccttagtataccttttttttttaccatctcaggtttcttgtgaaaatttagtagcatacactggggcatccccgtcccacatgcctaactttcttttcctgttggtcaggtggatacaattctggacaaggagaactttacattggaagagcttcttgatgaggatgaaatcattcaggagtgcaaagcgctgaatacccgactcataaatttcttgcgagataaggcccaagtgtcgcaattacttcgttacattgtggaagaagttcctgaggattcagagaagaaacaatctttcaagtttccttttatcgcttgtgagatttttgcttgtgaaattgacattattttgagaaccttggtagaggatgttgagttaatggatttgcttttttcatttataaaacctgaccatccgcatagcacactgttagctggttacttcagtaaggtggttatatgtttgatgcttcgaaagactgctcctcttatgaattatgttcaggagcatccagatattgttgtccagcttgtcgacctcattggtatcacatcaataatggaggtgttggtgagattgattggtgctgatgaaaccatatacttgaatttcgcggatacattgcattggttagagaatacatatgtactggaaatgattgtggataaatttagctcatcagactctcctgaagtgcatgcaaatgctgctgaaattctttctgcggtaactcgatgcgcccctcctgctcttgctgcaaaaatatgcagtccaaggtgtgaggagatcttgggcaaaaggaaacccataggcaagatctcctcaaagatggaaacccccaatcaggatcctatactaagggcccgtttggcagcatga

SEQ ID NO: 29896 - DNA, 667 bp, Zea Mays
cttgctgcctaaattctaacagatgctacaacaacgcctacttcgccagggtcggcggcatcagcctgtcggagatgaactacctggaggtggacttcctcttcgccgtcgggttcgacctcaacgtgtcgccggagacgttcggccactactgcacggtcctccgggccgagatgctgtacctggagctggagggtcctcctcctccagccgccagtacaagtctgcacaggtgctgcttgtcagaagacgacgacggtagcagcagcaccagcagcagctagctgcatagagacaggtacagcggttgcttccaagcaagcaaccatgtatgaatgtgtccgtgtacactgtacagtacagacatgcttgcttgaaagcaaacacggagtacgtgacgtaggcatctgcgtgtgatcggtttgctatctggcggctggcgcttagttgtttttagctttgttattaggtaatctgttgctcttgtagtcttgtatagctgcattgctgttgttcatgtggaaatcggaaaaccgtaaggaacggtataaattgcagtcttggggcagtgtaattgttttcttgtccagcagtttatccatagtttatctaaaatattgtttttgctctcttctgcgctgcagactgcactgttcgcagagtaaaa

SEQ ID NO: 29897 - DNA, 85 bp, Zea Mays
ccagctttgaagaagcttcggtagatcacgacttcattttcttcaggaacaggaatagtcctgtctccgatgtcagccctcacaa

SEQ ID NO: 29898 - DNA, 3977 bp, Zea Mays
ccccaggcacccagtcgctactctatctctcttctttctcctctcgtctccactctccactgcccgctcgatacgggcgggcacgactggtgccaagttgttttcttcgccctccccccttccgcggcgcgttgtagaaagcgagcggggggtagtaggatccatcggtaggtcgtcccatcccgtcgcaccgcccgctacatacgccgcggcgggtaccttgcttccgttcatggcatgtttgtctcggacggtgggttagccatggacgccggaggccgtgcgggcgtgagcggccccgccgcggcgaacggctcgttcggactcgtccgcaccgtggtggggtactccacctcgcccctcttcttctggctcctcaccgtcgcgctcgtcgccgccatccacatcgtctccggctcgtcctccaagcctgccaggaacaatgagacggaggagaggaagaaggcgcgccgcgataggttcctcccggccgccgaggaacgggaggcgtcgggcaggggagatgaccgggttctggagatgatgcgcagtttcagcttcatgcaggcgaccgaggaggatttcatggagggcatgaccgcatacgagcacaacggcgttggcgacggcacagcgcacgggcctgtcgcgccggagccgcctgcgctgacggcgactagcctcagcttcaggtttcagcaccagatgcccgaagttccaacggagacggcgctggtttcgagagaattcactgcggcaagacaagagacggcggtagtttcgagagaactgacagcagcgagagacgatgatggacgacaacgagaggaagagaaggaaccacactttcctttggaaccattcgctccgttgcagacggcggcagacatgcaagaacaccggcacgacgaagcagaggaaacagagttcctggcggaggagccggcagaagagcggagcggagaggttgcgcaggaggaggcagcgccacccaagaccgtcgcggccacgcacaactatcagttcctgactgagcgcgacttccgggggttcgtcagggagccggaggccgtgacggtgcgcgtccaggaatctttcgtgccgtcgccgcctccggcgcaccagcccgaggagcgacgggtggtcgacgtctcctcccgcagcggccggttcctcacggcgagggacttccggccggcgaacgagcccgacgtgtgcgagagcgtggcgtcgtccgggaagtggacgccgccgcctccgaggccgaggccgaagccgaagccgaagcctgcgagctccccgtccgctgcttccatgggcggcggcggcggcttcacgtcggagttctccggtttcggcgactcggactccgagtccagcgccagcgacggctactcggtgaaggatctcgtcgtcgactccgacagcgattggttcctctcagagaaggagttcccggcgtctgcacttggctccggcaacctcaaaacttacaaggccaaggtgctcagggcgatcgaagccatggaggcggcgtccaacctggagccgtcttaccaggaggactcagcgacgacagtgtcgccgagctcggtccggcagcgctcaccggacaccgttcccgatggttctcccaagttccctgaggacgtgtggtctcgcagcccttcgccggacgtcgagtacaaagaggacgaggaggaggtaacgagagaagctgaagcacagtatgatgaggacatcgaacagcgaagcacgggggaagaggaggagggcaagggcatcgacatgagcgatgacgagcactcgtcgggcggcaaggaggtagaatccgcaccaatctatgatctggctcctgttgctgacgactgtatggatcattcagagaaggggatcatcactctaaatgatcattcaggaggtcaagctgcttctgatgctcaaagaagtccagaggcagtctctgccagacaattagctgccgtaccatcagatcaagttgctggcccagtcaagagaagtccggagccaccggagcaggaatttgttggtatggttgatcattcactcgagcacagttcttacgaccggaaacaaactgccagcgaaagcgatcagtcatatgaaatagtatttgatgacaaaagaaggccgcagcgtgcagagacaggatttcttggtacgagcagcccctcacatgaactcgtttctgaagtttgggaagagatcgtcaccagaaacgatcaaccgcccctagggccccatgctgatgagcaaggcctggatacagcagaggaagagtatgtgggcacaggtgatcagccacatggtgcagtttctgatgagaagagcggtgcagagactccggagcaagaattcagccttaccgaccaccgaaacgtagcagttcctgacgccaggaacatctcggagaccagagaagatgaggaacaagccagtgcagatgatcattcggacaatgcagtcaccgggaaggcaaaggtatatgacgaagacggggaggaccgggaagcgaggtggaaggatctgacagacgaggaggaggacgagctggagtcgctgtgggagcaccaggatctggtagagcagctgaagctcgagctgaaaaaggttcggtcgtcggtcgggctgcccacgatcctcgaggagtcggacacaccaaaggctccggtggaggacctcaagccatggagtatggatgctaagttccttcgcgaggaccccatggacgagctgaacaagttctacaagagctacagggagaggatgaggaagttggacattttgtgctaccagaagatatttcctacagctcagagggtcccagcagtccaacaacaacaacaacaactctgtaaagtccttgtcgcctacggtggcgtccatcctgtcgcataacttccggtcatcgcgccggagatctcccgaggacccgtcggaacggttcctcagggagctccgctacgacctggagacggtgtacgtcgggcagatgtgcctgtcgtgggagttcctccggtggcagtacgagcaggcgcgcgacctcccggagtccgactcctaccacagccaccagtacaaccaggtggccggcgagttccagcagttccaggtcgtggtgcagaggttcgtggaggacgagtcgttcaaaggccctaggctgtcgaactacatcaacaaccggtgcgtcctccgcaacctgctgcaggtgcccgtgatcaaagaggacagcctgaaggacaggatggaggaccagcgcaaggggaactacgtgataaccagcgaggagctggaggacgtcatggaagaggcgatgcacgtcctgtgggagttcatcaaggccgacagggccgagacgacgacgacggcggcggcggcatcggtgctcaagggcctgtcgagcagcaacgtcgagctccaggaccctctggatcatggcctcatggcgcacatccattccgcgttacagaagaaagagaagaggctcaaggacctgctcaggacgggcaactgcatcgcgaagaagtttaagaagcccaaggaggacaggtccaaccagaacctcttcttctcgcaggtggacatgaagctggtggcgcgggtgctgaggatgcccaggatcaccagcgagcagctgcagtggtgcagggccaagctcgacaagatcgtactggtagataggaagatccacagggaggcttcatttttgttgtttccctgctgagagagagagagagagagtacagcatatatgttttcttctttttctcttgttcccttttgctcgatgaaaccagtccacgagtatagggtttctttagccttttggcaatccagtcttttacgcatgtctgtccatagttaccctgaaattacatccaccgcaatgtacatgcatactccattgcctcttcagtagaatgaaccgtcttcttttctgtcgctgaacaccgccg

SEQ ID NO: 29899 - DNA, 293 bp, Zea Mays
tgcaacaagtaactaacaaattgacaagatcaaatagagcacactaccatttgtttatgtgagaactgaagtttgcgtcaaatataggccaagaagacagagaacatcaatactggaagagaacacatcagtatttaggacaatactttaaaatgacttgctcaaatattataaataaataacagtactcattagcttacttccctgctttccccctactttcttccttatgtgcatcaacgctggcacgccaaaggcaattgtcttctatggagtacccaaatgacgtgatt

SEQ ID NO: 29900 - DNA, 886 bp, Zea Mays
ctcgcagtgacggcctgacggggacgcgagagccgagaggctccagttgtttatataagaaaaaaaaaaaggaagacctcaaattctgattttttgttcccttcaccgacggcgaggagtgagggttgacaacgggatggcgcggagcgtatcgtacgtttcggcggcgaagctggtatccatggcgcgaggcaatccccgcctcgccatcatcgacgtcagggatgaggagaggagctaccaggctcacatcgcgggttcgcaccacttcgccagcggcagcttcgaggcgcggatgccggagctggtgcgggccgccagcggcaaggacaccctcgttttccactgcgcgctgagccagtgatagcgtggatcttctgggaaaaccgatgttgtcatgctcaccagcctaaagaatagtacgaggtccaacttgtgctcggatgttctcagactatctatcggagaccaaggaggattcagggataaagaacatcatggtactggagcgcgggtttaacggatgggaggtttcagggcagcctgtctgcagctgcaccgacgctcattgcaaagggacgtgttcttaagcacacgagtttatatctctcttaggccttgaacaaccaaggatcggcatggtctccgtttctcttgtcggtggttacttcacctcattaaaactcattaaaatgattgacacgcgacagattattgggttggcaactcctttgtgggaactgcatgcataactaccaccagaccactgtcagacataagacacttcacggtgtactgccaggtggcagtattcgtttcagaattcacagttttttgcttctgcatgtgccttgcagctctgtgcatcgaactgagttagtgtttg

SEQ ID NO: 29901 - DNA, 929 bp, Zea Mays
aaagcagtataatgatcattgtaacatgtttgcaacttagtattaatcatgcattgtctctgttggagatgtactgttgatttaaatactgaatatttgcagtactccctttatccaaaaaagagtacaattctaggtttgagactaaaactttcctgactttgacatattttataggaaattcgagaatcagtgattgaaccagaagagaaagactcttggagttatatttgggggaatagcacctactcgtcagctaaactttaccactacactttcaaaaatgttgaacaccagaaacatcttaaagagaaagaacttcaaggttcaaggcgacaactacatatgtgttctttgtcaacttcaaagagaagaaactgccttccattttttcttcaattgccctttcagccaggactattggagacatctgaatattcagtggaactaccagattgacttctttgcaacctttcaacaagctagggacttgcacggttcaccattctttatggaggtctttatcatagtagcttggcaaatctggaagcaaagaaacaattttatctttgacaggggacgactatctttccttggctggaataaagaattctgcgccgaagcccttctgcaagctaaccgcttttctgaagagaaatcaactcttttctcctcatttgtaaattcctatagatagcagatatttcatttccgtgtgcctagttagtttacttctggtttatgtcttgggagcgactgctcatgctctttgtccactttcttctttatattaataaatatctaccacaacaggggaagccccgatgtacattttcaaaaaaaaatcaacatttgtatctcctgatagatttacaatagagatatctaatgatacttatttaatataaaaaatgttagtactttttttg

SEQ ID NO: 29902 - DNA, 880 bp, Zea Mays
tctctcccctgcgtcgtgtgtggatggttctaggaagtgtcaccagctgatgcgtctccaatctcgcctcactcctcctcccagaatctcaccttcccccgcgtgcaccgactgcttttctcccgcgtgcgctggctgcttttggccaccgatacgctgcgtcggcgctccaaagttccaggaaatcaaaatgccatagtttcacgggatagacggatcagcttggtctggggatgtcgtcaggttcctgtgcttttttcccaatatctttgcttccgccagatcctagatccagtgtctttcgtcggctggctttgtttgcgccgctgaagaacaacaatagtcagccaatatctagtccaaagtccaagcgccgccttaagtttagttggttcaccatgcagcgtggatggacggtcaatttcttcgtccgtcgcccaaccggcagcaacacatacgcgatgatttgattggttccttgtgtcctaaatgaaggtcaggagaggctagagttccaaatcgtagttcgtgtgaaccagtgtgaaccagttgaatctcatcaatcttatcaagtcatctaataaaaaaaggttcgacgcgtcttagagttctacgatgcatccaagaattcagagaacgttgacaaatatatagatcagctgaccaacaatgaattgtcatcaccacccaaaaagatgaagcacacccaggttaacaaagccattccagattctacatgttccaagaatgacaacagttagaccatcctgaaatacatcaaggttgggcggcttccgaagtcattcagacctgcgtccgagcctacatcatcatttggtttgaatcgcggaacgatgtcgttcgtcactgcgttgttcta

SEQ ID NO: 29903 - DNA, 285 bp, Zea Mays
ctaacagcggcgagttcttcgtgtctggcgcagaggtaatctaatatgttgtgatctgtgtagtagtaacttgtttacctgatttatgcatgagtggacaatggtgcttgacaacttgagtttaactgaatagagtaactgatttgtgtactggacaattatgcttgctgtagaatagagtaactgatctgtgatctgtgtagtagtaactgatatgtgatctgtgtagtatagtagtggacaatggtgcttgctgttgtattaccttatgtttggtaataactt

SEQ ID NO: 29904 - DNA, 496 bp, Zea Mays
tagaaaagtgtttttggggagtttcttgactgaaaggggtaaacccaggtgtggagaaacttcgagctgaggttggtaacgcgtagaagaggtcacgggccattgtgtcttcaggcaatcaaggttatattggaagctatgggaaccctaaggccaattatgctgcaaacccttttaactctgggcaagtgctgccactgattatggttcccagtatggaactggtgcagcgcatggttcttgggtgcctacgacttgcaaagggcacccggacgtagataagtactgccaatttgccaggcctttcaccaaagtgtacacatagctttggcaatgactgtatgaatgttgtggtggatcagatgtttaacggataggaatcaggtagatgaattgtacacatgtttacttcagtttagcttctatcggtctgtgcaaaggaacatatatttattgaatcaagcgtgaatatattgaagtaatgtgcaattgtgaa

SEQ ID NO: 29905 - DNA, 2349 bp, Zea Mays
gttaaccccaccttggatcgcggccgccgtgtgcgtgagcagcgacgtgccgacagccgaaggcccaaaccaattcgattcctcccccctgccggccgaatcaaatttctccgccgccgcccggagcaccgatccccgagagttccatggactcgccttccgcatcgaggtattagcaagcctcgccgcgtcgcgccgcactgccccgccccgacgcctgctgcgctggttttggaaggatccaagatgggtgtaatcagcacagtgcttggtttctttgggtttggatttgggttatctgctggcattgtaattggttacttcttcttcatctacgtacaaccaactgatgtcaaggatgtcaaggtccggccgcttgtagaatatgattcaaaatccttggagggcatccttcccgaaattcctttgtgggtcaagaatcctgactatgatagagttcttggagttgatgtggccttatcttaacaaggctatctgcagaactgcacaagatatcgcgaagccaattattgctgagaatactgctaagtataacatagacactgttgagtttgaaacacttactttgggtagcttgccacccacctttcaagggatgaaagtctacatcacagaggagcaagagctgataatggaaccatctcttaaatgggctgcaaacccaaatattactgttgttgtaaaagcctatggtttgaaagctactatccagattgtggatctacaagtctttgcatcacctcgcattactctgaagccattggtgcctacatttccttgctttgcaaaaatccttgtctcacttatggagaagccacacgttgactttgggctaaaacttcttggagcagatgtaatggctattcctggtctttacatatttgttcagaccatggacccaaatgatgtacaaaatgagaaatctcgtggtgagcttactctagagctcatatacaagcctttcaaggaagaagatatagagaaagaagatacagagagtgctgatgtgatagagaaagctccagatggtactccagctggtggtggcttgctttatgttattgttcatgaagcccaagatcttgaggggaagcaccatacaaacccatatgcaaaaattattttcaaaggcgaggagaagaaaacaaaggtcatcaagaagaatagggatccaagatgggaggatgaatttgagttcgtgtgtgaggagcctcctgtaaatgataaactgcatgttgatgtcctaagtaaagcctcgaagaaagggctaatacatggcaaggaaactttgggctacattgatattagcctcgcagacgtgatcagcaacaagcggattaatgaaaagtaccatctcatagactcaaaaaatggtcagatccaaatcgagttgcagtggagaacttcctagacaggaaaaagccagaatgcctgaatgtagtacacacgtatgttcctatattcagtttgcggatgtctgtgattgagattgagctcgtgtagatagtttctttgtttatggacatctttgttcagatctcctcttagttgctcaaatttccgacaagcactatgtatgcatgtttatggaactgaacctattctttgactaatggcagaccatacaagagcattctggcattggtgtggaatttgcatcaaatcaaaagacctcaaagtaaaactatagaactggaaaataaaactttaggaacatactctacttcatagctttcaaaccaggcgacggttccgattctagacctggtcgcttttagttttactttactttgactattgacaaacccttcttccattacctgcatcaaatcagaagacttcaaagccctataaggcgaatgctccaagacgtagcaggcgggtggctggaattggtgtggaatttgctatgcaggattggggtggaaaatcttccaagaaagctatgaaggccttgcacatcatcagtaatggagaaatcagtcaagaagcccaacgggagtatgctgcgcttttcaaacatcctctgtccccgtctgttagcaatactcactaatccctaaccgaacagcaggagtggaggaagatacacagcaggagtggaggaagatacaagagaaggtagggaagatcacaggaaggatggagtatcttctgcagagagaaaatagttgttcatgttttcgataatcctgacccttccatcaggtagtgcataagtactacttgcttacaagctgccaaaccaggcccagctatcctcgcgcacgcaggcgcccaacaggtcactttcttcggtctggcccatatacacgatcgctcagatga

SEQ ID NO: 29906 - DNA, 1328 bp, Zea Mays
ccacaccatgtgtgtgcccagattcccctaaataggtgtctcgcctctggcatcagtcccctcttccccttccttctcctcggtccctatccgctgctgcgaacagcagaagctgcggcacggaggtgcgctcttcccggcggtggagttgcagctgcagggggaagaagcgagctagagctgcagggatgataagcgccaagtccaacgccgccgtgtacccgtgcccggagtatgcggaggtcgaccccaccggccggtacggacggcgacgttcttggcaagggcgcgtccaagattgtgtacaaggcgttcgacgagtaccaggggatggaagtggcgtggaaccaggtgaagctgcacgacttcctgcagagccccgaggacctggagcggctctactgcgagatccacctcctcaagacgctcaagcaccgcaacatcatgaagttctacacctcctgggtcgacgtctcccgccgcaacatcaacttcatcactgagatgttcacctccggcaccctccgccagtacaggcagaaacaccggagggtgaacatgtgggcggtgaagcactggtgccggcaaatcctcagcggcctgctgtacctccacagccacaatccgcccatcatccaccgggacctcaagtgtgacaacatcttcgtgaacggcaaccagggcgaggtcaagattggcgacctcggcctcgccgccatcctccgcaagtcccacgctgtccactgcgtgggtacaccggagttcatggcaccggaggtgtatgaagaggagtacaacgagctggtggacatctactcgtttggaatgtgcgtgctcgagatggtcacctttgagtacccgtacagcgagtgtacgcacccggtccagatctacaagaaagtgatctctggtactaagccagaagctctgtacaaggtgaaagatccaatgctgaggcgctttgtcgagaagtgcctagtatcgtcatctcagagactgtcagcaagagaactgcttgaggatcccttcctacagggcgatgacgtggctgtttctttggatggtggagattatcatgtaccgaccaagtacgtacggcagccttcatatctagggcatacctatagcaatggctccatggtgagtaatggattctcagaaagcatggatgaggacgctctgagtgaagactgcgaggatgatgacatgaaaggccaagatggcattgacctgttcaacgagaatgaggatgaacctcttggcaatgtggacataacaatcaaagggagaaagagtgaggatggaggcatacgaatctctagattccg

SEQ ID NO: 29907 - DNA, 3308 bp, Zea Mays
gccgacccatcgccacgggccggttccggttccaccgcaagtctcccactccagtgtcgtcgacggccagacgacgccaccgtcacgccccaccaccaccaacctatcccccaccgcgtcacgcgcctccacctccccagatcggcggcgaaccggggggcccggacaggcggcggagagctcgaggcgtcatggcgaagtcgagcgcggacgacgccgagctgcggcgcgcgtgcgccgcggccgtggcggcgtcaggcgcgcgcggggaggaggtggccttctccatccgcgtcgccaagggccgcggcatcttcgagaagctcggcaggctcgccaagccccgtgtcctcgctctcaccgttaaacaatcatcaagaggcgaggcgaacaaagcttttcttcgagtattaaaatattcatctggggcagtgctcgagccagccaaactttacaagctgaaacatctaacaaaggttgaggttatttccaatgatcccagtggttgtacatttgttctgggatttgataaccttaggagtcagagtgttgccccaccacaatggacgatgcgtaacattgatgacagaaatcgtctacttttttgtattctgaatatgtgcaaggagatactcagttatcttccaaaagttgttggaattgatattgtggagctagctctttgggcaaaggaaaacacactgaccatagataatcaagtgagtacccaagatggtcaagaaacatcagttgctactcaaaccgagaggaaagtaacagtaactgttgaaaatgatctcgtgtcccaagcaaaagaggaggaagaagacatggaggcacttcttgacacgtatgttatgggaataggtgaagcagatgcattctctgagagattgaagcaggagcttgtggctttggaggctgcaaatgtatatcaattactggaaagcgagcctttaatagaagaggtcttgcagggtctggatgctgctagtgcaactgtagatgatatggatgagtggctacggattttcaatctgaagctgaggcacatgagagaagatattgcatcgattgaatcacgtaacaatggcttggagatgcagtctgtaaataacaaagggcttatggaagagctagataaattgcttgagcgtctgcggattccacaggagtttgcagcatcattaactggaggctcatttgaagagtcacggatgctgaaaaatgttgaggcatgtgaatggttgacaggggccattcgcagtcttgaagttcctaatttggacccatgctatgtcaacatgcgcgctgttagagagaaaaaggcagagctggagaaactgaaaacaacttttgttcgacgagcatcagagtttttgcggaactacttctccagtttggtagacttcatgatcagtgacaaaagctacttttcacagcgtggacaattgaagcggcctgatcatgcagaccttaggtataaatgcaggacatatgcccgacttctgcagcacttaaagagtctggacaagagctgcttaggtcccttaaggaaggcatactgtcattcccttaatttactactacgacgagaggcacgcgaatttgccaatgaacttcgtgcaagtacaaaagcaccgaagaatcctgctgtttggcttgaaggttctggcggctctggtcataatggaagcagttctgatacttcacaggtctcagatgcatactcaaagatgcttacaatatttatcccgcttcttgtggacgagagttccttttttgcacattttatgtgctttgaagtacctgcacttgttccagctggttctcctaatgctaataagagcaaatccggaggaaatgacccggatgatgatctgggtcttatggatccagatggcaacgatctgaaacctgacagtacctctgctgaactgggtacattgaatgaagctcttcaagaattactcgatggaatccaggaagacttctatgcggtcgtagattgggcttataaaattgaccccttgcgttgcatctcaatgcatgggattacagagcgttacctttctggacagaaagctgatgctgcaggatttgttcgcaaactacttgatgacttggaatcaagaatatcagtacagttcagccggtttattgatgaagcatgccatcaaattgagcgtaacgaaagaaatgtgcggcaaactggaattctagcctacattccaagatttgctgtccttgcatcacgtatggaacaatatatccaaggacaatccagggatttaattgataaagcatacacaaagctagttagcacaatgttcgcaactttggagaaaattgcacagagtgatcctaaaactgctgatattgtgttgattgagaattatgctgctttccagaacagtctttatgacttggctaatgttgtgccaacgcttgcaaagttctaccatcaagccagtgaatcatatgaactagcttgcactcgccatatcagctcactcatttatctgcaatttgagaggttatttcaattcaaccggaaagttgacgaattgacttacactattgctgctgaggagataccgtttcagctgggattatcaaaaactgacctaaggagggtactgaaatccagcttatctgggattgataagtcaattagcgccatgtacaggaggttgcaaaagacactgacctccgacgagttgtttccttcgctgtgggacaagtgcaagaaggagtttttggacaaatacgagagctttgttcagatggtaacacggatatatgggaatgagccgatcatgtcagtcaacgaaatgaaagacgtccttgctggtttttagatacaagtacacagcaccatgtatgatttcagagaaatagctatgtattccattcattccattgaattctgcacccacttgcgttactgtgttaggcgccctttttgggttatgtgtgtgtatgtggatgtcctctgtatagaagtgaacgcggcatgcttcccctaatgatgttcctgtgtcgcatcgagccgtcagtgacaatgcaaactgcaaacccggagtaccggaaggaacatgttcatgtttatgacgtcatttgtccaattgccgttccattcacggtcaagaaggtcatgtcttgccaagttcgctttgtttcctggtctgaggtctcattgctactttcggttgttcagctgaagactgaagtgcaagctatcacgtgtcgggctccagttcgttagtgtggccccatatgttgcgggcttcccagcttagaaacat

SEQ ID NO: 29908 - DNA, 1483 bp, Zea Mays
caaatatcagtaaaacaaaagaaagattggcaacagtttgatgtctttctcggagtatcccttttcccatcaattagtatttgataaaaactctgctaaaactagaatatatttagcttttgtatatatgccaatccgaactttttaatttgttctgaactttcatgtgccagtctgttgtagagtaaaaactttaccaaagcatttctccgagcataagtggtcacaagagcatagctctaaatgtgtccctcatcaaatctctcaagttgcagagaactaggcaatcacgttacctgctcttttactgcacaggccattcataataataatggggagaagatggatagtccatcaaacggtctctctattgtaggatatctgagacctgctttcatagaggaagagtcttacttgaggagcatgtttcatggtgacaatggtggttattcatctgactggaaagtaaatgaaaccgatgaatacaacagagaaactcggccagtttctggaaccaatcgcctcattgtttaagattgatccacaagattttcaagattcagaaccagatattcttgcaaattctgcttcatcgataatagaacggatcaaagaaaacagtgatcagtgtgccgcggctctcaggtcgctctgtcgccggaaaaagggcctcactgtcgaggaggcaagcttgattggtgttgacagccttggtattgatgtaagagccttttctggcttggaagttaagactgttcgattttcattcaatgcacaggcgctctctgaacgttcagctgaaaagaagatcaggcgaatgcttttcccccgttaccagcgtaaaaacgtgaaagcctctactgaagatgagtcttaacctatcagctgtttttcctgagaaagcatgcaaacacctggttcaaagacaaggtgtcaagggaatcaacacaatatcatcttatgcgagtttgctaggagatagcgcacaacctgtcgactatgagaatgaccaaaaacatcagagtaataaggtttgccatgcatggtctctaacatgcttccaagaatatagtttggtttctgacagataataaaaaaaaaacgaataaggtgccagttcatgtataaaagatgaactgcgactttatgctggcggaaactgattagctgaccaagctttgtcagctacaaattcccagtaataataacgagctgcgaggtgaaagggcagagtaataaggtctcgttggcctaaatcagttcttagtttcttacccacaacctgtaactaactttgttgtctcttttcatgtagacataaatgtcatgcaacgcaactgcgattatggcattgttttgttgaactatacataaaagaaaacttgataaagtttcgagtgcttttagctgtcagattctactgtgctcgattgcactactgtactcgtgtactgtaagaaaagactgaccagttattttccag

SEQ ID NO: 29909 - DNA, 2592 bp, Zea Mays
tctaaatcaagaggtaagcttatacacgtctcagaatcacatgagtgtcatatgagactattcatattacgagctatgtactaaaagttagcattgttaaaaaagaaagttcggttaatttagagcaagtttaataatagagtcaaccattgattcttgtagtctgttatttagtctattcgtatagtggttagattttcaatattaatgtaggacctcacttgtttctgttctttgtcaagccggcttgtaagttcatagctctgtttctcttttctctcctcttttctgtattcgatctcagtatttagtcagttaatagtctcttattatactactccttagagacaagaaatgaagtatagcctacctagaaacctgcaatcaagcatgaatcaagttactacagatcagccagggccttttgaagctgtcttcagcacctttctcgtcttacctgttatcttaccttctattttaaaatagactttataaacaatgttgcttacattaaaaaaatattgttttttatgaccttatacacctgagagaacctgagtgctgcagctgtatgcttctaaaagtgttgtttaccactgctggagcgctagtagagttatggcgtgagtagagagtgggctggtggtaggtttggccaggagcaacgagtaattgcatgcctcggcacttgcactgcatgcccaatcaatgtgcagcatcatgcactgcctgctgccgcagcctgctgcttgacgcgtgcttgccgggaaaacggtgtgctggtctgctggggaagcgaagcccatcctactaggtgatcgggaaggagctgtttgggcttctccgagagacgcacggcaagaggttccactccttcatcgaggagaaggtggtcccgttggccggcgacatcatccacgagaacctgggcgtggaggggccccagctgaggcggatgactcgggagctcaacgtcatcgtcaatggagctgccacaacaaacttctacgagaggtacgacgtggccctggacgtgaacgtgatgggagtgaagcatatctgccagttggccaagcagtgccccaatctggaggtcgtcctccatgtgtccacggcctatgtggtgggggagaagcaggggatgatcctggagcgggcgttcaagcagggcgagaccctgcggatggagacggagctggacatggacgccgagctgcgggtggccagggactaccagcagcaggtcgccggggacgacgccgagcagaagaacgagaggaaggccatgaaggagctgggcctcgccagggcccgggagttgggctggcccaacacgtacgtcttcaccaaggcgctaggggagatgatgctggcgcgggagctgggcggcgtcgtccccgccgtgatcgtgcggcccagcatcatcacaagcatccataaggagccgctgccggggtggatggaagggaccaggaccatcgacgccatcctcattggctacgccaagcagagcctctcctgcttcctagccgacctccagctcaccatggacgtgatccccggggacatggtggtgaacgcgatgatggccgcgacggtggcgcacgcgtccgcccccggcggccacaaggaggagtcgccgacggtgtaccacgcgacgtcttccctccgcaaccctgcgccgtacgcggtgctgtaccggacgggaatccgctacttctgcgaccacccgcgcgtgggcaaggacggccgccccgtgcgtacccgcaaggtgcacttcttcggcaccgtcgcagccttcaccgcctacatgctgctccgctacaggctgccgctggagcttctgcgcctgctcagcctcctctccggcggcctcctcttctcgcgcctctacgccgacctggaccgcaagtacaggttcgtcatgcatctcgtcgacctctacgggcccttcgcgctcttcaagggcatcttcgacgacgccaacatggagagactcaggatggccatgcctgtcgccgaccggctggagttcaacttcgacccaaacaccatcgactgggacgactacttctacaagatccacattccaggggtcatgaagtacgtcctcaagtagcagctacatgcactgatcgccgtcgttcgtactacctacatgtacatcatgatccatccagattagtactattaattaattaaatccaccaattggcgcgcgtttgtatacacattgctatatattgttgctacgctcgacgtggatcccacccatcctctctattcctcatcaaaatgtatccagttattagcagctctgctttagctaccactacgtacttctgctctggcttgtttatttagtgttaatttagcaggacctgatgatgatatactcatcctgtgtgttgtcatgtcagtcactgttggttaattgattatacttaagcaggtcgttgcataatcattgtggagaccttcattccaaagatagttctcctatatatatacaacatgcatttttgtggttctttcttggcgaccaggtcagatcggcctcgtcttgagaaaccttatgtgtctacctttgtc

SEQ ID NO: 29910 - DNA, 1287 bp, Zea Mays
ccgcctcacacttcctctgacaccgctgctgcctcttcttccctcctctcgagaagctgcctgctacccgcgcgctgcctctcccttccactccataccataccgccacgacaacgtcgacaagcgcaataccggagccctccgaaatggccgaggacaaggagaccgactcgccgcagccgccggccaagctgccccgcctctcccgcgccgacacgagcgccggagaggtgaccatggcggcctcgtcgccgctggttcttgggctggggctgggcctcggcgggcgcggcggcggcggcgagcgagacgcggatgtgtcccccgcgacggtgactcccaagaggccgtcggcgctgacgttcatgcagcagcaggagctggagcaccaggtgctcatctaccgctacttcgccgcgggcgcgccggtgccggtgcacctggtgctccccatctggaagagcgtcgccgcgtcctccttcggcccgcagcgctttccctcgctgatgggcctgggcagcctgtgcttcgactaccgcagcagcatggagccggagcccgggcggtgccggcgcacggacggcaagaagtggcggtgctcccgcgacgtggtgccgggccacaagtactgcgagcggcacgtccaccgcggccgcggccgttcaagaaagcctgtggaagccgccgcggcaccggcggcggcggccggcggcagcagccccgtcctccgggtcgccgcgccccagcacgtgctcggcctctcctcgcccaccagcgtcctcctcgcccacggcgccgcgcgtgccacaagtcgagaaaacaacccggtttagcatgcatcggtacggtagctcgctgcgttgattctgctgtttacgtgtgcctgagacaccagtacacggggggaatcatttttcttctgttgtgtttggggagggcggcctcgctggtgtgggggcgatccggctcctgggcgggggcgcggggccccccggcttgctgtccctcctggggacgcgaaggggtgagctgtgagcagcactgcgtgctctggaccttgtcagaggctggctcgggctgcgtgacgactcacgatgcgttggaggctgcactctgtctgcgcatggcgcaggcgcaggcgcagcggcctgcggcggtgtgggcctgttggctgttgcctcgccggtgcaaaaccatcgtccgagggggctgccttgttgcttgggaacggagatttcatgatggttgagtgagtccttgttttttttattttaacctatatttaac

SEQ ID NO: 29911 - DNA, 2159 bp, Zea Mays
acacacacactcccattcgctcccatccgccaggacactcttctccccggcgcagtcaggacactcttctccccggcgcagtcaggacactcttcttctcaccgccgcgagcactgctctgggcgcgcgccgcctaccctcccctcttccctccctcacctctcgtcctcgaagcaagggtttccctgccccaggctgcctctcgtccgttctccttctctaccgccgccacaactcgcccgccgccccgccctcaccgccggcaacgtgacacgacaagcccacccctttattcctgcagctatactccgatggccctcgtgaagtccgacgctgaggaggagtggtccgactctgacttcgatgatgcctccgactccgaggtcgccgaagctctggactggctcgacgccgtggagggccctgacggctcagctcgcccccacgtcgccttctcggcctccggaggcggggctgcggcgcggaggcctaacgcacacggcggcgtgctgtctcgcccgctccagccgctgtctaaccggacccagaagctggcctcgcacattagtgctactcccttggaggagtgggaaggtaggatgaacgttgcgatgtcaaattccgtcacaactgcaatcagggatagcataagggacacagctattgggaaaataaggaacactgagaaggctgatcgtgctacagtggaacaggctattgacccaagaacacgcatggttttattcaagatgttaaaccgtggtgtctttaataacataaatggctgcatttctacagggaaagaggcaaatgtctatcatgcaacaaagacggatggccaggagcttgcaattaaagtctacaaaacctctgtccttgtttttaaggatagagaccgatatgtccaaggagattatcgttttagacatggttactgcaagcataatcctcggaaaatggttaagacctgggctgaaaaggaaatgagaaatcttctacgagtgagggcagctggaatccgatgccctgcaccattactcctaaggcttcatgtactggtgatggaattcatagggaaaggaggctgggctgctcctcgtctcaaggacgctgctttgtcagatgacaagttgcatgaaagttactttgagataattacaacaatgcggactctttaccaaacgtgcaaactggtccatggtgatttgagtgaatacaatattctatattttgagggtcacttgtatattattgatgtttcacaatccgtcgatcttgatcacccttcagctttggattttctgaaggaagattgcttgcatgtttctgacttctttaaaaaacgtggtgttcctgtcatgacagtaacggatttgtttaattttgttattgatcaaagcatttctgatgaagatgttgatgattacctggaaaaggctcagcaaaagattttggaaaatggtggtgcggttccaaatgatgatgaaattactcctacagtcatggtgcagacgttggactacgtgaagcaatggtttgtgcggactaaaaacacaaacactgaaaaggagcaaggacaaccggcacgaaacttagttgaggttgaagaagacgagagcgaatcttgcttgagttctgatgaagatgattcgtggcacgaggatgatcctaaggtgggacccgaggaaaggaaggctgctcggaaggaaaacaagaagaaagtgaaggaagagaagagggaggcccgcaagaccaagatcccaaaagctgagaagaagaagaggaagaaaatggcgaaggcaaaatgcaagcggtagcgaatatctatgaacaatccagtagttaactccgtcagtagagatggataacttcgtcgtgaatcaaacaagatgatggataacttcattgtgaatcaaacaagatagcctttatgagggagtgcaggttggaagtttggttcacagcgctactttacacatcacaagattattcacgatgttttcaacctttttgttcgtttcaattttgtagagaactactgtacgtaatgtgaccacatatatgtttatcttgagtggaaccgtatagtattttttagagaagagtacaaatggtactttgtgccgctggattctttgacctagtgcaacttaattagg

SEQ ID NO: 29912 - DNA, 2672 bp, Zea Mays
gcacgcttggttaaactccgggcgatggccgagcaaggacgcacccgggattggacctatcgacggtggcagcccgcagcccatcggtttcgccgaccggcgcctcgttcgcatcgactccacctcctcctcctcgcacgctataaactagactagagcaatacccgtggtggatgttccaccgcctgctccgccgcgcgatgccgctcccgccgccgcagtccccgcttcctgctccccggatgccgggggtcaccggcgggcgcctcttcgcttcgctgccgtcgccgccgcccctccagtctcgaagagaggtgcatgtgtggtatcttttgcctgatgagttgaaggatgcctcccaactcaagatgtacacggagctcctttccccttctgaaaggaagactgctttgtctatgaacggggaaaagttgcagaaaggtgccgtgctgtcccgtgcactgctgcgcaccaccctctcgagatattgcaaagttgatccaagatcatttgagtttaagaaaaacaagtttggcaaacctgaggtactgtggcgatctgatgacagcaggatggaatggcctttacatttcaatatttcacacacatcatctttgattgtctgtggcataaccatggatactcctattggcattgacgttgaagagaagacacgaaagacagccaagaatattttatctcttgctcgccgttatttcaccccatctgaaattgattatctagctaaaattccagatcctgatgctcagcaaaaggagttcgtaaaactatggactcttaaagttagtgaactttcgtaagcaattgatttgtgtttttgtattatcattatttagaacactggtcagtagtacctttcttatgcaaagcttaagattcttaactgaactagtcacctaccacttgaagcatactaggaccaaggagacatgagggtagcatggaagtgtatttcatgatttatatatgaaggatcacacttttttttatcgaacactcagcagatgatcacacttaactgtgggtggtaagaaacccagtgcgcgcgcgcgcacgctacagggaactcaatcatctgctagctccaaactggaaacagcagcaggaagcacgcctgcaacacatgcagacacccctacacctaccgaagctaacccggaggactctgggcttgaaggaaatccccttggcaccagccaaagaccacaaaaggcttccgccttggccaacctaacaaccacaaccaaattcggaggagttccttgaaagacaataacatttctgtgtttccacaacatccaagctctcaggacaaccagagtcaaattcttttttgctcagcccactcatacgagcactattgaagcaccaccactgatcaaaatcattctcacccagccctggatggaggttctgcattccaaagggcctgagcagctcaaatcaaaactgccgcacatacaccttttatctagttcatttaaatcgtcattggatttcttagtcaacatttccttcctaagtcagagacttacatgttacaataataattttgattacatgtatcgttgatgtcttaattttgtaggaagcatatgtaaaagctcttggaagggggttttcaggcgcccctttcaacaaattctcgattatattggcagcaaatggcagaatccaaatttctgtggtatactatttccctctttgtgctcatgcttgtcagtataattcttatactacttgcatgaatttatggaatcggtcagtataattttgggtggactggtcccttagaccaacaaatttctatgggttccttttaactcttgatcacacagtgaaaaacatcttctttggattctttgtgacgttacgaattttttgaagaaaaaaaagtatcatgttcttttgtgaccacacttgcaagctctactgctccacaaatgcaacctaataattaagtgtttttgccaaagaaagcaagaaaaattctgaattgtcttcaatcctttggagtttccaggcaccaaaagtatcgaacggttctgactctatccatgactgtctgtccgagaattggcagtttgcacttgctgaactaaacagttctcattacatggcaatctgtatagaggatgactcaacaagttcagattctggaaacggtagactgccactaggattgaaagtatggaagaccactccgttcgtggaagatatacttgtttctggaacggaagctgtaaaacttgtcagttaagtatgtgagaggatatctgccattggtcaagtgatttcgccagatgacaatgtgatgcaacgaatgtatttggacgaagtatgcgctgtgcagggaggctgaacggttttcttcgagcatactgcatgcattgatgaactgaccactgacactgtgtgctttagttaagatttggaaatgcaatgacatacactttggagtcctgatattcatattagcatatcacgacactgtttcgaaaggaataaacatttatctctctcttgtgtgtgtgtgtggggtaattttagacgtattttgtactgattggtccttgttatctgacggatcattggaagaaatattcatgcatcagcatgcttctatcggtggcataggaattctgctattg

SEQ ID NO: 29913 - DNA, 185 bp, Zea Mays
cgcgtagacgcccatgccgggtatattgtgcttgggcggggagctttgccgcgtttccgtggggctgtcggttaccttcgcggaaggggagaaccactgggtggccggtgatttctgacctgaatcatagtgtcaccacgggaccgccttacgtcgtgggcggcatcaccagctctgtcgcatca

SEQ ID NO: 29914 - DNA, 2515 bp, Zea Mays
cttttccctcccctacctttcttccttcttccccaagaccgcgagtaaaaatttcgcttaaaattcgattccacgaagcagcaatcgcaagctcgaagctctaaaataatctcttcccgacgcctctggaaggtcatcatctgaacccaggtagcctccagcgctggagacgtgccgtactcaaaccctagccaccaatggcagccggcggcggggctccgtgggcggagcgcgcgcgggtggtggggacgcagatccgcaacaggttccgcgtggcgcccgtggaccaccggtcgctgtggctgcgggcggacggtcgtgtcgccactgaggcggtccggcggtggtcggatcgcgttcgggccctgctgcagaggggccggagcgcggatcggaactccacatcgacggatacatcacctgaggcggtggcaaagccttcgtccagcgttttgagattctacagaaagagagtgggcaaagaagttaatgggattgaagactctgttattttccgttcgcttcaagcattggctgttcctcttattggcaatgcatgctatgtttttatgcatggtcttaactcagttcaggtttatggtgtagagaagcttcatcaggcattacatgggagacctaaaggtctgttaaggtgttacctgtttctcgtggtgatggcatctaccaaaagggaatggacatggcactttcaaagcttaacagtggtggatgggttcatatattccctgaaggaagccgttcaagggatggagggaaaaccattgctcctgccaagagaggtgttggaagattggtaatggatgctgacagccttccagttgtaataccctttgtccatactgggatgcaggatataatgcctgttggaaaacgaatccccagagcaggaaaaagggtgattgtggtcgtgggtgacccaatcaactttgatgacctgctcatcgacaactgtggtgacacccaagatatccctagagggatcttgtacgacaaagtgacacagagaattgggcagcgattgcaggaactcaaggtcgaagtcgacagactggctgcagagcaggaacctgaactccaaaaccacaacgtgggtgatgatggataccggctgtggcagcaggtcgattgggaaggatttgggatagggagttccatgttgccatcagaaccttcagctgctgcgcaagtgccatcaagggaagccgagcctgaaccgcacgtggaagtggagcaaagcgtgtctccagccccaagtgcagcgacctcatacaatgttgctgttccacactggttccagcgccatgcggacccttctgaactcatggggttcgcttcccgtggcctgatcaagcatggcaagttcttggaggaaggctacagggaattccaacagtcggctactactctgcacaccttttgggtttctcgtgctaacaatgctgcacaccgatggagcactgcttaggctgcccgcagcgcttcccgtggcgcgcccctccgtcggctttagtggctacagtagcgacaaaacggtgcatcagatcactctactagctcctatacacagaacaaggacaaagcagcgcactacgccagattgagggggcactgttctaccccttacctgcgcgctacagtgcgcgtatgagtttgatagttggaaaaaattgatattggataaaaaatagatatagaaaatgatattttatagttgtggggtatatgagaaactttagagggaacaactgtgtgagataaaaaaataggagatgaaatgttgatgatgtgatataaaaaatcaatataggagagatttaggaggaactgctgcagatagtcttactgtctgtagcggtcacctctaagtttttcctcctatatcacttttttttgcgtcacatcatcaacattttatctcatacttttttatcttccgcagcggtttccttatattcccccactataccccactacaactataaaatattattacctaacattattcatcttttattactatttttcaactattaaataagagagcattgtgtaaggggtgctacagtgcttcccttgatctagggacgggcgttgcctccccttgcgctgcagcgcgtagggggccatttggagacagtcgctgcccacgtagagacccgtacgcatacacagtgcaaggtgaggggcatatggaggcagccttaagactatccgcagcggttccttctaaatttcttcccctatatcactttttagtcacatcatcaacagttatcctctattttttcatctctcgcagtggttccccctaaatactctccctataccccactacaactataaaatatcattttctatacgtatttttcatctactatcaatttttcatctactaacaattactcgtgtacccacaacatagtgttggaggggatgaacagtgaaccactgaattgagggggagagagaagagggtcgacgcgtagggggtagc

SEQ ID NO: 29915 - DNA, 2269 bp, Zea Mays
aggagaaaggttgccatctcgtgtgtgtgtgtctgttggatggatctctgtgagccatgccctctttgtcttcttgcttttgctttcttggtcccttcccttctcttttctagcagagctctcgtggttcttggccttccgtgtgtctgccagcgctgccagctttcacataaacaagttggggaagcagttgaggttttctaattcttcttggaaggattgagatctccagttctgataatgggttcttttgggatgaactggaatcagaaggaccccatggtgtgggattgggaacatctagtaccgtctgtctcaaatgcagttacaaggcacggatctgctaattcatctggtggtactcttacttctaactcagagctagggcatggttcatccaagagctctatttcagcgtccattgattcaccctctggagtagggaacagcttagagttcaacttcgccgctgttgagaggcatgttaagaacacgggcacgaacggcagagtcgatgactcggggaattctccatcgtcaatgatagctttcaaccaaggagagccattaatcagcctgaaacttgggaagagggcttacttcgaaaacgcctgcggaggacaggatgccaaggtttctgcagcttcagacgttacttctgcagccagcgtggtcaagaagactaaggtgtctcagcagaatgcaaagaactggtactgtcaggttgaagggtgcaaagttgacctgtcttctgctaaagattacaatcgcaagcacaaggtctgtgtagtccattctaaagctaccaaggtggttgttgctggtctagagcgtcggttttgtcaacagtgtagccggtgagatttccttccattaaaactgagttctcctttcattctacgatattcatatttgtatttgccaagttacttttttttggcatctttaatgagggagggagctttgaaaatgtgaccagctgaaagcaataccagccactcaagttgtagagcgaagtggacttgtgctagtctatatgatgctcaattattttgcttggctcagactctcatgatatttatgttatttaatcttttctaattaaggtacacaggaacgctagcatgaaatgaatagtgaagaaaaattggcaattccttttgtttctggcactagctgtaatggtgtaggactgcctaagtggagtgttgaactgttgatgcaacatcttgagaaggagaaattgtacacaagcttataactaacatttacactttgatctgttgttgacataatgaagctccatttccctcttttctttaatccttctctgtttgtagttttcatggtttagcggagtttgatcagaacaaacgaagctgtcgtaggcgtctgatgcatcataatgcacggaggaggaaacctcaggcagacacaatttcattcaattcatcgacaatgttttatgatacaaggcagcggacaaatcttttctttagtcaaccactttatggccaagtgaggagcaatgcagggtcttcatgggataacttgggaggcttaaaattcatggagacgaaacatccgccagtgcatccaacaaaaacagcatcccctgatgaactgcatttctcagccctccagataactagtgctgcggctcacaccggacatcatcatgatctcgatgggttcatggcgttcaagggaaccagcacaaaggtccttaaccaaggcgtggaggcttgggcggccgcttccagctcgaacaacggaggcccagaaggtgggcgtgctctctctcttctgtcagacggctcgtggggctcgagttcagccgtcatccagcagcccacatctcacgcggacgccggtgcattgctgccgcccctcgccaccgttgccgtctccaacgccgccgccgccgccgggcatcctctggacccgtccccgggaaggttctggccgcaagacgatcatcccccgctcgtcgacggacccgccacgcagattccggagctggcgcacctccggatatggtgaaaggaaacgcatgtgatgcggtgactggtgacatgccagttcgagggcctggctgggaacacatctggttggttagcctgccgctctggcttgaatttgccggcgacgacagtctttgtttgtatcttttgatcagaacggacacagacatgtttgcacaatataatgtgacgagtccctctttggggttgaggagtgaggagatggagaacgataggaggcaaaa

SEQ ID NO: 29916 - DNA, 3717 bp, Zea Mays
aagaacacaaaattaaaaaatccagggttttagaagggttcggtaggttcgttccctcgccttctccctttcttcctctccaaacaagacattgcagaagaaaaaggcaaaaacaatccgccgacttggagaaaccctagaatcaagcgcggaaccgccctcatccaccatgctgcgtgcggctgtggcggcggcggaggagctcaggtctccgctgctcagggtcattgggacgctgagggacggccgcggctcggtgctgctgggtaggagggtgcgtttctgctccaactcttccgcgagcgacaccgaggcggcggtggcagaggcggaggcgaaggccgaggatgcgtccgctgcggagggtgaggcggacagcaaggcgtcttccgccatcgtgccgaccagcaccaatatcgatgattgcctctcggttatagcgttacctcttccacatcggccactctttcctggattctacatgccgatcaatgtgaaggaccaaaagctgctgcaagccctaatagaaaatcgcaaaagatcagctccgtatgctggtgcctttcttgtgaaagatgaagaaggtactgaccctaacatcgtgactggttcagattcagcgaaaagcattgatgatctcaaagggaaagacttgctgaagcgtcttcatgaagttgggacgcttgctcagattacaagcattcaaggggatcatgtagttctacttggtcaccgacgtttacggataactgagatgttgcaggtcgaagaggatccacttacagttaaagttgaccatctaaaggaaaagccctacaacaaggacgatgatgttatgaaagctacatcattcgaagttatatcaactttaagggaagttctaaggacaagttccctttggaaggatcatgtgcaaacctacacacagcacattggtgactttaactaccaacggttagcagactttggtgctgctatctctggtgccaacaagttgctttgccaggaagttcttgaggaattggatgtatacaagcgtttgaagttgacccttgagttagtaaaaaaggagatggagattagtaagctacagcaatccatagcaaaagcaattgaagaaaagattagtggagatcagcgacgttatttattgaacgagcaacttaaggcaatcaagaaggagttgggtttggagactgatgacaaaacagcattgtctgcaaaatttagagaacgtatagaatcaaagaaggacaaatgtcctcctcatgttttacaagtcattgaagaagagcttaccaagcttcagcttttagaagccagctctagtgagttcagtgtaactcgtaattatttggactggctgacagtgttgccatggggaaattatagtgatgaaaacttcgatgtccaccatgctcagaaaattctcgatgaagaccattatggtttgagtgatgtgaaagagaggatactggaattcatagcagttgggaagttaagagggacttcacaaggcaagatcatatgtctttctgggccaccgggagttggaaaaaccagtattggtcgttcaattgcacgtgcactgaaccgtcagttctacaggttttctgttggaggtttggctgatgtggctgaaatcaagggccatcgacgcacatatgttggtgcaatgccagggaagatggtgcagtgtcttaaatcagttggtacagcaaatcctctagtgttgatagatgagattgacaagcttgggaagggtcattctggcgatccagctagtgcattgttggaactccttgaccctgagcagaatgttaatttcttagatcactaccttgatgttcctattgacctatccaaggttctatttgtttgcacagcaaacgtaatagagatgataccaaatccattactggataggatggagatcattgctatagctgggtatataactgatgagaagatgcatattgctcgggactatctagagaagaatacaagacaggcttgtggcattaagcctgagcaggttgaagttacagatactgctcttcttgctctcattgaaaactactgtcgagaagctggagtgaggaaccttcaaaagcagattgagaaaatttaccgtaagatagctctgcagcttgttcgccaaggagtatcgaatgagccagaccatgagtctgtcagtgcctctgtaactgaggaatctggtaatggtgataacaccacaacaaaagatgagattttgaaggatcctgctgtagaagatgcttcagtcaccaacaatgttacaaatcctgcctccgaggaagctaatgaagaaaatttgacaagtgaagcagcaaaagaagacagcacatctaagggcaacaagggcactgatggagcagcggacaaggcaattgagaaggttgtggtcgattcatcaaaccttggtgattttgttgggaaacctgtgttccaggctgagcgtatatatgagcatactccagttggagtggtcatgggtttagcttggactgctatgggtggttctactttgtacatcgaaacaaaaaaagtggaggaaagggaagggaaaggtgcacttgtgcttacaggacagcttggagatgtcatgaaagagagtgctcagattgcgcacacagttggcagagctgtattactggagaaagagccagataaccatttttttgcaaactcgaaggtgcacttgcatgttcctgcagggtccacccctaaggatggccctagtgctggatgcaccatgataacatctatgctgtccttagctatgggaaagcctgtcaagaaggacctcgcaatgacgggtgaagtaacactaaccggaagaatcctcccaatcggcggggtaaaagagaaaacaattgcggcaaggagaagtgcgataaagacactcatatttccggcagcgaataaaagggatttcgatgagcttgcttctaatgtgaaggaaggcctcgaagttcattttgttgacacatacagtgaaatatatgatttagctttccagagtgacgccgggacagaaacaagctgagatgatttagctttatgggattgagattttttccccctagacccacgacagaaacaagtccgtcaagaggcaggcaaaccagaccattgtaaccaagatgggtggagttaattgatattcacgagaaaaatgaaatcctttttttttgcccccaatataacatcattgaatttaagagatttttggctaggttgtacgtactagtgtggttgcccatctaggtggtatagcctatattattagtaggaataagaaaagcagcatggatgcaccatctgttatttatatttattgatttaagagtgttctctaaaagcagcaggtatgccccagttgttattcattaaatttgtttcagtgagtgttagttacctttggatactgtactgtgcgtcatcaatttataggatgttttgattttttttggatacacaaacttctatcattatgcatctaatttgtggccgattttgattttgtagtccttcctctgtttcaatttattggatgttttgagtttttttttatacataaatttttattgttatgtatccaatttatggatggttttagacatataacgtttattatgtatctagtaaaaatggcgatctgtaatttagaagagggtggtaaaaacagttggg

SEQ ID NO: 29917 - DNA, 812 bp, Zea Mays
ccagatccgaagccacgcttccagcctcttgttgtcacttattagctatctctcagctaacctccctaggaagaataataagctgcaaaaggcacaagggcgacgccgataccgatgcaaataccatagcgttgatgtaaagtggcgccagaggagaaaaaaaggaagcgagccgagaaacatggacgaggaagaggtccatatcgcagttgggaagaactcaagaaaggagaaagccaacatactgtgggccgccgccaatttccccagggccaccatcgttcttgtccatgttcactggccctccaagtggatgcctttcatgggtggcaaagtgctatacaagttcgctgatgagaaggagaaggagatgcatagaggcagagaaatgaaagtaatggtcaatatgttatcacagtacaaaaaaatgtgcgggacgagaaaggttagtgcacattaccttacacatgatgacactgttgccggtgttgtgaacctcataaagaagctcaaaattaaaagaatagtcatcggttcaaggaacatgtcaaggcaagttgtggttcgccagtgctgtcaggtttggctggtactcaacggcaaacacatctccaccagcaatgatcacctggaatatagtgaaaatataggatatggaggggggagctcaggtattttggcatctatacatgagctaggtgaggaatctgacggctacgtgacaccacgaagtgatcttgtagacgaaaccatggatgaggagtcggctgaaatgaatgattctgatcaattagtaacggaggaaatagacc

SEQ ID NO: 29918 - DNA, 1333 bp, Zea Mays
caaaaaccatgcctgcgtccctcaattgtgacctggtcgaccctgtggtttacaacatgctacatgaagatcctggcaatgtaagttactcagctgtaggtgggttgtcagatcaaataagggaactcagagaatccattgaattacctcttatgaacccagaattgtttctccgtgtcgggattaaaccgccgaagggcgtgctgctctacggtccacctggaactgggaagacgctcctagctagagccattgctagcaacattgatgctaattttttgaaggtggtgtcaagtgctatcattgataaatacattggtgaaagtgcacgcttaattcgtgaaatgtttaactatgcacgtgagcatcagccatgcatcattttcatggatgaaattgatgccattggtggccgaagatttagtgagggcacaagtgcagatcgtgagattcagaggacattgatggagcttctaaatcagttagatggattcgatgagcttgggaaggtgaaaatgatcatggcaaccaaccggcctgatgttttggatcctgcactccttcgacctggtcggttggacaggaagatcgagatcccactgccgaatgaacaagggaggatggaggtcctcaagattcatgcagctggcatcgcaaagcatggggagattgactatgaagctgtagtcaaactagctgagggcttcaatggagccgatatgcgcaacttgtgcacagaagccggcatggctgctatccgagcggagcgtgactatgtcattcacgaggacttcatgaaggctgtgcgcaagctgaatgatgccaagaagctcgagtccagtgcgcactacagtgctgacttcggcaaggattgaacggggtatcagtgtatcacctgatccggagctgttctgatcatattgcaaactgtgttaggctgtattcatcttatcctggatggaagaactctcatccagacgccctgggagcaagagcaagcaaactcttgatttttctaaattctatctgatatctgatagattccaggatggttgtggagggaaatttggcagttggatagattccaggatggatgtggagggacatctggcagttgggtcatggatgtagtctgtagacgtccaaattcatgtgaagctcttgttcttgctttttatctctcaatacagggtgcgttcttttgcttatggtatggatacatactcctttacattattttaggatatgaaaaaaaaatcaaagaaggctatttttaatatatattattatattatcatagtagtttataaaattagaaagaattcatctgaaa

SEQ ID NO: 29919 - DNA, 1398 bp, Zea Mays
atacagcccacagacacttccttcctccacgcttgggcacggcagcggcgccgcaaagccgaacgagagagagaagcagagaacccctcctcgacctcggcctctcctcttcctcctccgctcccaaaatcctagggttttgctcgccgcggcgcgatggagcccacctcatcggcgtcgatcgcgcggcagacgtgggagctggagaacaatatccccgcggcggcctccgacccggacgcgatggacgcgatctaccgctacgacgacgcgtctcaggcgcgggcgcagcaggagaagccttgggccaacgacccgcaccacttccgccgcaccaagatctccgcgctcgcgctgctcaagatggttgtccacgcccgcgccgggggcaccatcgaggtcatggggctcatgcagggcaagtgcgagggcgacgccatcatcgttatggacgcattcgcgctccccgttgagggcaccgagaccagggtcaatgcccaggccgatgcctacgagtacatggttgactactcaaccatcaacaagcaggctggaaggttggagaatgtggttggctggtatcactcgcaccctggctatggatgctggctgtcaggaatcgacgtgtcaactcagatgctcaatcaacaattcacagaaccattcttggcagttgtgatagaccccacaaggacagtttctgctggtaaagtggagattggagcctttagaacatacccaaaagattacaagccaccagatgagcctgtatctgagtatcagactattccactcaacaagatagaagattttggtgtccattgcaaatcgagattatgttgctgggcagatctttgatttagctgataaactagagcaagctgaaggccagctggcacacagtcgatttggtggtatgattatgccatcgcaacgaaagaaagagcaagaagagtctccactggctaaggtaacacgagatagctccaaaatcacagctgagcaggttcacggcctcatgtcacaggtcataaaagacatccttttcaactctgttcacccgtcaagcaaggcaagcacaagtgctccaccagattcatccggtcctgagcctatggttgaagcctgagttccagcggaaggggacaatggatatttgtgttatgttatctgattcagaaggtgcaaaacaagttatcttttgagtacagaatcatcatgtaattatgagttgccatcttgggctgccactgagagggtgtgatttgggtccggttagcaatctcatgtattggatttcggatcagtattcgaagctttcataacgaggagccatcatcttattttagctgtttgtttggcttgccatttagttattggaagggtcgcttctttaag

SEQ ID NO: 29920 - DNA, 1923 bp, Zea Mays
cgcgtcccttcctcccccaccttcctctcttctcccctcacccctttctggctttctcctccgccgaggccccgagtcctgccggaattctagatcccggaggcaacttgccacgggctcctccgctccggtcgctgaatcgtactatcgtgctctcgacagaaagcccggccgaaacccagccggaccaagccctgttcgccgtgcgcgcggtgccccgggccagatctgcgagatctgcaccgacaccgctacgcctatcacgagcctgtaggtggatgctctcgtgatctctcggagtcccctggactgagcggcatctcggcggaggcgtagcctgcttagctggtggcctgccgagatgcagcggaatggggtggtggaatgcagcgtgtgccactcccgggtggtggtgccgagtccccggagcgtgtccagggcatacgacaagcaccgcagcaagatgtcgtccaagttccgcgcgctcaacgtcttcctcgttgtcggcgactgcatccttgttggtctccagcccatcctagtgttcatgtcaaaggttgatgggaagttccagttcagtcccatcagtgttaactttctgaccgaggttatgaaagtcatctttgctattgtgatgcttataattcagtctagaaagcaaaaggttggagaaaagccactcttggcacgttcaaccttcatacaggcagcccgtaacaatgtacttctagctgttcctgctcttctgtatgccatcaacaattacttaaaattcatcatgcagttgtacttcaatcctgcgactgtgaaaatgttaagtaatctaaaggtactggttatagctgttcttctgaaatttataatgagaaggagattctcagttattcagtgggaagctcttgctttattgcttattggaatcagcatcaatcaacttcgaactgtacctgcgggcaatacagcatttggtcttcctgtcactgctattgcatacatatatacattgatttttgtaactgttccttcaatggcttctgtctacaatgaatatgccttgaaaagccaatatgacactagcatttatcttcagaacttgtttctgtatggatatggagcaatattcaacttccttggcattctaacgaatgtcattttgcagggccagagagttttaatattcttcgaggacattcgagggccacgatgtttctcatatgtaataatgcagcacaaggcattctatcttcattcttcttcaagtatgcagacacaattttgaagaagtattcgtcaactgttgccacgatatttactggcctagcttctgctgcatttttggggcataccttgaccattaattttctcctgggcatatcagtggtgtttatttcaatgcaccagttcttctctccacttgctaaagtcaaagatgacaaaccagctgacttaatagagttggaagacacacaaaatcaccggtcatccgaatcttcttttgtaaatatgactgctggtgctgctgttgatgcgagccataggattggaactgatgagaggcaacccctgttgcctacatgaactagtttcttgagcaggtttggtgtagcattgtaagttgaataaactattgtacactgtaaaggcaaaggaaggaaagaactaccaacatcttctccaatttctttcatttttgggacgaggccggtcggtggcctgccatctgtggccgtgggagtgacagagcagcatacattttgataggcgtataattcaatagggattttccagatacggcacttgtaacaaaattttcttggaggtgtatatgaacaacggcgatatgacaatcttttctgtacggaacatttatactattgagtgattgatttactattactatgttgttacttaattgtatttcca

SEQ ID NO: 29921 - DNA, 956 bp, Zea Mays
aagagttttgccctgcttttaagaaagcaaatattcacccttttacagcggcgaggtaccacagcttagtcattgagaaagaaaccttcccacatgatgctttggaggctaccgcatggactgaagatggactcatcatggctgctcgccacaagaagtacaaacacatccagggtgtccagttccatccggagagcatcatcacccctgaaggcaagaaaatcatcctcaactttgtcagattcattgaggagctggagaagcagcgttcctaatctaggggaggtatatgcgaatgcgacgggtggtttcatagatcaggcggaagcagagacataagccactgcgaagttccggcactggcagtggaagtttagctaggaatcaacgtttccctctcataattcgttgtgctcgtggtaacataatctgtgtggaccgaatgtcgaataaagtccaggcgtccagctgataaaataagcaccggtgttggttcctctaggtggatatatatatccggtaattttcggcaaggggaggcctcggcacatttttgtctgagttccggcggtagcaagaccggccgtaatagcgttagaccttgttcgacataagtttatgtcggattacactcggaattgttccagctaagggcccgttcggttgtaccggaatgagccaggattcattccagctcatcaaaatctatataaattagagaaataatccggctaggaattaatccggggctccaatccggaacaaccgaacagggcctaagagcatctccaggagactctttatttttggctctctatttgactctctatttatcttttcataaagattacattatatatgtagcatctcacttcaacagactatctatctattttgctagtcaggtggctaaccaaatttggctagtgagagagctgatttggagagtcagatag

SEQ ID NO: 29922 - DNA, 2877 bp, Zea Mays
ttcctcccccgttcccctctctctctctctctctctctccactcgcctccgctcgcggtggagtgccccaatcctccacctcttcttcgccccccccgcctcctctttctcctcaaccctactccgacgcggcgccacgagacaacagcgggcgcgcggagcaaacgagaactaaaacgagagggaggtcgcggcgcccgattcggtcgcgctcgcgcgggggcgccccggattggattggattggatccttggatccccccgcgcgcggaggggaattcggcgcccagatccccgcgattccggcgccggcgccgggcatgagaggccgtagggcatgcctgtggtggtggcccctggcgcgggacgagtgagccggcggcgggaggacgaggaacaggacctgtggctgaggctgaggcctgagaggagcagtcgtcaagtaggaggaggaggaggtcggggtgggtgatccgaggcccgaggcggccgtgccatgtctcgctgcttcccgtttccgccaccacgatatgagaagaccgtgcgccccgacgcccagctagcctcgcagcagcagcagcttgacaaggagaaacacaaagagaagaaacataagaaggacaagaaggacaaagatagaaaggaaggtaaagaaaagaaggataaagacaggagtagggataagcacaaagataagaaagatcgtaaagaaaaacacaaagacgagaaaaaagacaagagcaaagataaaaacagggagtcaggcgaaggaattcaaagaaatgacgaggctctccatggtcagaaggttggagagagcagcagggggtctgaagaaattaaggatcttaaattcagggaggagttggtcagaggagtacaggatgagaaaggggcagcgagtcaaactattgaaaattatgctgtttcaaatgatcgaaatcgcaaaggcttcattgcttcacctgcaatggagactgaaaggtccgcgcataataaagtgcatattcagtctggtaatgcttcaaggaaaactgagggatttatacaacagagcatcaatgccaatcgacaaaagaatgggacatcagtacaacattctgaaagcttcaccacttctgctcgaagaactgctggtggctttccaccagcacctacaacggaggataaattcaaagctgcaaggctttcatccagtaatgaagctgcacccagaaaagagggggttggacagcgaatcagtaacattagcatatcgcttcaaaagagaactgagaacacaaacaaagatgtcgcgaagaaagaagttggcacctcctctccattgcctccaaatcctgctaatgctatgcataagggaaatggcaaggttggtaggccaatggacaacacacaaggatccatgcagagatttggcagcccatcaacatcaagtgcaacatgggggatggatagaggagcacctaggtcatccatcccaagcccgagcattacaatacggagaccgaatggcatggtacgaccagctgaaaatctttctgtctctgctaagaaacctgatgcaggaggcctttcacctgctatgggtaaggaaaaggaacaaggtggaaggttgctgcaagctaatatttcaactgatcagaaactggcagctgaaagtcgttctgcctctgctaagaaacctgatgcaggaggcctttcacctgctatgggtaaggaaaaggaacaaggtggaagattgctgcaagctaatatttcaactgatcagaaactggcagctgaaagtcgttctgtctctgctaagaaacctgatgcaggaggcctttcacctgctatgggtaaggaaaaggaacagggtggaaggttgctgcaaggtaatatttcaactgatcagaaactgggagctgaaaaccgttctgtctctgctaagaaacctgatgcaggaggcctttcacctgctatgggcaaggaaaaggaacaaggtggaaggttgctgcaggctaatatttcaactgatcagaaactggttatgtcaaagcctccagctgtggagaaagctgcagatgggagagctgaaaggatggagaaggtcagagatggggcaccagatattgccaagaaagaggacaaaaagagtgatcggcatgagaaaaagaaaaggaaagagaaagataaacacaaagagaagaaaaaggagaaagaggcaaagaaggagaaaagggaacataaccacaaagagcataataaaacaagagaaaacagtataagttatcccatagatagtcttaacttgaagcactcggtccctcctttagccccaccagttgatgatggaaaatctgttgtgcctgatgagaacctgaagaagcgaaagaaccatgaaacgaatggttacttacaaaacaaccttgatatgcggcctacaaagttgccgagaccagcactccccagcaatcgtgtggagaatggtacagcatctcatgtagccgcgccactctcttctgtgaagcaggaagccataaatattgaaaaggctgaaaggctccacaaggaagagaaggtcaatggcaaccaacagggtcagcagcgaggtccagtcgatccggtggctgcttatgagaatggcacaagctctaggaagccacctcaccccgactgcaagtatcttagccagatatacagcattcctgaagcacctcaaatgatggaattgcctgggcaggaaggtgaggactggctgttcgacaaaggcggcacccagccaaggaagccggccagttcagcgcctgaggctgatggagtcccccaagtgtgggctcaggctctgaaaattgaccatgctgatgtcattgctctgccatacgtgatacccttttag

SEQ ID NO: 29923 - DNA, 2679 bp, Zea Mays
ttcccgtcgaccggattcggttcggaccgcagctccccacagcccacactcgtccgtccgcccgtcgaatggcggctcccaaaccctaagccacagatcccttcccctgcctcagcttcgaacgccctcgcctcgccgccggtctttgtgtactgccgctgtgtccgtcggcgcggatcaagggtccgctccgctgcaccccgcggggagaaaggggcgggcctcggcgtcctccgctcgtcgcccgaggaacgtgaagaaagacgcaagagactaaagagagagcagcaggatgatgggtcaaggctacattcccagcagattagggttgattatgctcctcaacccaaaaggcatagtcgcatcaaagaggcacctcagggctggttggactgtcctgcatttggggagccaatagataaaatcataccatctaaagttcctctcgatgaaacattcaatgagtcagtgcctcctgggaagcgatactcctcaaagcaactagttaacaaacaaagaaaagctggtcgtgaaataggtctggtgattgatttgacaaataccaccaggtattattcaccagctgaatggacgaagcaaggtactaagtatgcgaagattgcatgcaaggggagagatgcggtacctgacaatgaatctgttaataagtttgtctatgaggcaatgatattccttgatcgacaaaaacattcaaagaatcctaaatatattctggttcactgtacccatggtcataatcgtaccggtttcatgattattcattaccttatgcgcacacacgtatcttgtgttgctgaggcgataaatatgtttgctcaaaggcggccacctggcatatacaagagggactatattgaagcactatattcattttaccatgaggtccctgagaatatgatgatagcatgccctccaacaccagaatggaagagaccagatgatctcgatttaaatggcgaagctaagcaggatgatgacgacgacaatggtgatccagaaccaccgcgtaatgaatcagaggataaaatcatcaccaacgacgatgtgttaggggacgaagtgccatatgaccagcaagaagctttgcgtgtgctatgttataagttgcttgaaatgccccttataaggggacattcacaatttcctggatcacatccagtttctcttaacagtgaaaatctgcaactacttagacagcgatactactatgctacatggaaagctgacggaacacgatatatgatgcttataatgagagatggttgtttcttgattgatcgaaatttttgctttagaagggttcagatgcgctttccccataagagccttgaaggtctgcatgatatgaccttgattgatggagagatgattatagacacggtaccagattcaggcttgaagagaaggtacttggcatatgatcttatggcacttggtgcagtgtccaaaactaagttgccgttttctgaaaggtggaaaatgctggaagatgaaataatacgaccacgttattatgagaaaaataaatttgagagtggttctaagagcaatccgttgtacaaatatgacatggaattattttcggttagaagaaaagatttttggctgctctcaacagtaaaaaaggttcttaaggtgttcattccatccctttgccatgatgctgatggccttatatttcagggctgggacgatccatatgtaactcgtactcatgaaggtctcctgaagtggaaataccctgagatgaattctgtggactttctgttcgagcttacgaatgataatcgtcaactggttttcctttatgagagaggaaaaaagaaactcatggatggtgcccggatagcatttactgacgatgtagatccatcctctatcgccgggaggattgttgaatgctcctggaataaggaagaacagtgttggtcctgtatgcgtattagatctgataaatctactccaaacgacatcaacacataccggaaggtgatgaggagtatcacagataacattaccgaggaaaagcttctcgaagagattgatgagataagtcttctcccgatgtatgctgataggatgcagcaggctcatacaaagatggcacaacaacagcggcggagattgccaccacagtgctagccagtgctggggcgctctcctaccgccctagccagctgctggcttccgtagctgtgtaattagtagaggtttcagtagccccatatgatgatggctggctgggtctggcctgccaactaattctttgcacctcatttgtgtcttctccctgccctcccacccacctgtataggcgtcgccgcagagtagtttccctgtaaattgtgtactctatgttctcccatattctcccctatggttttatttttcatgggtgtagaatagcgtttaacaagagggtggtgttctaggtacattagtgtacgcgttactatctctcggtgttgcggttgccttgtgctagaataaatatggttaccatctgttgctgatgggtcatgtggttcccccggcggatatcatgtggttgcgtggtatgggttattttcgtcttctgttttgttcgcacctgatccgatccgatcttttgttcaatgaagaagaaaaaaattattggtaaaacctacgtgtttatgg

SEQ ID NO: 29924 - DNA, 1908 bp, Zea Mays
cggctgatgtcttctttcggcctcggcggaaccgcggaagccgtcaagttggtagctgtcgtgttctcttctgccattgttgccctcgactggagcagtcagtccactccagtacctctgccgcacgctgctcccgccgcgccaccagctcaccaccgctgctagccacgatgcggtcgccgcgaatccccggccgccgcgacgcggcgtcgccgcagacgccaaaggggttcaacccgggcgaccccgtggaggtggtccccgacgaggcaggcctgcacggggcccacttcgctgccgtcgtcgtggggcccagcgccaagccccgcggctacaccgtcgaatacgactccctcctcgagtccgagggctccgaccgcccgctccgggaggcactgccggcgcggagccttcgccctcgcccgcgccggcgcgcccagcaaggtcagggtatgcttcccggagaccagggaggtcatggagttcgacgccgccgacgtccgcccgcacctcgagtgggttgacggcgagtggcgctccccagataacatgatacccaagacaatgccatatgcaaaaggaatgcaaattgaagtttccaagttgggaagacaattctgttgttgcttggtcacctgcagttgtcgcaaagactatctggaagaataacctattagtcgactacactctttcaaagtgttacggtactacattgtctgaggagattgttgatgtgaagcatgtgaggccttgcccaccacaagcatcagagattagtttctgcatcaatgatgaggttgaagcattccaaggtgattgctggtggctaggggtgattactaatgttcttccagaattcaagtacacatttaagtcaacgcatttagggacggaagttgaggtgaaccagaaatttctgaggcttcgatatgactgggttggtgatcaatgggaacaagaatcaaagaatgtgcccaaggcaaaatttacacaaggtgtcaaggttgaagtctgcagcgacgatgaaggttttcgtggagcctggttcgaggcgactgttgttaaagctgtcggcagcaagttcctcgtggagtatgctacgctgaaggccgatgacgggaccaagcctctgaaagaatctgtagaagcacggcacatcagaccttgccctccagatatccctgccactgatggattcaaactacttgacgaggtcgatgccttctgcaacgacgcgtggtgggtcggtgtggtatccaaggtcctcggcgagaagaggtgcacggtctacttcaggccttggaaggaagagatggagttcgagcatgcgcagctgaggttgcactgtgactggatgggcgggaggtggatgcgggcttccccggcactggagatgtgaaggctgaagagccacgcgatggcgttagacagtagcttggtgattgtatggggtaatacccatagttaaaagtgtgtcgtcactaaggtaccatgttatgttgtcttcctgcatgaagttgtcctgtgccatctgcagcaagttggatgatgatcattgtgcagttgctgcaagttgccacaccaccatcaggtctgaatctgaacgcttgccaatggttgatcccattgtgttgtactaggaactagtaagcgcattcagccagtgttaagggtgaagaaccgggagctgtggtgctaaatgttaggggtgtcgagtgaacccttattgatcgccggcgacttgtttgttttgcactagactgcttgttttagcatccctatatgctatcttaaggttgtctccaacagtgaactgtaaatggtctgctccgctaaatttagagttctgtggcttcctctaccctcccaacaaagcaacaagacctggtaaaacgtcccctaaatttt

SEQ ID NO: 29925 - DNA, 2273 bp, Zea Mays
cggcgacacctcctcgtcctcggctcctgcttctacggcggtaggactgggccgggcgaggagctggccgagctgctgtgggaccgtggcccggcgctgcggagggcgccgccgccgttccagcccttcacctgcagcgccgccggcagcagcaggtcgcaggagctgaagcggcatgcctcggacaccaccaaggcgtcagcgttcgtgaccgccgtctccgtcccgctgggcacgcacgacgccggctccgggctcgggctcgccggcctccccgtccacgacgacgacgacgccgtgccgtggttgcattgccccgtcgccgacgacggcgacggcgacacggcgccgctgccgccggagttctgcgccggcctcctgtccgagtactcggaggtggccgcgccggcgccggccttccacgccgcggccacgccgccggccgaggccgcggccaacaagctggccccgccgagcgccgccggcggaggggagggcgtcttgaacttcaccttcttctcgcggcccctccagcgaccgcaggcggcggcggcgcccgccgccgcggccgcgagcaaccccgtcgagtccacggtcgtccaggcggcagcgaaccggctgcggagcacgccgctgttctccgagcagaggatggcgtggctgcagccacccaaggcgccgcgcaccacagcggcagcggcggcgccacctcctcctccgctggcgcctctgctcccagatagccgccatggggagacggtcggcacggtagctcaacctcagccccggtcgcaaccagaagcaagacctccggatgcggcggcggtgacgacctcttcggtctgctccggcaacggtggtcggagccagctcaagaggagccgccacctggccgcggactgctcggtcagtccggacgaggacctggacgacgagcccggcgcgacgaggaggtcggcggcgcggagcgccaagcgctgccgcaccgccgaggtgcacaacctgtcggagaggaggagacgggaccggatcaacgagaagatgcgcgccctgcaggagctcattcccaactgcaacaaggtcgacaagtcgtcgatgctggaggaggcgatcgagtacctgaagacgctgcagctgcaagtgcagatgatgtcgatggggaccgggctgtgcatgccaccggcggcgatgctgctgccagcgatgcagcagcagctcctgcaccaccaccccatggcgcacttcccccatctcggcatgggcctgggcttcggcatgggcgcggcggcggggttcgacatgctcccgttcccgtgcgtcgcggccggcgcccacttcccgtgcccgccgggggccatgttcggcgtgccggggcaggcgatgccctcgctgccggcggcgttcgctcacatgtacggcgctggcagtggcgccgggccggctgggcagacggaagctgctgatgcggctgctcctgcacggccaggagaggcagagcagggtgatcagcaggtgcagcacgcgaagcagacgtgatggcgaaggcgacgaggcggctgccccccgaacattcccgtttggttttatggtgattatgagaatctacccatcaaaatctgctaagagagagccaaacaaacaggatattacaccttggattctgtgcattatctcacaatcaaggttcaagttgattttcttggttaatgtgtagaatccaaaaatcggaaccaaacggcacagagtcctttcttttggttgctctggtgttaggtgagatgataagagatgcgcgcgcatgcatgaagtgttttttacccagctagccggctagcctgctataccttgcctcgtaaactgtaggagaatgtagaggaacgcttgttttcacccatgagactggtctttgatgtttcatgagcagaaaacgccgtcccctgcacggaagctggccatcaagattcaagaattgacatggtggtgtttggttaagtatttataatttgataggtaactgataacactaaactatgtttgtataagtccaatcgtaatgaaatattccctccgtttcgttttagttgtcgctgaatagtgcaaaattgaactatccagcgacaactaaaaagaaacgggggagtatcacgctaagaactagtatctgacattggtctactcaaacttgttgccgctggtacttagtgtaaattattattgttgccatttatattagggaaatttggatccataccattaaaagatcaccactttgg

SEQ ID NO: 29926 - DNA, 358 bp, Zea Mays
cccctccttccctgactccctcgcccatcctcgcccgcaccacgatttgaaattcgctctgagtgccgccgggcaggaagactatcaccgccgccgaggaagaatcctgctcacaacgtcggccgcgcttgaggggtgggcagatgcctcttcaacgcatgtgtaacctatgcgctgcggattgacctaaagatctgaccaaccttgggcggaattcctcatcgacggtagggacctcacggatttccgtcgagcgccgcgagcagggcgtgacaccactcagattctggtaagaaccccgccaacacatcctcaacattgttctctttgtaaagtagcgtttcgtgcaagaaccgag

SEQ ID NO: 29927 - DNA, 1668 bp, Zea Mays
cgagctcgtcgccgcctgttgcgttcgcccctccttttaccttctcccattcacgccccgtctctttcgtggccttccttttccggcggccacaagtgggcgagcggcggcgcccttcaccaggtcttcgtcgggcccttcaccggcgacgagcatccaccagaaacgtggagctcagagcattggtgcctctttcctctttcaccaaggattccggtgccttatttcacaagacaaaaaaagtctcaagggtcttgattcttgtatgaactcaagatttatggtggatcttggagctgtgggatgctaagcctggtctagctactagattatgaactctctgctgatctaatagcatttctacaagaattcttttgctggaaggtttattagttatttgcaacaatgaaggaacatctaatgcttaatattgatgacctaagcattcttgagcctaacgaggtcattgggacagtcaagaataaatcatctggggaaaccattgcacatccaccctccatggctcatgccattttagcagtgggagaaagcatggtttctgaagcggaacctcttctgcaagtggtggagtgtcgcatttgtcaggaggaagatagtatcaaaaatttagagagtccatgtgcttgcactggcagtctaaagtatgctcataggacttgtgtacaacgatggtgcaatgagaaaggagatgtaacatgtgaaatatgtcatgagccttatgaacatgggtacactgcacctcccagaggccatcctgatgaaactaccattgatataaggatacttgcagtggcacaaaaccacatcatggaagctgaatatgatgattattctgccacaaatgcgagcactgctgccttctgccgctctgctgctcttgttttaatggctctcttattgttgagacacgcactgactctaactgatgaagatgacgacgacacttcagcgatgttttcactttttctgttgcgtgctgctggtttcctgcttccgttctacatcatggcttgggcaatcagtatcttgcagcgccgcagacagagacaggaggcagctgctctagctgcagcggaggtggcattcatcctgcagtcaggccaaggaaggggagtgcatttcaccatcgcaccggactccccggccacaccacagcatgaaccaccacaaccataattacatctatctaggagtggctgtggccgccgccgatcgattatttccatgggttacccaaggatttatggctgtctagtgcagaagcagataatttctgcccaagtttcctgtcattaatgtacttgcgtgttcgtgcgagttggctagtgcattttgcatgtcgtcccgggactaacgggatgtgtatataatatattttgtaacagagacatctgggttctatgatctccacaatgtcaaaaattgaactatcgcctgaattgtcagtcatcaacaacaaaaccttttagtccggaatatattagagttgaattctactcccgaaaggctagcatcgaaagtggaataggttagagttgaaagctactcaaaagggtagcattgaaactcaatagaaaccaaatcaggtttagacacatgattgttttttcatgccctccaagtcagctttaagcacatatatagctg

SEQ ID NO: 29928 - DNA, 3025 bp, Zea Mays
caacaggtcagtgacccatccgctcgccgcgccttgttgccttcctttgttgttggttggggggacctgggaagaagagagaaaccccagcagacgccagaggaagagagaaaaccccaagtcctcctcgcctcttccgcctttcctcttcccccttcctagtatagacaatcatcaatctgtgagattggcgagcgaatcacgcatacaactgtaggatggagcggggaatgaatgcctcccctgattgcagttaatccttcccattccagtccgttcctcgtccactggagtccgttgaagtacaggctgcagtaggacagggagcaaccgccaccatagctgttcgccatttcttccatcaacaccaacatgagcagcaacaaggaaagggccaagaaggcattgaacgccatgaagctgcttggtttctctaagaagcaggccaccccagtactcaaggaactcctcaacatcttcaacaacaactgggagcccattgaggatgagtgctatcgtgccctcgctgatgccatcctcgataggcaagacaacaaacaaacccctccctcccaacagggcaaccaagcagcacatgcgcactcggagcacgatcggcaacaatatgtttctgctattcacgatgacagaggcgaagatgataatgaaacgcccctggtgaagaggcccaggatgggcacggctaatttcagggcagagttgcagccatttgagtctggaccacagcaacccactgtttcaacccaaggtgctctgtctgtttcgccacaaaacagtcgtggagtaactaggtccttgactgtagtgctgcaagatgctgggtgtgaatatcctttagctgtcgatgattctttcatcgtgaaagaacccaaaccagaaccacaaattgatatagcagaaatcaacattggtgaccatttaactgaaccacaagttgatatagcagaaatcagtgtcggtgaccatttaactgatcgagattttctgactggtcctgatgccatacagctcagtgatggatcttcagaacaaactgcaggttctggtgcaagaggcagcatggtcaaacaagctcaaagtctgggtaggagcaagcaaaaagccccattgtgcaagaatggggtagggtctatgattcaaaatactcaggagacatcgtttgtggaggtggatgttgcttcttccgccaatggcgaggtgaagatgtcattgaaatgcagcttggaatcttcgaatttcagcattagtatggaggaggttttcaaaatggttgaggagaaatgccttcactcatacaaggtgctacctccagatttttctattggcaagctgatgagtgaggtatgccaatctgttgtgcagttgggcactatgcattctgaggttaatagggacagtggcagcttgcataatgaagtagttgctccttttgtgaagccaattgcttgtgaggctgctgtggacataaatgataatgtggctggtggatcatcagtgcttgattcctcagaaccttgtttgcaaaattcgcttgttgcttgggatcctgagtttgctcattgtaagcaaaaaacaacccatgataccactgatatatccaaaggggaagagcgggtaagaatacctatagtaaatgaatttggcagcgagaaatgtcctccatccttttattacgtaccaagaaatcttgtcttccaaaatgcttatgtcaacatctcgattgctcggattggtgatgaagattgttgtgctgattgttctggcaactgtttgtcatccttagttccatgtggctgtgcaagagtgacggggggcgaattcccctatacaccagagggcctgcttaagacagaattccttgatgaatgcacctcagttaatcatttcccacaagagcatcataggttctactgtacagtttgccctcttgaaagatctaagaataaagcctcacctggtccgtgtaaaggccatcttatgagaaaattcattaaagaatgctggagtaaatgtggatgtggcatgcagtgtggaaatcgtgtgattcagcgtggtataacatgcaaattgcaggtgttctttacacgcgagggcaaaggctggggagtacgcacagtagaggatctcccaaaaggttcctttgtctgtgaatatgttggagaggtactaacaagttctgaattgcacgaaagagcaattgaaaatgcaagaaatggtaaacataagcatcaagtactcctggatgctggttggggttcaggtgtattgagggatgaagatgcccttagccttgatggttcattttatgggaacgttgggcgatttatcaaccacagatgctatgatgcgaatttagttcagatccctgttgaagttgagacgcctgatcatcattattaccatctggcatttttcacgaacaagaaagtagaggcatttgaagagctaacatgggattatggcattggttttgatgatacggaagggcccagtaaaccattcagatgcatgtgtggaagtagatattgccgcgatccgaataatctgaggaggatggctagagcagctgcaaagcggaagtaggcggggaagctgaacttggttggagattagcacatcaacttttgctgtggtatttggttccgtatttgatgtgcagcagcatcacatcagttagtacttagtattagtgtagatagatggagatgagggcggatgttttggacccttgcccgtggctgagcaacacgattgcgaccttaacctacggcatattggcatgtaaattagcctgggattgagtaggcgtagaaagaacgcgtaatagtacttagttatgtcatgtcatcttggtagagggcaagttaaattacatgccatgtcgttgcatcatctatgccatgctgggttggatgcttgtgctgaatgatttgttgaagcgactagcctaggcacttgtttttggcggtatcttctaaaaaaatttcttccctatatgtcattt

SEQ ID NO: 29929 - DNA, 983 bp, Zea Mays
ccctaatcgagcgcgaaaggaacggaacggcgcagccgcggcggcggcggcggctcatgtaagctccccaccagcgaccagtggacacgtatatccatctcccctcgcacagtcgcaactcgcacgcatccgtcctcggcctcgttccgtccgccagcaatgccgctggcgctcgcgcaactgcaggacttgcgggaccgcatctccgaccgcctccgcccatggagccgctccgcgcagttctgggtccgcgccgcggacatctacaccagctacaaggtgtgccagctgcgcgcggggttcgtgaaggacgaggacgagctagagaccatgtgggagcggcagcacgagctcggcgcggagaagatgtactccctctgctccgagctcggcggtctcttcctcaaggctgctcaaattctgggaaaacctgacctggcaccgatgattcttcgcttaacaaaattggagtggagagcttcccggaggagctattttcagtgcttcgaacaatccagcttttgcgagggttgactgtgggcatgggccttacattctcgtgcgcccagcattggagaccgatagctgaggaggcgttgttaaaagctggaagacaaagcgcttcaaaatcaagaaaacagaagaggagttttctgaggagattgttttggtgaagtaggcatttagccgcatagcgaacatcaaaggacatggtatacgaacattctgtgatgaaacggaagtagccaaaagctcgagccttcgatttttagacagtacatctgtccatattcgtttaccttgggtgcgtgttattttatatatttgctcattcctttatcactatgtgttttttgggattcagtatatagttgggattgtatcggaagctgacatgtacacaagtgacatggaccaattcaaaggaaatcatcgtggtatgtgggggtttgttctgtggactttttttgtttctgatgtga

SEQ ID NO: 29930 - DNA, 6323 bp, Zea Mays
tagccttgtggtattttcatcatggataactgcagtggatggaaaaagctaggttctggtagctgtggagcaaggggagactcttgtgaaggctctagaagaagctgtacctgaagacgtgcgcggaaaacttacagcttctgtaactgaaattttacattccaaacgagaaactttcagtttaggtgcattgaatcgacttggctggaacaatgtaagaccaaccactaccaagacattggcccaggaaaagctcaaagattcagatcatgaaagcgggcttaaggataccaaaatggttgatcagaacaggatttctgcaaccgcttttgagggggatctgaaagacattaatatgacaaatgatgataaacctggagaaagcatcgaatcgtcacagggaaagccttctcaaacttctgaacctgttggaacagcgacagaaattggaactgaacagccttataaatcagataaagctaattatggaaccaatgatagcagtgaagggcagcatataacagaacaggacaatgaaatgactccaaagcaagtttctgatgatcagtcagtggccaactgtaatgggccttctaaagaaagggagcaatcagcagatgctacaacagaccagaatctacaatctaacacaacaacagaaaaggaaggtgacacaagtcgcacaggtgaagataagactgctcataatgtgaatgatcaaagcacacaagtctctaaaacagaagaatcaaaaccttcccccattactgtgacccaggcattagatgcattaactgggtttgatgactcgactcaaatggctgtcaacagtgtttttggagttcttgaaaatatgattgatcagtttgagaaacaacaggactctgagaatggtgaaagtgctgatggaaatgatggtatcacttccgtggatgagacagaatctcatgtgaaagagaatacagagaatgtgtcaagtggagaagatataaaccactcatctaaacaaccagaaggtagcagtcctggaaaaactgattcaatcatgtccaaatatgattgtgcttttggtgaggaaaatcccaatttaagcattgtttcatatggtagaggaaaaatgagatattaccgaggaaacaaagttggtgatcatgtgggtgctgatggtatcgagcgagtcagtggcttgcctgactatttattagatatagctgtcaactcttacttgaaggcgcaatatgcaatgtatcttcgtgaatttctttacacagaattgcaactcaaatcaccagagtctaattcagcaactgatcttttccttgatccacaagagggtaaatggaaaattgaagaacagatgggcaatgtgcaaaatgacaattttgaatcctcacaagagtcatctaagatggacaatgctattgagccaccctactttataccaggaaaaaatccagacatcgcatacaagtccaataaatggaataatacagtagcaaccaggtcaaaacctggtaatgatttgaacgaggcacttacacactttgttagagatgaactatcaagtgcccttaaaattgaagttggtcgcaaaatagggataacagatactaagcaacttgaaaggagtcttgcaaatgatgtagaacagattgctgctgaagtttctaaaactgttgtccttgactgtgagttgtattcagccatacatgtgcaaagaagtccaacaactatcaagtttggttcaacacatggaaaaaatgttgttgaagctgtgtcgactgcagttcagcaatctcagcatctgaggaatattcttcctgtcggtgtcatagttggtgtaactttggcatgtttgagaaattacttccatgttggtgtctctaagcatggtgaccatatgatagccactatgaagtcagatatttttggtgaggaagttattgttcaggacagcagcaaagagaatgttcaggatagtggaaaagcaaatacaaacgataataatattgaaaaaaccagtggggagaaccagcaggatatgacgaagtcacagggtcaagatatgatggtcggggctgtgacggctgccctaggtgcttctgctttggtagcacatcaacaaaataaggatgaaaattgcaaggattttgttgagatagaaggtgccaaacatgaggaaactgcacaggaaaagagccagaacagtttgatgagcagttttgctgagaaagccatgtctgtggcaggacctgtagttcccacaaagggtgatggtgaggttgatcatgaaaggtctgttaatattgctattgttgtgttcctttgtctttacttctttttctttttttttccttttttgtgtgaaaatgtttatcatgttctgactttctgcaagcaggcttgttgcagttctagctgaactcggacaaaagggtgggtttttgaggttcattggaaaaattgctctactctggggcggaattcgtggtgctatgagcttaactgataggcttatctcattcttacgtatcagtgagcggcccttatttcagaggattatgggattttctttaatggttctcatcctatggtcccctgttgtgattcctctactgccaacgcttgttcaaagttggacaataagtgcttcaacggggattatcggatatgcttgcattgttggattgtacatttctataatgatacttgtcatgctgtggggcaaaaggatacgtggctatgaggatccagttgagcaatatgggatgaatatttggtcggcgtctaggctgcgagagttttttcaaggtttggttggaggcgtaacggtcgtagggttggtgcactcgataagcattctactcggttttgcagcgtttcggacagggttctcttcatctttagctagaccccttgatcttctcaagtcttctagtaatgtgtttctgctagctcttcgagggcttgccacagcaactagcattgctgttgtggaagaaatggttttcagatcatggcttccagaggaaattgcagttgatcttggttactacaatgccattctgatatctggacttgtgttttctctaattcatcggtcactaccctcagtaccaggtttcttgctactttctctggtactttttgggcttaggcagaggacacaaggaaagcttgctgcacccattggcctacgttctggaatcatgactgccagttatttaatacaaagcagtggtgttttaacatccaaacctgaaacaccgttttggatgattagcacttaccatctgcatccttttgatggtgttatcggcttaagtatctgctccttgcttgctatctttttcttccctcaaaagcctgttcagaaggatacatctgtgtgatgaggctcagaagagtaaaacataatgctggagtgagcttccaacaaggactaatcaccatgcgtatgctgcgagcaatgaagggtttttcctaccatacatgttaaaatgcaatgccctgcaacttgctggcagcaaagagtatgtgctcggttagcttcttgctcatctgactgagggtactgctgattggaatggcttttggatctataactagagtatccaggtcatttgtacttaggcaagtgtgtatactactctatactggattatcgaaatgggggatggtttcttccctacgttgtaaggtggcggaggaacagatgatatgcctaggaagaggaactagtagatgataagagtttgcccctgatattaggcttcctctgaaatgcaggaattctagaggaatatacaggaatttcacaggaatcagtccattctcacagaaaaaatgcaggaaactgaaaaaaaatccccgcattccaaagggggcatcatctaggatttcttcataccgaattatcgattgacttcgaccacataccgtgcttttgttcatgtctttgaacacaggcacacccaaatttcgaggtagcaaattttgcccacatacactgtatataaagtagttacagtgcaagaacaatgctaactgatcaggtgatgtctcgtcctccccccggttctattattgttactgtatagctgtaattagtccaagtgtacagctgaatctactaaggtttacaaggaaaatcgccaggcagtaaaccttcaatgcttttggctaggttttcattctgaaagtcatgtcttccgcgtcagcataatcctgtattcctgtataacctctgttcggacttcgtagtgctcatctgagttctgattcggccgggcaactgtaaattctgtagtgttcgagaaaaaactgtaaattctgtaatattgccaagaattatgaatttacatgaactttacaggtataagttgcccgcctcacttcaccggctcaccgtgcttcacctgctatcttccatggcggcggctcacctcttctgctccgcaccggccgcctatcgcgccgcgaacccacggccccttgctacccgtggccgcgccaaccccgccacgggaacgtatctggtgctcaaaggggtatggtgctcatgtgcacatttcccccgggccacaccatcgagaagattcttcccctgccgcgcgtcgctcagccccgatggatcgctggccatgctcggggctcccagtcccaggatggcgccaccgatgaggaagccgtacatgcgggagcactcttgcctcatcttcccgcccccgcgcggtcgacgcccgctggcggtcatcaagttcctcggcggcgccttcatcggcgccgtccccgaggtcacctacggctacctgctggagctcctggcgctggagggctttgtggtcgtgtgcgtaccatacaacgtcaccttcgaccacgaggccgccgcgcgggaggtattccagagtttccatgcctgctacgacgcgctgctcgcgtcggggctcccggaggccggcctcagcgccctggacatcgcggagctcccgctctactctgttggccacagcaacggggcactgcttcagctgctagtgggaagctacttctcagaaaggataccagaggctaatgccattgtctcattcaacaataggccggcatcggaggctgtgccttactttgaacagatagggcccctttttaggcaactgatgcctatgatggaggcctcgcctgtttactcgatggccagaaatgcatcaggatatgcatggaaagctctatttgatttagctggaggtcttttacgtgagtatgatcaagaagctacggtatctctgagcaaatttattgatcagttaccatcagtaatgaaccaggtcaaattcactgtagatgctattgatgatacagacatagttgaagatgtcctgagaccccgcgttgattcaatcggtggacaaataaagaaggtcatactgtcaggaacacatctaactccatgtatacaggatgtcaaatggcaagttggttcagaatacactccagcagatgccattgcacaaggattgaaatcattggctcttagtgaaacaagagtcctctcaagaacaattgctgattggtttacatccctttaaattttgagttattcaatacatctgttgaagtttggagttcttcttacaaaggaatgccttcatcaggtctcaacttcccattttgttgaagcagtccactattgtaatgagatgtaaggatacaatgtattatgtatggcacataagagcagtgcatttttgggctgtgctgagctggtcatgctcacccgcaggccctagccgtactacaaatatctgatcaagattggtggtttggggccttacttggatcgtagttgcaagctataaaaagcatcgaacccaaaagtccaagcagctcgatcctgtttgaggtacggtgccagcaaggttaagttggccaaatctgttgcacgcagacagcccaatgggggtttctgcaggctggcgaaagtaaaggcgtgcgataggaaatctgggaatgttttatattgccacattgtaattccacgttataggcgtatagctcaaatacatttggacggtttggaggtatttcgttggtgtgctggcagttgtttctgtatcgtgcatgtctgttgcaagaaggcctggatgctgctgacctgagaactgattgatttcgctgacgcttacagttcttgcaagggcgtgcaagtagaacaacccgtatgcttcaggaattagtattacacgaggttaacaaatgtaataggcttgggactttctttcaacagcatcactgcagtacgtaacctctgcaacaaatgggaccac

SEQ ID NO: 29931 - DNA, 1700 bp, Zea Mays
cgtccaactcgcatccaacgcccctgccgcatcccgcgtccctcccgcactcgtctctgccgcaccgtacgcgcaggcccgcccgcccgctcccattccccacccccacctatggcggcgctctccgcgcccctccgcgccatcgccgccggatcccgcgtcgccgcgtccgaccccgtcaaggtctcgtgcgtgaggagcactggctcagctcacttcggctgcgcctccatcgatctgccctcgcgttctatgggtccggcggcgaagggaaggcaagatgtacaccgcgaggaagaagatccagaaggagaagggccttgagccctccgagttcgaggactccgttgcccaggtgagcatagcgccaacccacctcctctctcctccttttactgcgtttattttccttgaactgctgctctgtttgtttgtggttcccaatgtgtcggggttgtgatgtgctttttggcttgttgtacctgcatgctttatttgatctggagaacgggaaccaggagctcaagagcgacctcaaggacctgtacatcaacaatgctatccagatggatgttaccgggagcaggaaggctgttgtcatccacgtcccataccgcctgcgcaaggcctttaggaagatccatgtcagactcgtcagggagctggagaagaaattcagcggcaagaaaatggctctcttgatgatattttgtttacaccagctagaagatctagggctttcaagatcgcagcgatgagatgccctcttccccgaccaccagatcacagcgatggagctggatccggtcgccgctggggcatcctcctcgccagccagtcgcagatgtccctgatggcaagcttcagcaatcgtcaagtacaaagacatcctcccgtgcaaaattcaatttgcccaatcctaatctcttctatatagcctcacagatcgcagcgatggagccggatctggtcgccgctggggcatcctcctcgccgccgccttcaccggtgtcggccacgtccccgccgtggcaaatgcgagttgaacaagtggagcttatcaagagtttcagaattcgggtatgccagggtgcatgccacaagaggtgatatgctggttcagtttgtaagctcaagtacgatggaggttttggaccaatttagaattgtgaagcctgatccggcaaggaggctatggaacaagccagtttaaccatagctgtagtgcatgcaaaagatggagctggagctacttccttatattattgttatgctatataaaagatggcgttgaattacacatcagcgtgttgtctaagttctatacttatctgtgtggtgtatggttctttatgacatttccacatgatagttctttctccctctgtaaaatatattgatcgacaagtgtcattttatagttgtagctaacatcctaacaagggctcctgaacttgagttataatttacagttttgtcagttctaaatttctgaaactacaggaagtaaaaccagcgttgcaaacagggttcctggactagatatctctatctctactactctttaaggccttagtgtaggcgtccacagtataccgtggtgcacggttctgcctgaatacttcaagcatgaatagaaagtaacatatgagcaattctatatccccgcctcataaaaatgactgtgtcattgcaataca

SEQ ID NO: 29932 - DNA, 1562 bp, Zea Mays
ctggaggcttcctgcgtcgcgtggaggcagacagagctcagggagggagggaggggaagaacgaagcagcagcaacagcgccatccgctcgcttccttccccttctctccctcctcccccaccgccggcgtcgcctctacgcgcgcgcgccccgccgggggctgccgtcgctgcacccgtggcccgtgggcggcggccgcgtacctgtacctacgtgctgccgggggggggggggggggggggagctacgcgtctcctctcgccatggacgccggtgtagagaagtgcggcgacgcggcggcggagggcggcggcgacctctacgctgtcctcgggctcaagaaggagtgctccgacgccgacctcaaggtcgcttaccggaagctcgccaagtactctccgacgccaataaacggctcctctacgatgtgggagtatatgatgacgaggacgacgaggatagcatgcaggggatgggggacttcattggtgagatgacccagatgatgagccagaggcaggaaagctttgaggagctgcagcagctttttgtcgacatgttccagtctgatattgattcaggattctgcaatgggactgctaagggccatcaggttcaggggcaagccaaaagtagaacatgctcaccacggtcccctcctactactatagtaaaggaggcagaggtgtcatcatgtaatggcttcaataagcggggttcatcagcaatggactcaggaaagcctccaaggcctgttgaatgtggtgcaggtcagagccaggctggattttgttttggggtgagcgacacgccaaagccgcgaggtccgaacgccaaccggaagaggaacggccggaaacagaagctgttccccaagcactacgttacatccgaagatgatacggccggttcctagcatcagcagcacggtagcagtttgaccgttggctttggtgatgtcagcagtagggagggcacatcatgtcgcctctgccagctgctgtgatctgaagaggcgtttagctcatcatatgcctttagtcttttgagaggtctttagggttgaaaggtacttcgaaaaccgaaccagcgtctacaggcctaagagggatttccattgaaactcgtcgatgatactacagttttctttccccatctgtgccggttgtgttgtactaccactaccagtgacagtgagtgacttctaagctattcatttttttaactggagaagttgataccatgataattaaaaaaaattgggtgtgtattgaactattaccaagaaaatagtacttggattgtgatgttctgaacattatgttttgtaggcaatcgtgacttgaaagcggtcgaggtatatcttgttattttgtttccctccgatttttcaatatccgattgattttgttttgaagcaaatagagagcatgtccgtgagaatagtcatgaagcaaatagagaacatgtccgtgagaattgtcggttaatataatttttagtttttaatttgtacatgccactcttgagaaagatctctctcaagcttgtccatgtgcgt

SEQ ID NO: 29933 - DNA, 3124 bp, Zea Mays
gtatacttcctgaccaatgtcgagtcagcatgaaatggatagagtttttgggccttcgacaagcaccgaggctgtctatgatgttgcagcccgccctgttgtaaaaggtgctatggagggcataaacgggtgaccagaattgtcctggaataatcccactagccatcaaggatgtcttcagcatgatccaagatagtcctggaagagaatttttgcttcgtgtgtcgtaccttgaaatctataacgaggttataaatgatctacttgatcctactggccaaaatttgcgtgtgcgggaggatgcacagggaacctatgtagaaggaataaaagaagaagtagttctgtcaccaggacacgctctttcatttattgcagccggtgaagaacatcggcatgttggctctaacaacttcaacttatttagcagccgaagtcatactattttcacattgatgattgaaagcagcgcccgtggtgatgagtatgatggggccatgtattcacagcttaatttgattgatctagctggttctgagagctccaagacagagactacagggttaagaagaagggaagggtcatatattaataagagcctcttaactcttggaacagtcattggaaagctcagtgaagggagggcaacacatataccctatcgtgattctaagttgacccgtctactacagtcatcattgagtggccatggtcatgtctcactaatttgcacaattactccagcatcaagtaacatggaagaaacacataatacattgaagtttgcaagcagagcaaaacgtgttgaaatttacgcctctcgcaaccggataattgatgagaaatcattgatcaagaagtatcagaaagaaatatcctctctaaagcaagaactcgatcagctaaggagaggaatgattggtggtgccagccgggaagaaattttgagtttacgtcagcagttggaggcgggtcaggtcaagatgcagtctcgtctggaggaggaagaggaggcgaaagctgctctaatgagcaggatacaacgtttgaccaagttaatacttgtttccaccaaaaacaatattcctgccttgacagatgggcatcagagtcacaattctctcagtgagcaagataagttaatcacttcacaagatagttctacacttgtccaaactgagggcaccacaaaagaccccctatcatccgctttgccagactccttagatgagatcaatcagttaagatctggcaccggtgaacaatcttcagttaccggttctgcaacagattcaatgcaggtgggattcacggcatcagatcatatggatctactgattgaacaaattaagatgcttgctggggaggtcgcatttggtaccagttcactgaaaagactaatcgaacagtccatagatgatcctgaagcaacaaaggaccaaatcgagaatttagagcgtgaaatccagcaaaagaggagacatatgcgagccctggaaaaacaaatcatggaaagtggcgaggcatcagttgctaatgcatccatgatggatatgcagcagactatcacgaaactaacagcgcagtgcagtgagaaggctttcgacttagagttaaagtcagctgataatcgtgtactccaggagcagctacatcagaagaatttggaaatctacgatttacaagaaaaagttcttcgcgttgagcaacaactctcagcaaaagtggatatatcccctgagaaggaaactgattgtgcacagcaggagactattgatttgaaatctaaacttcagtccaaggaagctgaaatcgaaaagctgaaatatgagcatctgaaaatttctgaggaacattgcgatttaatcaaccagaaccataaattaagtgaggaagctgcatatgcaaaagaattggcttcttcggctgccgtcgaactcaagaatttggctgaagaagttacaaagctatctgtgctaaatgcaaagcaggcgaaggagttattagttgctcaggagatggcacattcaagggttcatggtagaaagggtcgtacagctagtaggggtagggatgaggttgggacatggagcctcgatttggaggacatgaaaatggagctacaggccagaagacagagggaggctgctttggaagctgctttggcagagaaggagcttctcgaagaagagtacaagaaaaagtttgacgaggcaaagaaaaaggaactatctctggagaatgatctagcaggcatgtgggttcttgttgctaagttgaaaagaggggctttaggcatatctgatttgaatgttgacgaccgaactgttaacctagctgatataactaacagcacaaaggagaacaaaggtggaaagaattttgctctagttgagaagcaagcatcagaagattctgtgaagtcactgagttcagaagaacatacaagtccggagtttgaaccacttcttgttcgtctgaaggctaaaattcaggagatgaaggaaaaggacattgatcccctgaccgataaagatgggaactcacatgtctgcaaagtttgtttcgaatctgcagccgctgcagtattgcttccttgccggcatttctgcttgtgcaagccttgctcgcttgcctgctcggagtgccctctgtgccgcacaagaatcgcagacaggataatcaccttcacgtgagctgcgttctagcttcaggtcattctgaagcacacatcctcttgtaaaatcttcaatggtatatgtttctctttttccttagcaaagaaggtgccttttatgttccttctgtgttgtatcgccattctttgggttccccttcccctatagcttcacgccttcaccttacgttctttgttgtatcgaggagttacaaatgatgacttctcgctctgcaaatatgtatagatacgcaactcgacgctgtaacacattttgattctctactcctgaagaaaagcagcgaacgacatgatgacgtgtgtatactgtgctcctagtcgtccctgttagcatggaaggctatattctataattgctgagctacgcccctataattatagatgatggccttcacttttattatcatggttgattagttgcctaca

SEQ ID NO: 29934 - DNA, 274 bp, Zea Mays
tgaactacaagttatagtgtccaaaaataagccacaattcattgaacctgctttcagttctctgaattcatcttccattgctccattcctttcccctctgttcaatgccttttatctcataaactcacatgacaagagacccacttacttaaccaaatctattccctaagtattgctcttccactttggcataacactccaagctgaaaatacacattgcaaattcagtttttaggcagctgaatgaaattcagtctctgcaactgaaagtcca

SEQ ID NO: 29935 - DNA, 1318 bp, Zea Mays
gccacggcccaatcgccggctgacactcacaagaacctgcctccctcggtctggatcgctatctcttttctagcggctccagagggagggaaagctagcgcacagccgagagaagaaagcagagagggagggagaacaaagagagagagaaaaaaaaaaccagagaggttgagcaagaaccgaggcggatccgccttttgtccctcctgcccgagggctagcctgccgccgcccccgcgagagatcgagaggaggcgctgttcagttcaggctgttcctcttaggcctgaagaaatacggcaagggggactggaggaacatatcgcgcaactacgtccagacgcggacgcccacgcaggtggccagccacgcgcagaagtacttcatcaggctcaactccggcggcaaggacaagaggaggtccagcatccacgacatcaccacggtgaacctgacggacgacgagcgggcgccctcgccgtcgcggtcctctctgatcaccaccaccagccagccaaacgcgccggctccggccgcagcggtgataggcgggcccttctcgtcggcggcggcggccgaggccaagcagcaccagcacggcgctgggaacctgccaccgaaccggacctccgtggtgccggctgtttacaggatggacgattcgcaggaccacggcctgcagtgtggccctctgcgtcatcaactggtcgccagccaccacagcgttctgttttaggcgcaagcgcaatcccactttgaggcgcgccatggtcatggatccatccatcaggtgttgtctagtgtgtgtgtgtacgatgcgtgtgttctttgctgtagcttcagcgcctgtatcgaagtgattagccttttggggagggggggcgtaacggaaaggggatcttcggttccacggtggtccaggtccacaatttgttgttggtgatgccgagaacgtaacaaaaaaaaggacgccaagaattctgagtggacttggcattcaatcatggaccctgcttttgctcgccgtggcccgggatgatcagcagaacctaattctggatccttcttggtcggctgatgtatcccttgagtgaccttggtgaccatctcatcctgctgctgtctctgaagacggcgacgcgcttgtattggagggtttcagagttcagatcacattgctgtagtgtagtctagacatgtttacccatagtacgtaatcagtttttttttttggcactggcggctgccgaaatctgtgtctggacaggcttcatttctctcggatgaagagaagataaaaaacgaaatcgagtttgcg

SEQ ID NO: 29936 - DNA, 4121 bp, Zea Mays
ccgctcacgagcactgaaaaactgccaaaaccgagcgaaccacacaccccttgtcaacgctgtggcggcacggcaggcgatccaaggaaagcgatgacggcgtacgaccccaaagacgacgtcgaccgcctcttcgcctgcttcaaatgcggcgtctcccctcccaagtcggccttcagggagaggccgctcccgcaggccaagaagtcgcggggctcgcccgtgtcggagactgccggtagcggtggccggagctcctccgatgtttccaccacgccggatgccgcagcggacaagcgcgcggcgccgtcgtcggccaaatctacaggccgcaagcacatgtccccattcgtgttctacggctccccgcggggcgtccaagtcaaaaggccgcagagcttcctgaggctgctgcacgtgatccgcattgatctcaagaagcaaaccgacttcaaccccagggatgttgtctgggctacatttcctaggcaagacgaggcgatcaggttctctaaggcatacgcacataccaatgtcttttgctatcaagagcatatgtccggtacgcgaaggttccttgtgtctacatacgacgagttctggaaaaggtacaacgatatggattccaaaattcgccatcattatgaggttatccaggagttttcacgccatctaatcattcgtatacccaagattgcatttaaagacaactcccatgttggtgcgtttgtctgtgaggtctgttcacaaattgcagctcagcgtacaaccaatcatgaccttgataaactttatattacaaaagaaatcagctcaggtcctgttgatcggctctttatggatactgcagtttactctcgtaatcgttgtttccgtttagttttctcatcaaagtctgggaagaaatcatttcttgtgccgaccaaacgtttcaaatgccaggaactgaatgataaagatgtctttatggagtcacttatttgtagactggatgataactgtgaaaaactgttgatatgcaaactagacttggaatgcaagaaaacattgcattttgactctgaaatcagcatgtctcaagtaagtgtttgaaatttggaccacaagcattacatttttcctgctagtgtacttttcttaaaattactgaaacttagtacatttccttgctttcatactccattccttttctacaaggtgtattagcatgtggaaaaattgaaacgtgttttgccattgatctattacaatatgtcatgagtagctacgaaatcaatgtcacatcaaaagatttctgaaatatggactcattgatatatttttcatacattgaacatgcaaatgttactatattttttgaagtttgacttcaaatcctaatacgtccaataaaaggaaacagagggagtatttcaaatcattctgcagtggcaatcaattattgatatttaggaagtatcggcagtttttttcgaaggaaaatggcatgagctatgcttttttcaattaagagaggaaggagatttaacatagtttttaaatacacaagtgcagcacttcaaaaacagtacacaatcttttatattgtagttaaccacagattatagatctttaaattgaagtgcaacattaatttcttttcataatcttttatacctcagtagccttggcttggacatgtaagctgcatgcattgtgagcatggtggtctgaaagccctgagatgtttgtgttggtactcataagttgcgttcagtagatggagcatttatgtccaactgaatacaaatcacctaaacctcaaaactaactcatggaggagctcactttcgcttggaaatgtgtggccccttttatgctggcttgccatctgattctgcctcttcactaccaatcacctgaattcattgtgcaaggaaccatgaatcctttgctgcttgaacttgtcgctctcttggtttgtgcggaaagtataaactgatggcaataatcttgaacactatgctgaaaacttgtgtagccaagtttgggagcttgaaaaaaatgtgcttgtgcctaaatgtcgttatgcagtaagtgtttttattgtccttgagaggtactgagagggtgcttgtctgcctttctctccttaagaaaatcaatttaaatttagtataggctgattttgtgtatatatttttattttgccatgtccagattcaaggaaggagctacaggcaccgcattgctacatatcaaaatgatttttctcatgcatatacttgtggaaaatctccttttccacctttggatggttttatagaatccatcgcttcttttggaaatgtttcagtcatgtcttgtccaggggttgtagaacgatagccgcaccgaccctagcctctatcgctagggccaccacgggtagagccatcgcccctgtggccgcccttacggggttggcgatcgtcgtcagagctgggagcctgaagaggaactccaggattgggggcggtaggagggcgcgtatgaactcttgtcgatagagggtgcgccgtagtggacgcggggactcatcgtccatggtaagctcctcgaggaacaactcgttgcggatgtcgtggaaggaggggaacaggacggttcgcttgatgagcgccttcagatggtcataccgccgcctaagagcacacagaaggttgaggacgagggtgtggccagacacggtctcgccgaggttgtggagggagttcgccacacccttcatccgacgacggtactcgccgggagacaacatcaacaaggacgtggtcgtcgaggacatagctagattctatgttagaatgggagaaactttcactctaatcagggttgggaatatattaatagctgagttatgtgggccaagatccattacaatagggtattacacattaacaggatgtaaaagaatcaggcagggaagctgccgactatattaaaaagaaaaaaagaaaccacaatagagtgatcccagaagagccacacaacaacaaaaggcaacaaagatggtagcaactgaaatgtgataatctgttgtattgcagggaaaattcgatcttggttctggttttcacaggagagtttgataatctacaacatgttacgaagcagatactgtgagaatattggaagagagcataagggcaatcatggtaacaataacattttaacatctagaacaacaacatataacttttctgcagcatcagctgtctcaaatacccagatattttccttagtatactatcactaattatgtcacgaaatgtaccagtgttttacattgttgatttccagagagcagcatactaccaaaagtgtcatgaccctgattgtcgaggtaagcgagggccatctttgcagcgcaggcagattatccttagtcatgacatgaatgttttggagtaggttaccgttctcccctgcgtcctgtaccttgggatgtgattcctgagctagtggagtcagaccagatagaataccagggccatgccatggaaaccaacattgaaaacagcagcatgagcggtaaatcaatcacgggggctggtgctgaggatcctgaatggtgggaacaagtggtggaatttgcggacagcatcgagaacatggatcattctttggctaccttggtttgtagtccttgttgcttctgccgctcttaaactgttgaattgtgctagcatactgatccatttatgcacaggaagtgaaatctgacgccagcatcgagaacatggatcatgctcccagcttgtgtgcctcggaagaaaacggttgttttgaagctgaccctgagtgggtgatgcacgcggaaagagccatggagcagtacgaggaacaaagcggaggatcgcagtcacacgcaacttcccaagtctttgatctcgaggatgtttaacagtagatgctgttctaaacaatttgaacagtgacttgtaaatatacgttttatgatatattttaatctaaaaatatgtagataaataataaaaatggatattatgaatgaagcagtgagaacataatctgtatacgtgttcatgttttaacatcgtgttaacataaacaatataaaacaagaagttttaggaagt

SEQ ID NO: 29937 - DNA, 2562 bp, Zea Mays
tagagaattcattgtttgttcgttggacctactatcaggacttgcagaaggtcttggcgctggtattgaaagtcttgtaagttcttgtctttgcatatggtatcattttcctttccaagtacattttagacatgatcacacaaacacaccactcacatacccacatgggtgcgtcaggggtggagttcaattatttaatcactgggttcaatcatactatcatattggggccatgctgaatatgtacttagaggaagaatttgctattgttaaaggggaactatagtgtattaaacaaaagtcatcagggccagctggctctgatggaagcacgtagctccgcccctggggtgtatcctagcacacatctaaactagggaggcctactcacagaatgtatcacatgcgatgatgtgagccttaagatctgagtgggttaaatcctaaacaactgactacacttggttctctttcggtagtatctgatgtttttgctgtatacgcatgaatctcttattccatttgaacttgttaatgtgagacaatacactgattgttccaatatctactgtattgtttacagaaactatcagttctgttacatggggctgtaccatgggtgccgagtagattgtccagctggtaattttgctggtagctgagtttaggcatttttaaacaagttccaattttgtctgtatagcatgtagcctggatgaatgttaggtgcgactcctcaggcttgagatctcacttctcactggaatacctggatatgtttttcttttccaatagaaagagttagttccacttgttatgttggttttaccaatgactgtcatatagcgaagtctgagtttattgaaactaagtgctgatgctcggccatgatactgtgcagtaataaaattgaattaaatccttccatctctcacccctctccaacctgtctatccgtccttcgacccaccatctttcactattacctttctagcattgagtttgggcttgcaaaaccttcgccgcaccattcatgtcatggcctggctgcctgagaccgtgtgcattgtggcacacctatggacatgtggttcgacttccacctttcttaaactcggagcaggtgcacacaatagccacccatttgagttgagcgctgaacctctctatggccagtatagtggccatgtgcaattctgctcaggtgaacagtgcgcgtgcattcctgttcacaacgggctcaaggtgggtatgttgcccgtttgttggttagagattagaccagattgcgctgttttctatttccttaatccaagagagctttattcaaggtcaagtctttccatgtcactaagcaaggaatagattgaagtttctagttacctccctgccctttgtggggtatagtcacactattgtggatttgtggtttagagccaaataaagtatggctgtgacatctgcactttcttgaagggcaattactctgaagaattttcctttgtttgctgattatacttaaaattttagtaccaaatatgcataagttcgataggtatcttttctttgttgtaggttgcacagagcaatttgagagatctacttttgcaatgctgcatggatgaagcagctgatgttcgacaaagtgcccttgcacttcttggagacctttctagggtttgcccaatacatttgcatccacgccttcaagaatttcttactgttgcagcgaagcaactggatgcggtatcagtagctaacaatgcttgttgggctattggagaattagcaatcaagattggcaaagaaatagcgcctgtggtgatcaccgttgtttcgtgcttggttcccattctaaaatccccagagggttcgaacaagtcacttgttgaaaacagcgcgatcactcttgggaggcttagctgggtgtgtccagacatcgtggcccctcatatggagcatttcatgcaagcatggtgcaaggcgttgtgcatgatcagagatgattttgagaaagaggactcgtttcatggattgtgtgcaatggtggcagcaaaccctacaggaggcgccggttcattagcttacatctgccaggcctgtgcgagttggactgagataaaaagtgaaggtcttcacaatgaggtgtgccagattctgaatggctacaagcagctgcttggaaacggtgggtgggaacaatgcatggccaccctgcaaccggatgttgtgcagaaattagctagatacggagtatgatggcagtggtcgtgtggtttcatcatctttttacgctggagacagagatcaggatggttggttgggtcacttgctcgtccctcccgcctcccagtcccaggcaaggcgacattgatgaaagaaaggtttttgtagcgtgtaattcttttcttcctcttcctcttagcagatgcaattatccagtcctttgtgcaaacaagggcttccaccatctcaggatcaaggcgacttcgatatggatcgacaacacgaccaccggcactaaaagccgattcagatgcaacactcgaaacttgcatggcc

SEQ ID NO: 29938 - DNA, 2145 bp, Zea Mays
gctgtacaactctatttataaaggccaggccaggccagggaggcagagacgaataagccaggcaaaggacgcgcgcgcacgaacggctcgctctctctccgacacccagatccctcccgtttcaggaaacgcgaagattccgccgtccaaccccgagccgctccgctccgtcgattcgggcatggcgccgaaggagagccagcagcagcagagtccggccgaggtggcggcgccggccgcgcggagcatcccggacgaggcgcggcggctgctgcacgagctggccgcggcgtgggaggacgtggccgggtgcgggtcgcgcgagcccgaggtggtgccgctcaagggcgccatgaccaacgaggtgtaccgggcgcggtgggccaccggcagcggggactcgtcggcgccggggcagagtgacgcgcggacggttctggtgcgggtctacggggagggcgtcgacctgttcttcgacagggaggacgaggtgcgcacgttcgagttcatgtcgcggcatggccacggcccccgcctcctcggccgcttccccaacggccgcgtcgaggagttcatccatgccaggacactttcagctcctgacctacgtgatccggggatttcagccatcatagcctccaaactgagggaatttcacagcctcgacatgcctggttcaaaatccgtgctcatctgggaaagattaagttgcatcgtttccgctaggaactggctcagaactgccaagagcctgtactcctcctctgatgaaaccgaagagttctgcttggatagcatggaggaggagatcgctgcgctggagaacgagttctcaggggagtgcgagcgcgtaggattttgccataacgatctccagtatgggaacatcatgatcgacgaagagacgaggctactgaccatcattgactacgagtatgcaggttttaacccagttgcttatgacatcgcaaaccatttctgtgaaatggccgcagactaccattcagaaaagcctcacatattggactacagcaaatatccagataccgatgagcggaagcaatttgtgcggacatacctgagctcctcaggtgaggaatctgaagaggaggtagagaacctgatcaaaagcattgagaagtacaccctcgccagccacctagtttggggcctatggggaataatttcggatcatgtcaacgatatcgacttcgactataaggattacgctaggcagaggttcgagcagtactggctgaagaagccgaccatccttgcttctcagactgctgaatagaacccacccatcaggttctgcactccaccgatgtgctgcacatagcttgtccattcttctctgctcattgagacttgaggtctgtgtccctggggaacaaggctgtgaagaaaaggctggacccagaagtcagctcaggcattcaggtagatcacaggcctgttaatagtgtgaggcgacatactgttgataaaaaaaccctgactgcatgttgtatgatggtatggtcacttggtgtgtgcgtgcgcgtgagtgtgcgtgcttggtttactggctagattagtgctgcatctgcctctgtgcgcgcttcagtgtatgcaaaacatacgtattggaaatcagataaagattcctgcaggttctgtacctctgtatttggtgcatgtcgttctttaatcctgagagaatggcagaatcagtgatgccggttacatcactaataaacggctcattctccttattaccattccccttgaaaagatagtggtgttaaccatgctgagttctgcctcggatccttgtctagggttaatcattctgcaagggttggcaccccactgcctatcatcacatgaatgtcaaatgtcacgattttagttggtcactgaaaattgcatgaattatggtcttctgcgtgcaaaccctttttctgcaatattgctagatgatgttactatcaacaatgctacacatggtatttctgtatccactttatccatttcatgcctccatataggcgcaccatgtcaaaatctgcggcacttccatttaatgccaaatcatccaaaaatcactattcatccccaacaagaaaagcttgtagcttgttgccgctctgcacccagcta

SEQ ID NO: 29939 - DNA, 613 bp, Zea Mays
acaacgacgctagggtttcactcgcagccgccgacgccaaaagcccgctcttctgccccaagccgcgacgccccacgacgccgctgcggtgccaccagagcggtggcttctccgacgctgaaatttcatggagaatctgtacaaaagagtggctagctactacacgagagtctggtctgagagaagcaacacgaggtcagtcagtggatgaacttagagagagacattcacacgctgagagggttgataatttgtgatattttcctcctttttttcttcttcctgattttgtatattgtatatcctgctggattaacaaatactagcaaccacttatagtcagtcaacataggccatctactgccagtacctcttttcttctcatgagttgtagcagtttctgtttaattcatatgattgtaattacaatcatattttaagttactactatagtttctgtttaattacaatcatagtttctgtttaattaaaattcatatgattgtaattacaatcatagtttctgtttttgttatccatattttaagttgctactatagttcatatgattgtaaaatgattgtaattagttcaattcaatgagaaaaaaata

SEQ ID NO: 29940 - DNA, 2356 bp, Zea Mays
caaccggcggttcgacgagctagagattcgctgggaccggcgcttctcgtccgccgcgtacatcgacctcccgcccacctcgctcagcatcaaccactcctccgacgagtctgccagtgcgccgcccaccccggtcgcggtcatcgcagacaattggggcgggtgctttgacgacggcgagcagtaccgcactaggccatccgccgtcgtcgacaactggggcggattcttctatggcgaggacgtcgctccgtcagacaaccccacgagattcgtcctccccgttgcctccaccgacgagcccagcatcgacaccgcgccggcccgcgccaactctggagccgcggatgactccgtgtttgtgaccgccgaatcctccggctacgaggaaccctccggctacgacgagatggatgctcgactcgacctgcgcttcgccaggctgcagcagctgcaagctgaggaggtggacgagccgtaccgtgacgcggtgagcccactgcctcctctacccgtcgtctacgagccgtaccgcgaggcaagccatccgcctcccgtccacgacgacgttgcgggggtggtgtccacgggctcggatgatgacctcgacctgcagcagatcgccaaggagccgtccgtgtcgtcgccgccgcgtcacagctcgagagacgccgtccgaggtccttgccctcgtccactgcatcaccagctaactattcccatcgcggccaacctggaccaaatctgccgcctatccaggccctgcgatgtggccgaccggggtctcctctgtgacctgctctggtccgacccttcttccatggaggacagagagtgggcggacaacaaggatcgatacgtgtcctgcaccttccgcgccgacgtcgcgacggactgccgccgcgcgcaggacctggacatcgtttgcagagcgcaccaggtggtggaggacgaatatgagttctctgtcgaccgacagctcgtcaccttcttctctgcccccaactaccgcaagctcggctgctccttcaccatcatcaagctgaaggcggacagaaacagcagctcgcccctcgggtgttcgaccaaatgtcccagccaggcactgcaccccattgtcaagcccaatctagtagtcgtgctgaatattgcaggtgctgggggcaagttatgtggaggatttaatatcaaagttttcacaagggttcatcagactggggatgtatcgcttatgtcaaacgtatccattgagcttgtgtcaaacatgatggaacagggcaaacaaccttctgttgcagccattccaggtcttgcattgggtggtggcctagagttgactatgagttgtcaggctcaaatacctactcatgttgctcacaccatctgctcgcttgttaacaacgttatggcatcgcaggctcatgtcgtcggacaagggatcgtagaccgcgccgcgttcagtggcgatcaccaatggatcgtccaaggtactgccaatggtcacgggctctcctccaaggttgctgctgaggtgaacaatcagtttagagttggtattcagactactgcgattattcatgtgctgccaaggggtgtcctacagtttggctctactggtttggctttgggaaacaaaaaaattgtgatgtttgcaaagaagttgtgttctcagctaaacaatcgttcaagcctagctgcatctgcttcggctaaaaacacttcaagacagcatggccagtcacttattgataatgcaattgtgtcaaccagtacaccaccaaatgtattgttgattgcatctttgctttgggctgcacaacagaatggtcaccctgagctcattggaaaaacaccaatagtgaggccatcattagatgttgagagacacattcttctgaaaggagcttttgataaagctgaggaaatagtcttgagaatgaagcaatgggatggtactgcgggacttgtttggcagaaggatagcttaatggtgcccaagtggcttactgacagattgatggcatttctaatattctatagtgaggccattacagctcttctctgttgtgcactcattcctggcctgttattgctagaattagtcaagttcacagagacttggcaagggactgtttgctgggagccaacaatcctattgatgatgcggagacacctttacaaacagaatgagttgtatgcgacactttttgagggagctatgattgggtacactccaggaggaatgcaatttgctcaagaaactatagagacgatgatttcaagcaatctcttcttgactgccgagatggccaatactctatctccatggccatggttcaattgcgttcaagtgtgc

SEQ ID NO: 29941 - DNA, 1848 bp, Zea Mays
cgaatggcgagtggcgtgaccgcggtccgcggcccactataaactcaaccacctccggagtccggacctcccccgttggccttctccttccccttcgccctgcctccctctctcagtctctctccggcctccctcgcccacagagacagagcggaagccgccgagctcggagcccagcactttgcacgccgccgccggccatgtcggtggatacggagcggagctccaccgagtcgtccgcggcctccgggctcggctacgaggacaccgcgctcgccctcaccctccgcctcccgggctccgaccccggccgttcctccccgctcgccgcgccctccgacgccgcgccgtctcccaagacgcgggtggtggggtggccgccggtgaggtcgtaccgcaagaacgcgctcgccgactccagcaaggccaaccggtcagccagtttcgtgaaggtggccgtcgacggcgcggcctacctgcggaaggtggacctccaggcgtacggcggctacgaccagctcctccgcgcgctccaggacaagttcttctcccacttcaccatcaggaagttcgccgacgacgagaggaagctggtggacgcggtgaacgggacggagtacgtgcccacgtacgaggacaaggatggcgactggatgctcgtcggcgacgtcccctggaagtgagctccttcgctctgtctcttttactttccctgatctaattagctggttatctacgcagtttggctgtgctgagtagatttgcaaaaaaaaaaaacatgactgagttgattgagacttaaaagaggtgctgttggagtgttggtgttgccggataggaaggattgttaggaagccccctttccccattggattatgacaccctccctttgctgctcccttactccacttgttagcgcactgccgtcattactgcgacaatgcagtcacactgatcaaattgaactccgtttgatgcttctcgcaccgaatgtctcgctgctgctgctactggttcttctagctttttaacgtatccatgtacagaatcccttggtttgaaaagaattggctttggataagggctgtcttcctagctctattccccacttatagataggttgatccttctagaaaaatattctgtctcgatcaatgagacgagccgggcctgtccgagtttattttcatttataattttcttccttggtcatactgtgttttttttttgttttttgcaggatgttcgtggagacctgccggcgccttcgcctgatgaaaggttcagaggccgttaacttggcaccaagagccgcccgatgaggcgcaagcgcaactccagcgtcaccagtacgcactggcttttagtggcttggcttgttggaggaacgagggaacgtacttcgtcgctgttttgaggatcttcacttgacatatatatagcaatgtgtacagctgtcacctgctgcttttgcctgaggaaagtttgtagttccattactttacttatctgtagtgtctatctatctatctatagatccgaagctttgatatacacatggcggctacaatgtatttttgatgaataagaccagaccagagtaccagacacaccgaaccgaacccgttcttccgcagctccacgcgcggttggcattttgagggttatgtggtggtgttttgcaatttgcagtaggcgtgaaggctgatgtcgtagctgccaattatttatacatcttgatctgtgttgagctatggttttttgtttaatcgatcttggtttaaatcgcgacatgcatgtcaaacgaaagaggtcctccttttctgctgatacggtgggatcggcgac

SEQ ID NO: 29942 - DNA, 2630 bp, Zea Mays
cagaacactacgagactacctccttctctccaagtcgttgtcttcttcggttcttcctagcgtctccccgttcttctctccgtagtagctaacagtatagtgtggcctcgcatggagactttccctcctcgctggccccgcatctggcccggattaaccgccttgggctccctccccagattgccccacccaccgtcagcctcgtcaggtatgtctcgtgttccctaaccttgacgcttctcccttctcggcgcctgcttcgttggttgccttcagcggacgccgccgattcggctctcctgttcggcgccctccccagattgccccacccaccgtcagcctcgtcaggtatgtctagtgttccctaaccttgacgcttctcccttctcggcgcctgcttcgttggttgccttcagcggacgccgccgattcggctctcctgttcggcgccgtgtcttgcgacagacaatgctacattctggagtacatggattagatgggtgttgtgcactgcttttatatggatctaatgattgtggccttgaacgttctcgccaggcatatctcatgtttttacatggattagataagtacatgaatctttatttaggcctgtttggttactttagtctagggactaaagtttagtactccatatccagcttgatttgagggactaaaagtatccataacgcattaaatgactcgtaagaaaccaaaatgcctctcatcattctctggcattagagcatctgaaataaatgagagccaaaagtggaattaatatggtttagtcccttttatcacccctttaagggactagagactaaagcagtttaatccttgttttagtcctactatttggcaatttatagactaaatgagactaaaatggagggactaatctttagtccttggaaccaaacaggcccttaacccgaaggtaattgagattgcgaagaagatgaaagaggagagggtcaagttgtttacttcagaatattttgcttacagatgatacgactagatcaaatcagttgcattggtcctcccaggacaaaccatgctccggagacagaggcggcagagctggggcaggagcagagccatcacagaaattcttgtctccaggtatgttgaagtttcaacaacttggtttataaattaacatgattttaaaaaatcacagtgactcctcttgcagattttgtaaaatgtttttttctctactgcactgcctatcatttgctgcaatttgaggattataacattctagacacactaaaatctatcatctatcataaacagtagctatttccccctctgttctttgtgtctctgattgtgtggtaccagctactttggcatacatttgttttttgctttaatcttctgttcagcttctaattcagaaatctttacttcagataaccagaatacttcagcttccatagttccacttacacagttgtaacaatctagcctgtaatggcttgtaacagtacagtgagttgggagttgggacacctctgatgtttagagctccaatggtcctgtgggagggatatatttttgttttcatattgtttagccatggggtgccagggtctacgttctaccttggtttggttctctccttttctcctatctgtcaacacatagtcgtctattacttataaaaaaccacattttcccattttgatccctttatgaacaatgctggaaatcaaattctattcattttggaaaataattacatatttattcgtcgtagctatattccattgttttattaggtgctcaaaaattgtgttgaccggacacatgctattttggcctatgtgctatccattgctatgttttatcggtagggttttccatgcttagataacttcctaatttctcattttttgtaaataaataaatacttggagattcttggtcaaaggaatgttggacacctgctagccaatgtgcaggtaacaggaacctgaacaaaatggccttgcagtcttttttttttgactgtgtatatctttttcatgtggagtccattaaaaatccatgcataagcagccgcgagaggtctcagacagataagatggtcgacggcatggacttcgaggagctctgcagcgacttcgaatgcataagcagcccctacgtggagtccataatgaggcaggtcgcgcgggacatctttgagcttcgcgaggataaccgcgcattcagctgctacgccgtccccgtgaagtatgaggctccttcctgatgataatttataatgataaatcgaggaaactccaataagtttccttcctttttttcctttcgtttttctcccttctctgatttttcagtgtggagggactggacttccgacaaaggaaatcacaacattgtatatgattgacttgtaatatgttagtaaatatgtctgtacgttatgacaagagatataacttgttttagggctagtttggtaacttcatttttttcaaggaattttttcatttttccgagggaaattagttcattttttacaggaaaaatgtaaatcccttgagaaaaatgagttgccaaactagctcttatctagataatttgtagctcaaaattttacatccaac

SEQ ID NO: 29943 - DNA, 3416 bp, Zea Mays
tcagagttacaaaatttcgacagcgacgactttctccaaccgcctccggtcgtctccttgccagcgattgagccgacgtccagctcagggaggaacggagaggcgcgggagctattggccgttgaatccgaaacagacgagacggatgaagtgactgcaggggcaaatggggctgactgcagacgatttccgcttcgggaaatcctcctcccatgtcccgtttcctatccccttcttcgccaagcaatcctctccccctttcagaaaaaaaagtaatcctctccggagtccaagctccgaccagatccggacccccccccccccctccgaacaagctcgggcatgcccagcagctgatgaggtcgctccgcggggtcctcatcccgctcgtcctcctcgcggggctcgccttccgcgtggacgacggcggcgccgcgctcctcccgctcccgccacccgcgcttcccgcttccccgtcccgcctcgcgctccccggaggcactccgaaggatgatggggcggcggcttcgcgctccacggaggtcgtcacggcgggggtgcgctccaccgagatcgtcgccccagtggggcccaagaagcagagcctccgggagctccttgtccggccgcagcctgcacgtcacgagccgtctagcttggttagcggcgaggcgaaagccgaaaccagatctgtgctccagttttacgacaatggcacgattcagcttgtggacaagctgtctcaatctcctctgtgggagattgccacagggcctccactctcagaccatattactaccactgagtctggtccgaattacctcatttatcctttcaatgggaacgagaacatgaatgggaatagtactgaactttgggaggtttataatgggaacagcgtgaggctcccatggaaattggaggaattcgttgccaggagcccatatattcgggattctgttgttactatcggatcaaaagtttcaactgtttttgtagttgatgctgatagtggtgagattatttacaggcatagtatcccatctgcgttaaaggaattggaaggaccaggggttgaaggagcaccatccaagctaaatgtccgtactagtgatgacagtgataatatcatagtgcttgtgagaactgactattctctcagtgcatcagaccttggcaatcatttatttaactggacaagaacttctttcactgcaaactactatgtgaaatacaagcaccctgacatgcttgatcagtcatcttgcctgcaaggagacattccatgcattagaactgagggtttgccacttgctttacctgatttaaattcagctaatgtaattgtcttgaaagatggtaccccttttgtttctatgcatggttctgatgctttggaaccagttcaaaccccaaggaagctaccaaacactgctgggaagtcaaatatcctattggatgattctcaaaatcaaactcatgatgttgctcgatctcatgccatctctgccgatcctgaagctaccctaaaccccactaggaacacttctggatggctattccctttgtttcccatatttttggtcactggttatctgttgagcttgatatctgcaagcaagtcatgcaggcagtttatgattcaacttattgagccattcacgcacaacaagaaaacggtggacattagaggcaggtcggagggaactcccaaaaaaagaaaaacacggaagaaggatggacttgtcaatagctctgagaccttgacagcatctgacaaggagtgcagtgatactggtgggtcaactgaggcaccaatgaaaaattctgcgctaacagatgcccttggtggtcgtcagattggtaaggtatatgtctccaataaagaaattggcagagggagcaatggcacaattgtttttgaaggatcttatgatggtcgtcaagttgccgtgaaacgtctgctgcgttcccacaatgacatagccgaaaaggagactcgaaatcttattatatcggatcatgatcctaatattgttagactctacggttgtgaccatgacagtgattttgtttatatctcccttgagaggtgccactgcagcttggctgacctaatccaaaaacagtcatatttgtcttctggagagtctatttctaacaatgaggtcagtatgagcatcaactcaaagatttcaaatgttaagggaatagacgtggagttgtggacgcaggatgggcttccttcagcacaactcctgaagctgatgagagatgtggttgctggccttgtgcatttgcataacttgggaattattcatcgtgatttgaagcctcagaatgtcttaataagcgcagaaggacctattagagcaaagctttctgatatgggtatcagtaagcacctgcaagatgacatgacttctgttagccatcatggtacaggaattggaagctctggctggcaagcacccgaacagcttcgtcatggtcgtcaaactcgtgcaatggatctttttagtttgggctgccttattttctattgtatcactaaaggcaagcatccgtttggtgaatactatgaacgggatacaaacattgtaaacaatcgctttgatctctttgtggtggactacataccagaagcagtacatcttatatctcaactgttacaaccaaacccagagacaagaccaacggcagtatacgtcatgcatcatcctctcttctggagccctgaattgcgcctttcgtttctaagggataccagtgacagaattgagaaaaccagtgaaacggacctcataaacgcactggaaagcataggaccagtggcgtttggtgggaaatggggagagaaactggatgctgctttagttacagacatgggtcgttatagaaaatataactttgagtctactcgtgatcttctgaggtatatcagaaataaatcgggtcattacagagaactttcaaatgatctcaagggcatacttgggtcattgccagagggatttgatcactattttgctagccgatttccaaagttgctaattgaggtgtacaaggtcttgtgggtgcactgcaaggacgaagaagctttcagtaaacatttcaatggaagctccttatagctggagaggattgccttttcctactgtaaatactaaccctgatgtagaagttgtatgtacatttgatatgtataccatattacccgttttatagaataaagagagctcagtctgtacattatgtagcatattactgtgttgcctataaatccaagctttactgttgaatggtgaacaatggtaacacaatctgctggatggaaaccagtggtatgtataatacccactttgtaagaaaagtctaaaaagaaaaattatattactttgtatctgtatgtgtta

SEQ ID NO: 29944 - DNA, 1616 bp, Zea Mays
atctcgggcgctactgatggaatatggatgggcaggcgaaagagcaggaggagcagaagaagcgcggtttgctgacgtctccatcccatcatgtattatcctcagcctaccgtctccttggcggcggcggttgccctcctccgcccctcactccgccgccactctcaaagggcgtcatcccttctccgctcctccacgccgcctccatgggttagtgcgaggaggaggacggccgtctccgacgacttcttcaccgtcgagttggacgctactggagtggaaccggaaccggattccatcgacgacgggctcccctctccatgggagggagctgtcgtctaccgccgcgacgctgccgtccagcacctcgagtacgccagcacgctggagcgcctcggcctaggggacctctcctcccccgactcccgcgcgcgcgccgctgacctgggcctggctggagggaccctggacagcactggcgcgcagcctcggacccccgtgctcgtctccgtcgacgtgaccaggcgccgcggccgcctgcgcctggacggcatcgtgcgcaccgtcatcaccctcggctgcttcaggctgtctttcaggtgtgctgagccagctcctcaaggtatatttgccaatttctccctgctgttgacagaagacccagtagaggaggaaccagacctcggcacgatttttcaagaggacgacgacaaaggtggtgcttcgctagcctgcgccatggatggagatcaagatatcgactgggatgaccggctgcatttcccagcagctgacaaggaaatcgatatatccaagcacatccgggacatgattcatctggagatcaccttggatgcagtgtgcaaccccaactgcaagggtctatgccttacctgcggcgcaaacctcaacaccaccagcagctgcacatgcaagcccaggaacgtccaaggactttctcctctcaaaggggttttcaagtgatgatgcggataccaaagtttgtacaaccagcccaacttcatgtcatgctgtgagcctgtgacttctagattcatataatcgcaaatatgcattgaaacttcacatttatagattcacatccgcagatgacaaaataccaaatcgacttcatatatcttatgttcttcattgtaacaaaccaccaaagatgaaaaatcttaacaaccattttataaatattatcactcatcaatgttagattattctgtgtttctgatgtaatggccttgtgaaagggcctctagccgagttggttaggtggtctgagtagcactccttgggtcctcaggctgtggttaaaaaaaaaatccccttttctatgccacgccaaaacacaggtctaagtctcagccctcatcacggtcgttctcacatgggcttcgatgccgatgtgtatgtgtgggacatgggtttggaggttttctcgacctgtgtgagaatatcttcttaatacaaaactcgagggttgtcttaccctctgtaggtcaattttttttatgtaatgaccttcggcctagtctgtatactattcccatgcatgcctaccctaatcaaggttaagtcctctaacatggtatcaagtcaggttttct

SEQ ID NO: 29945 - DNA, 1351 bp, Zea Mays
ttcaaaatcttttgtaaatagtcaaagtgtaacacccgggctttaaggaacaaagccaggtgcatttcatacatgcgccaagaagacaacatatataataacagagtgtatagagataatgtcttaaaaacatcagagtatttattacatagcggaagtcttattacaaaataaaagataaatataaaatgaactaaggatcatccttggcgctaatgtcaactgggaaatgccacctagatcagatcaaactcctcgctttgtggcttctcctgaaccacttgttctttttccttttttgcagcggaatttttattacaaaatttcaaattacaataagtttacattatcagagtgattacaaatgtgattaaaatattatactttgaaatgttataaaatatttgtaagtttggattacatgctagcataagtgacaatcctcaaaaagaagataaagatgtgatatacttatatagggaggccgagcccaccggcacttagcaccataaatagcagcacaaatctagtacctgcaacaatatgggttcgaaaaccctgagtacgaagtgtactttcgcaagtcttacccgactaaggaaaaagactctcaaggatatgctggctgattaggaatcaaggtaaggctaagcaataatcaaggacttattttgcagaaacgcttactaatagtggatccttaagccatcttttaattatcaatttaagttcttacctgattctagattttcctaatctagagcattcacttgttctatctagctttcttttagccaattcatgtttcacttattaactacgatgagtggtcagtgagtcgagtctccataaccgaggagcaatgacgattcgaaccgattatacccagctggggattcctaaccacacgacatatggagcacttaacctttgcatatgtcaaccgttcccacagatcctccacaacgtgaaccggtccgcgctaaccgggagcatagtactcctccatccagcctctagcgaggatggtacacgctactcccaccatctcccacgccccgtgcgcggagaatagccgagttcaggcttaccggagcatgtggctagttgcaaagtctcacctcatcaggcctacatcgaacaggcggagcactacaccgactcatttcacgatgcaagccacccgcccaatctcatattaattatctaactcaaattcattcatacataacaataaccagtaatcaaaataaattttcaaataaaaatcttatcactttaagtagggctaagcagcactagtttttcataaaacaggtatcaaggaatgattattcaaattctcaaggtt

SEQ ID NO: 29946 - DNA, 1308 bp, Zea Mays
atcaatggtgggctgcaaaacaatttccgcaagcaggttcgcaaattgcttccatcttcttagcaactggactggacgggccggcgggctacgtacggcccaaaagcaaagctccctctctgctactccgaccgacatcctcagaaagaccagttagactagaccaccgccgctccacgcttccaccctctgctgcgggacgagctcgagaggttcgccggcgctcctgctcggccgacggccgtcgccgcgcgataataggccaggagacgcggagagatgctgtcgtccgccgccttctcctcctcaccgctgctgcgcggagccccgctgcggacccggcacctgctcctggcccctcccgcgcgcgcgcacggcggcgcggcgagccgcgcccgcggtggccttccgaggttccacgccccgtctctcccttcgtccaagggtgaggtgattcgcatccaaggagacgagttctggcacatgacgcgggttttgcgccttggcgttaacgacaaggttgaactattcaatggggtgggcagtttagctgaaggattcatacataaagttgacaaaggtggctcaggtgttgagttattagaggatgctaggatcatagctcctcaaggcatccaatggcatgtctttgctgcgtttgggacactgaaaggcggacgtgcggattggcttatagagaaatgaacttggagcttctagtgttacccctctcctgacagaacgatgtcacacaatagcggaaaatcgggtggataggttgcaacgccttgtgctggctgcagttaaacaatgccagaggatacatgaaatgtcgctgaaatccccaattcagataaggcaccttctacctgttgtatcacagtcaaagcttgctttcttagcatcagcggaagcgcctcctctttttagtgttctgccagaatccagcattgaacaaagtgggcttctgattattgggcctgaaggaggctacgggttgagacagccacgatatccctcctatctgctctcatgctctggtcagatgctaaacaccggtaaagacagcaatgcaggtaatctaaggacagttctctcagtcatctttatggtatactagtcctctttcaggtgattagtaccatgaaataccattcaggatctagttggattcagtaaccaaaaccatgggtaattattccattggatctcagaacgcatttcagtaagagcttggtcttgggcttgaccagcatggacgatgagcatctcaatacacgatgttttgtttgagttatgttatcttag

SEQ ID NO: 29947 - DNA, 2082 bp, Zea Mays
ctccgcatttctcctctcctctcctctcccctcgctcgttcgtcgcgtcctcctcagatcaacaaaccgtgtcctgctgctgcctctggaaaccaccgggggatcgccccgccctttccttcccgcacctcagatcctccgtccgaaaacggcagcttccggaggtgtcccgtctccctgctccttccggcgcgacgggtggcacggctcgcggatccggcggtcttcggtcgacggcgaggcggcgctcgtcttggatcgggagtggttgctgaggcgcggagatggtggccgaggcggaagtcatgcatcagtcccccgttccggtgctggaggtgcagtaccaccggcgcgcgacgaccaagggggttgacgacgtcgtcgggatgtccgcgcccgcccccgcggaggttggggttggggttggggttgaggtcgaggtcgaggtcgaggtcgccgtggaggtgcctcgcatggggttggagcagcctgatgtcgcaccaagtttatccacggacatgatacagcagtttgtgcccaacatccgttctggtagcttcgccgacattgggcctcggaggtatatggaggacgagcacatccgaatagatgatctttccgcccatctcggctcgatgttggtctgccctctgcctagcgccttctacgggcctacatgaagaggcatgcgatgaggttcttgtttgaggaaagcgagttcccacaggcgtcgcaggtggatgaggtgtacctcgagtccgtggagagctgtgtccgcagagccttcctgcaggcggaccttgccctggctgatgatctggacatcagccggtcctctggaaccacggcgctcactgcattagtgtttggaaggtacagaaaggaagcttgtgaagcagtgatagatagctgcatccacgcgtacacattgatctgaacaccgatcccgcggcttgcttgcaggcaactggtggtcgcgaacacgggggactgccgcgcggtgttgtgccggaaaggagtggcgatggagatgtcccgcgaccaccgcgcgaaccacgtggaggagcgcgagagggtggccgcgtcgggcgggtacatcgaggacgggtacctgaacggggtgctgtcggtgacgcgggcgctgggcgactgggacatgaaggcgcccggcgcgtcggcgtcggcggcgctgatcgcggagcccgagttccggcgggcgacgctgggtgaggacgacgagttcctcgtcatggggtgcgacgggatctgggacgtgatgacgagccagcacgcggtgagcctggtgcggcgcggcctgcggcagcacgacgaccccgcgcgctgcgcccgggagctggtgatggaggccaagcggctggagacggccgacaacctgacggtcgtcgtggtgtgcttcgcgccggagatggggtcgccgtttacaccgcagcaacagcaggaggaggagctgcccgcgaggcccaggagctgcaagaagggcctgtcgacggaggcgctgtgcagcctgaggagctggctggatacggaccaccggtagagggaggaagagctggggggtgtgtaaatactggagtattatgctgacagcaacactggttgattatgagcgctgggccatctgttgaggattttacgtaggctggttcagcagccagcagttttgtaggtttcgttcttccttttcacccttgttatctagtcgtttgttgtacatacatgtatggatgctgctgatgacatctgtgtgctgcgctccattgccaccaactttctttttaccgagagcccagtgagaagaggatagcggagcaggcacagccactgcatttgaccacagttttcaggcacagcgacactgggaaagatcaatcaatcaactttgtcttgagccgagcaggtagcagatgggagtggactactactagtagtgccattgcggcgacaaaccgggttagacaatattattataggagacagacaggatatgatcggctgcctaatcgacaattattttgatgtttcgatttttatagatacaatgtttttactctacaaatgtct

SEQ ID NO: 29948 - DNA, 2601 bp, Zea Mays
cgatggccgtggagctagctgcctgggaatgggataggatattttcccgtggcgggataaagcccaacgagcccgcgttacggatatcttcgccatccgttgcctcgcgagctcgccgccatggcattggctctccccctcgcccgcctcgtccccgcctgccagtgccagccttggccccacctgcgctttcggaagcgccacgtctccttcgccgctcacgccagttctcgcgccgccttcgctgcctgcgcggcggcccctgccctccaggtccaggcgccggaggcggaggcggaggcggagacggtcgagcaagtgggcccgaagacacgcctcgtcgcgcagaacatcccgtgggactgcacggccgacgaaatgcgcgcgctcttcgagagccacggctccgtcgtcggcgtcgagcgccaataaaaacagagggttggcgtttgtaaccatgggttcagaagaggaggctcttgcagctctcacccatctcaattcaactattttaaatgataggaaaattaaggtggacttcgcaaggcctagaaagaagcaacctaagcaacctgctgtggtatcggatgacacggaaaagtgtggtatcagctgaagttatcttccataccaccactccgagacgatctgctggctacgcgtttgtttctttttcttcgaaagagagcgcaggggccgccatatctgctttcaacggaaagatattgatgggacggcccattaacgtgatgttcaaagatgaaaatggtgaaaagaatgaaccttcttctgtcccaaagaaggccgaggtggaaccatctgatgaccagagtgataagctaagcatgaactgttaacgaaacaaataggtcatatctgtcattacacacacatatatattctgacccatggtatttccttttcagaaatagttatgtcccttgttttattgatttgccaatctggtgtatgttcgtcgtgaggcaaacgtgagcgctgtgagggcgtcaaatcctcccgcgcgcgttgcaagggtcctaaatataaacttaattaggtttaataaatttgtctcgtctttttaattttatagtttctatatttaatactcgtaattactatttaaacattcggtgtgacataaattaaattttagttaggtggaaccaaacagagaattgaggggggttgcagtgaattaggagaggattttgacatatagggcatttgtagatttaagacaaacgaacatgagtcatgggcagccaatgaacatgattccatacgtattgttggccgacgaaaggaaaataagtatactcggacgtatttgcgtaggagcatagcagttggactggacatgccgtgtaatgcaccacgacgcggttaactcgggacggaagcaacgcaactcggcacgaagaaggaaaagccaccaccggttcctccgccgtccccgcggtttcagttccttgcttgcttgcttgctcttgctctccctctctcgtggaagccagccacacaaggcagaaagagagagtgacgttgtgttccatcccgttccgctgaagcaaccgctctcctacaccaaaccacccacaccactctaggtctctagccgatgcgatggatgtggatccagcagcggaccagcggaggaagaacaagggcgggctggagtcggagctggagcgccactacgacgacctgcagcgggagatgatgctgatggccgccgatcggccgcacaagcaactgcaacagcatcgacgtcacgggcaccgccccgatctgctccagaactgcgacctgcccccaccggccaagctcttcggccccgtacccaccctgcagaggctggagaccgctgctgccaaggaccacaaggccgacgacggcctgctgcgggcgctgcgcctgtcgcagtcgcgcgcgcgggaggcggaggacaagctggcggccgcgggcgccaccaacgtcgacctcgcggcgctgctcgtgcgggactccgtcgcgctctccgcccaccgccgctgggtcatgatgctggaggccgagaattccctgctccgaggaccacgacgagatgcggatggtccggaaccggaccacggagccggcggggtggccgcgtggtgggtcgcgctcgccgtctgcgtcggcgtcgccggcgtcggcctcgcgctcggcaggttcctctgctgaacaactgtgatggatcattctccttccttcctgctgctgtagaaagtgtaaatctacttcgagacgacgatcgatcgatcaatcaatcagtcaaaaaaaaaactgtaaatactgctacagtagtacggagtaggattggtctccaagttaaagtacccattcctgcacgctttctgctttagcttgtggaaacaatctgttgagaatttgatgcctgccgtgaggttccgtgtcactttccattgctcacagtcacagcacagaaattgtcgcgcattcatgtacgacgacaaggacttttccctgtagttgtaatccattttttttgaaaaaaacaattaattgattttacctgtaaattctccagttcttttacgggtaaattctaaaatgcgc

SEQ ID NO: 29949 - DNA, 2007 bp, Zea Mays
cctcgctctccccccttcacgctcgccctcgcgctcgacccatctgggctggggcacgcggcgacactcactcgtcggcccagggaccccccggtctcgaaacgccgacactacaggtgcttgggaggacgtttctatggattttgtggagggctgcctaaatctgaaggttttgacactattttggtagtggtggacagattctccaaatatgctcattttatttccgtcaaacatccatacactgctcaaggggtagctcaggtgtttctggacactgtggttaagcttcatggggctcctaaaactattgtgtcatacagagataaagtgtttacaagttctttctggacacatttgtttcaccttatgggagtgaagttgctattttctactgcatatcatcctcagacagatgggcagactgagagggtgaatcagtgtttggaacaatatcttaggtgtgcagtccatgatcatcctcacaaatggaggcagtggttggctttagcatagttttggtataacaccacctaccatactgttctggcctgttctccctttaaaattttgtatggttatacacctcctgtgatggttgttccttggttgatagaggaaggggacagggatgttactacctggttgcaggaaagacaagtggcctctgaactgctcagagagaggttggcacaagctcaaaatagaatgaaacaaatggcagacagagggcgaactcctagggaattccaggttggagaatttgtgcttctcaagttacaaccttatgctcaaaagacagtggttaacatgccatatccaaagttatcctttaagttctttggtcctttcaaaattgtggcaagaattggtgctgtggcttatcgattggagttgccagaaaatgcacagatacaccccgtttttcatgtatcccagttaaaggcatttcaccctaaacatactccagtttttgttgagcttcccaaggtggcagatttgtctggtccagggatttggcctgagaaaattgtggacaaaaggttggttcggaggggtaatcatgcagtacctcaagtgatgattaaatggtcaggtttgcctgtttcttcagcaacctaggaagatttttatgtggtcaaaaacaggtttcctgatgtcctggacaagcgagttctgtttgggcggaaaatgtaacgaccgaagcagaggtgagttcggtgtagtagtagatctggagatctatgtggttctagaagctttagggttaatttgggcaattgtgtggcttttctttgattgtaatctggcccatctaatggcatagaaatacttgtactgataaaccgtcagagattacgaattgaaaaagaaaggattagccacaaacctgtctacttcttcctcgccacgaagcttaccagggaagctgtcggttcctactatcgcggctcacgtctagggtttggtgaaccctaggccacgggtcgtgacacggtcgcggtcatcccgacgtccacgctgctcccctgtggacctcgaggataaggtgatgtggttctctctatttccttgccccttctctaacgctatcgatgtcgatggggtgactcactaacgcttccctttgtttttttcctttgctcgccgctcaactgaacgagatccgaaagaccaacaaccatctggttatcatcgagaagcccacaggagtacgacgctggggtggagaacgatgatgcaaacaacaccgagaagtctgatggcgacgccttcgaccaggagaccggttgactcaggtggctccccgtgcttcaacagtgttcttgtgtgtcatcgtcatctatacttcgcaacctttgagtcgttcgtgctatctagatgtggtgttttaccctattatgcagttgtctgctctcatgatttgaacatgtatttgtcatgtggaccttgtgtatgaagttagtacatgataaatcggtcatctatttatgccagataatatag

SEQ ID NO: 29950 - DNA, 164 bp, Zea Mays
agattaagtaaacacaaatcacacacaccaacagtttgcagcggaaatcttattaccaaattttacaagttacaaaaattttactgtgtacatgatcggagtgattacaaaagtgattcaaagaaataactttgaactgttataaattatttatagttttgaaa

SEQ ID NO: 29951 - DNA, 3617 bp, Zea Mays
gagcccaagataagtgaaggcgtagctgggctgcctggaaggaaccactaaccatcatcgcgttggcatctcgtcccaagatccagtcaaggtcgtctccctgctgtcatcctctccgaccagcgcaagctccgttcctggaagaactagaaagggtttctttttgctgagctgagcaagcacctgggcggcggccccggcagcaagtatccagcagcagaaatggcagaagcaataatccttgctctgagaaagattggtagcgctttagcagatgaaactgccaagaaaatgctggccaaattgtctgaaaaggttaacaatctgagggatctgaatgacaagatcgagtcaataagaatgcaactgacagccatgaacaatgttatacgtaagattggcacagtatacctcactgatgaagtcgtcaggggatggattggggaagtgcgcaaggtggcctaccatgttgaggatgtaatggacatgtactcctatcacacacttcaaatggaggaagaatggttcctgaagaagtacttcattaaagcgtcacattatgtcttggtttttagtcaaatagcagaagaagttatcaaggttgagaaggagatcaagaaagttgtagaactcaaaaatctgtggttcgagccttcgcaccttgttgctgatcagctaattgagatggaaagacagcgttcgcacgataactacccactactttttaaagatgaagatcttgtggggattgaagataacaggagaaggctcaccgaatggctatattctgatgagcttgacagcacagtgataacagtatcaggcatgggtggacttggaaaaactacccttgtaacaaatgtttacgagcgtgaaaaaaccaatttttctgctacagcatggatggtcgtgtcccagacctacactatagaagctctgcttaggaagttactcatgaaggttggtcgtgaagagcaggtgtcacctaacattgacaaattggatgtccatgatttgaaagaaaacataaagcaaaagctcgataatcgcaaatgtttgattgtattggacgatgtatgggaccaggaagtgtaccttcaaatgtctgatgcattccaaaatcttcaatctagtagcatcatcatcacaacacggaagaatcatgtggctgctcttgctcagccaactcgtcgccttgttgtccatcctctgagaaacactcaggcatttgatctcttctgcagaaggattttttataacaaggaagaccatgcgtgccccagtgaccttgtggaggttgctactaacatagtagacaggtgccagggattgccactagcaattgtatcaatagcttgcttattgtcttcgaggacgcaaacatattacatctggaaacaagtttacaatcagcttcggagtgagctatcaaaaaatgatcatatccgggcagttttgaatctgagctaccatgatctaccaggagacctaagaaattgcttcttgtactgcagcctcttccctgaagattaccctataccacatgagagcctcgtcaggctttgggttgcagaaggctttgcattgagcaaagaaaacaacacagcagaggaggtggctgagggaaacctcatggaacttatccaccgcaatatgcttgtagtagtggaaaatgatgagcaggggagggtgagtacatgtacaatgcatgatgttgtgcgagatcttgcccttgttgttgcaaaagaggagaggtttggcactgcaaacaactatagagcaatgatacaggtggacaaggataaagatgttcgacgcctatcatcttatggatggaaagacagtacatctctagatgttagacttccacgtcttcgaactctagtatcacttggaacaatttcatcctccccaaacatgctattgtcaattttgtctgaatccagctaccttactgttctcgagctacaagattctgaaattaccgaagtgccagggtctatagggaatctgtttaacctgcgttacattggcttgcgccgtacaaaggtcagatcactacctgattctatcgagaagctcctgaacctccagactctggatatcaagcaaacaaaaatagagaaacttccacgaggaatctctaaggttaagaagctacggcaccttctagctgacagatatgctgatgagaagcagtcacagtttcggtacttcgttgggatgcaagcgcctaaagatctgtcgagcttggtagaacttcagactcttgagactgtggaagccagcaaggacttggctgaacagctgaagaaactgatgcagctaaggactctgtggattgacaatattactaatgctgattgtgcaaatatttttgccagcctatcaagtatgccactcctttccaacttgcttctttctgcaaaggatgaaaatgagccacttcgcattgaggctctcaagcctgggtccacaggactccacaggttgattatcagagggcaatgggcgcagcgaacattgcagtgcccaatatttcaaggccatgggagacacctcaagtatttagctctaagctggtgccacctttcagaagatccactggagatgctcgctccacatttgccaaacctcacaaatctgagactcaacaacatgcgtagtgcaagtatattggttcttcctccaggatcatttcacaacctgaagttgcttgtcctgatgcacatgcctaatgtcaagcagctggtgattggagaaggtgcgctccaatgcatcgaaggtctgtacattgtgtcactggtggagctggataaggtccctcaaggcattgaatcgcttcgctccctgaagaagctctctcttgtcaagctgcacagggacttcctgactgagtggaacaacagcggaatgcatcagaagatgcaacatgtccaagagattcgtgtttagacgtggcagatgggtaccttctgcagcactattcacaccgtcgacaactccacatttcaatttcatctatactttttctttttcttttttttcatctatacttgtggtgactagtgcaatctaatcatttcccaacctgaagttgcttgtcctgatgcacatgcctaatgtcaagcacaagcagctggtgattggagaaggtgcgctccaatgcatcgaagtctgtacattgtgtcactggtggagctggataaggtccctcaaggcattgaatcgcttcgctccctgaagaagctctctcttgtcaagctgcacagggacttcctgactgagtggaacaacaacggaatgcatcataagatgcaacatgtccaagagattcgtgtttagacgtggcagatggttccttctgcagtactattcaatttcaaccctccccaataagtactgtcattcacaccgtcgacagctccacatttcaatttcatctatactttttttttctttttttcatctatacttgtggtgactagtgcaatctaatcgtggttgtcttggggtagctggcctcagtttgtgctgccttttcagtttccctctcttcttgattttattgtaagaacaagttccattttaattcaacttctatattttgttaataa

SEQ ID NO: 29952 - DNA, 724 bp, Zea Mays
ccagtttccacttttctctattgcacgtcgcaaaaagtggatcacacacgcatcgttgagagtcatgaacggttgtttccttgcaaaaactggatcacacgacaacagaataactgagatcacaccgggggttggggacggcatcccgccgtcggtgaggcagcagcagggcccgctgccagcctgttgccagagatggctcgactacgacgcgcggcgggttgggcacaacggcgcagagggagcacgaagccagcgtggtcttgccggaggtagagaggcaacgcacagcaaaacagggagggccgacggggcttacctggaaatggtgtcgtcgccggcgtgctgcgcagtgcttcggcgaggtgcggctttggcgaagctccagcgaggcgcgatggcgaggataggtgtaacaccctgaatttgggggtataaatttttttctctaatatccaccaaagtcaggtgttacactcttatttctttgcttcccttctattttttcctaaaagtggagaattattttattttatatctagttgtaagcttagtaaaataaaacctcagaggtgcttgagtgttgcattcatgccgatgcatagtgtttataagtgcaaaatgttatcgaaacatgttaaaatatctcgaggatgttcccgagagtttttggaatcttcagaactttcttcgggtattaaatacgaatttcagcctttctaat

SEQ ID NO: 29953 - DNA, 195 bp, Zea Mays
tacataatagtatgatagggattggcgattgatgacagtacaagattttattgttttgcaaaaaaactaaagtgattgaccaccatcttaacccagtttccaggtgaacattaaatgaggctcacctccttggaggagactgaagatgaagctcaaactttttacctttatcagtgggagtttcctgcaactgtt

SEQ ID NO: 29954 - DNA, 2868 bp, Zea Mays
ccccgacgcggtctgtaattcctcgtctctgcctcacacgtccggccttgttcaccgcaccaaagtccctgtccgggactccgggtccggctgtctctgtccctccgctgatttgcgcgcaccccgcactcgcagtcgcagggccagtctcctcagttttcaccctctccgtctcccgtgagccagccagaagtcctagctccgcgcccaaaccctcggcctcgaccagcacctgcgcgcggtgggccatggatgcggcgtcgatgctggagctgtatcgccgcgaccggcgcaggctcctcagcttcctgctctccgccggcggtggaggcggccgggccctcgatctctcccgcgtcgacctcgacgccgtcagcgccgactacgcgctcgagtgcgtcgcctccggcgcccattttaatgcttcggaagccacgaggaggtacttcgacgagaggaggtaccctatcatgattgggtcgtcatcagggaactcttattttcttctttcgaggccaatgccatctgattcctctccaaaggaagcagcacctagcattgggccacaggcacctgtacaagacaactcaagttcaacaggacaaccaactgaaccaagagatttcttcagggatgctcttagtacctcaggaataggctatgacacggaagatgataaattggcagatatttctcctcagcaagtaaacaaagtggatattctttctctaggtttgcctaggctaaccacagaactgtctgatgatgatataagggaaacagcttatgaggtccttcttgcttctctatttgtcagtggaaaagtacacttctctgaagaaaaaagagaaaagaagcacaaattcttgaagggacgaagaactaagactgaaggatcaaatccatcacctcaggtggaagatggctatgcccacattcttgatctgacccgagtacaaatggagatttcagaatctatggacatcctgactaaacgagctttaagacatattagtttgaagacggtgaaagaaacgcttgatgtgccccgtatatcactacagctcttaagttctgttggcaaacttgattttccaaccgaaagattgcgtgggcaatggcagaaaagacaggcgaatgttcttgaagaactacttctcttctcagcatctcttgagtatgatacgagcaacacattacggatagttctctctaagctaaaaagtacagaggattgggttgtgactgttcctgagggccgtgtcgaggtcctgactatcattgaaagatacaacacaaaactttgttcactgacgaagaagtttgacattaaagatgagacctaccattggacccataattatcattttaattttaggttatatgagaagttactttgcagtgtgtttgatattctcgaagatgggcaacttgtagaggaggctgatgagatactggaaataacaaagctgacctggcctatattgggcgttactgagaagctgcaccacatattctatgcctgggtgcttttccagaagttttctcaaactggggagattcttctactgaaacatgcaagccttcagatacgggaatttcgattgtaccatgacgttaaagaaatagagttatatacaaacagttttatttgttctgtggatgcctatggtggcaacaaggttctaagtttggttgacagtgtcctactcaaaataaatgtttggtgccgcagacagctaggcaattatcatgcacactatagtaagaataactactcgatctttgaggccacactgaacttggtcttgctattggtgacaaactccagtgaggacgattttgaagaaaccatgttcattgagagcccagtagggagtacaccagaactgaagttgatccatttactcattgtcagatccatccatgctgcttataagcaagcactaatttcatcaaatggccgatcagattcagaatttaagcatccattgacaattcttgcaaatgagctaaaggcagtggcagagaaagagtgcactgacttcagtccaatacttaacaagcactatcctgaagctcaaagagtagctctaatcttcttacacatgctatatggaaaacaattggaacttttcttggaaaggacagataattcggagaactcaaaagagatactggcagcatcaaataattttgagctctttatagctcagaagctttactcagtgtatggggaaactgttgggtcttcattctccaactatttaaagccatacatggtaggtcacttttcttcaccccttgttctccaatggcttcatgctcaacacgagaatgtcttggagtggacaaaacgtactattgagatagaggattggacacctttatcagctcacgagaaacaagcaagatctgtggttgaagtattccggattgtggaggagactgttgatcagttctttaatacgagcctgcccctggaaattgtccacttgcgaagtctactcatcggaatcactaggagtcttgaagtctatttgcttcacatggaaaatcaacaagtgcctggatctactcttctccctagtgctccagtcttgacacgttatgcagaatcaatgaatccatttgcaaagaggaaacttattgagcctacggttcctgaagaaaaggttgctatgaagttgaacaatttggcagtgcccaaattatgtgtgaaactcaacactcttcaattcatcagggatcaacttgatgccatagaagaaggtgtcaaacaatcctgggtctctgtcttgtcaggataactgtgcttcattataactacttcaggttgtagcaccacttctgatagcaaatcccata

SEQ ID NO: 29955 - DNA, 896 bp, Zea Mays
agaattatcaagtactacttgtgtagttatacatggttgttcagatgtgacagcaatgactaatgggacaaatgtcgagacaggtccaaaaggccaagaaccaccatcaattagctctagcaatattagttttgttgttcgtgtattggctaagttattggagatggcgcttgccttatgcttcagctgatcaagatctagaattcgaattgggccatgtgaagcatttcacatttcacgatctgcaaagtgcaacagacaattttaattccaggaatatattaggtcaaggaggttttggaattgtgtataaaggctgtttgagaaatggaactttagtggcagtgaagagattaaaagatcctgatgttaccggtgaagtccagtttcagacagaagttgagttgattggccttgctgtgcacaggaatctcttgtgtttgtatggattttgcatgacctctaaagaacggttgcttgtatatccatatatgccaaatggcagtgttgctgaccgcttgagagtttgggacactattgggcatattgctcctgagtatctctcaactggacagtcctcggaaaagactgatgtttatgggtttggcattctcctgttggaactgattactggtcctaagaccttgagcaatggacatggccagtctcagaaaggcatgattctagactgggttagagagctaaaggaggacaagagactggataagctggtcgacagggatctcatagattcatttgatattcttgagctggagtgttcagttgacgtgatcatccaatgcacgcagacgaaccctatgttgcggcctaagatgtccgaaattctgcatgctcttgaagccaatgtcacactggcggaaaccagctcgagttga

SEQ ID NO: 29956 - DNA, 596 bp, Zea Mays
ggcccgcccatgatagtaaactgctaaaattagttaaaaatatccaaacaccctctaaagcgatcaaaataaactaacatcaccattcttgaaatgttgccatgttatacaattataagatttgtccagatactagctcgttttacatgagcaacaatccctccgattataccattgctgtcacttgcaacgtgagctttaatttgattttgtttcttgcttctgagaaaacaaattaagctctcggctttcgacagtgaaaaatgcacgaatttcgtttgtgctgtggaggaataaaaccgggtggagctagcatgtgtggtatacccggaaaaacaggtgctgtctacgagggcgacgagggggtgaatgcaaaagaggaggcaagcatatacggcgtttaggacgtcgcgagcctgcgtcaccggtggcccccaccgtgacgtcgcataagcacccataatccttcctcaccgcccgcctcgccttacccgcaccatgatacctccgcgcgatcccaactgacatccgtggcccacgtacagaaaaccagccaaccaggcttcggggtaccatcggtttcacgtgccagtttg

SEQ ID NO: 29957 - DNA, 859 bp, Zea Mays
cagtcgaccgcaccacactccactccacaccacacatgatctgcggaaaccatgtccgcgcccgcccgcccgccgtttctgcgccgcccgccgatcgtttgggtccattgatgccgcctataaatctccggcaggcctccccggagtcagtgtccaagtctgcgacgacgtccgagatgtcgacggtgagccgtgcatcccttgaccagaagcttgccctcgccaagcgctgctcccgagaggcgactcttgccggagctaaggcggcagcagtggcgactatcgcctccgcgattcccaccctcgcgagcgtgcggatgctgccgtgggccaaggccaacatcaaccccaccggccaggcgctcatcgtctccacggtggccgggatggcctacttcatcgccgccgacaagaagatcctgtcgctggcgaggcgccactcgttcgaggaagctccggagcacctcaagaacacctccttccagggcaccggacgcccccacccggctttcttcaggccatgatgagatcagatatatatgacacatccgtcgacctcatcagtcatagagccggccagccagtcagtcagtcagcacaagcaccagagatgatgccatccatgtctgcatgcatgcatgcatatataaaaaataaactgctaggctgatgagtcatcgcgctcgcgtgctattaatcatcctcgatgcatgtactagtgaattgtgctatttaaatatatagtttcacgaagggtggatgtttttactttgtttgctactagtacgtggtgctcggctcagaacgaacgcagatctagctaattcctgtccctaatcactcgacagatttatgtgct

SEQ ID NO: 29958 - DNA, 1026 bp, Zea Mays
gtacgaggcccatctcccacgacaaatgaaaaccctaatctccagcaccccggcggcctccagcgctcccgctccttgctcgcctccacccgcggcaaccaccgccctgcggcccccgccgcttgccagcctccaccgcgccgcgagtcgcgttgttcctgcaccagctggtcctggagcacgggaggacgagcatgtcctggttcggccccaaccccaaggtgaccatcgtcgacccggacctggccaaggacgtgctgtccaacaagttcggccacttcgagaagctcaaggtcccggtgctgtccaagatgctgggctccggcgtggccagccacgagggcgagaagtgggtcaagcaccggaggatcctcaaccctgcgttccatcttgagaagctcaagcgcatgctgccggcgttttctacgtgctgcgaggagctggtgagcaggtgggcggcggagtcccttggctccgacggctcatgcgagctggacgtctggccggagctgcagaacctgacgggagacgtcatttctcgcaccgcgttcagcagcagctacagcgaagggagaaggatcttccagctacaggccgagcaagcttcgcttgtcatgaccaacattcggaagatcatgatccccgactacatgtacttgcctaccgtgaacaacaggaagatgcgcaggaacaacagggaggtggagtcaatcctgcgagagataatcgggaagaggatccaggcgatggaacgaggcgagggcaccaaagacgacctggtgggtctactgttggagacaaacatgagagacgacatggggatgacgatcgaagacgtgatcgaggagtgcaaggtgttctacttcgccgggatggagaccatgtcggtgctgctacgtggacgatggtggtgctcagcatgcacccggagtggcaggaccgcgcgagggaggaggtgacggctctgttcggcagggacggcaagcccgagtacgacggtctaagccgcctcaaagtcattgcaag

SEQ ID NO: 29959 - DNA, 948 bp, Zea Mays
tctgcattttcattcctgacaatcttctctaccacttctatgtacgctacattggcagtatctcctgggcagtcctcattaatctctgatgatgctgatgttgttgctctgattgggacaagtaaggacttggcaaaacaaataaatcagaaggaagtacattgggggttgcttgaagattctgttgaagagcaaatggagaaggcactagcagaatctgataaaatagaagctgaaagcaacgatgctgatgcagaagataacaaggcaaggaaaaaaggaatacagaaggtggaaagcaaaatacttctcttgtgtggggacacttgctttcagctgcgaaggagcattgcttgcatcggggtcggctgactgtactgttaagctctgggatgtcgctttcagcacaaaagccctgaagacagaggacaccaaaggcagctcatcagctaaccgactgagactgcttaaatctctgcctacaaaatcagctcctgtctatagcctgcggttttctcggaggaaccttctgtttgcctccggtgctctcgcgtaagctgcgtgtttcgtagaatacagctagaactgttccggttttgacatggagtagtgaagttggcatttcgcagactccgctgtggatcctattgtagagctaatattttcgttagcaatctcaacggcccagcatgtatgcacagcggaattgagcaccgcagatgctttgtagcgtgcttgcaacattgtgacattgttattaggtaaatacgtcgtgtaattttttttaggttgtgatcttatgatttataaacgccactaaatgtacatatgcctgataggagatagcttgtaagggatgaccggatgatttggtgacaaaacaatgcattttatctacttctcaaacatgtaaaatatggatcatcctatacctttgacgaagcaacc

SEQ ID NO: 29960 - DNA, 6811 bp, Zea Mays
acgtccaggaaaaatatcgaaacaaggacgaaaaacacgaagaattacggaagagcaccccatcttcggtttctttcctccggacttcttcctgcttgcggcgtccgccaattcccttccctacccaaaccctagagcaaagctgaatggccctcgccacgagctcgcgagagactctgcgccgccgccggtgactgctgatccgcccgccgccgccgcgcccggtgctttgtcacgcaggaggcgacggtatggcgtcgaggcagcacaatgcacagttccacaaatccaagacgctcgacaacaaatacatgctcggagatgagatagggaagggggcgtacggccgcgtatacaaggggcttgacctggagaatggcgatttcgtggccatcaaacaggtctcgctggagaacattccgcaggaggatctcaacataataatggttttgttttgtcacattgttcacgagaaaaaaaatctgcagtttctacaccatgactaatagtgacttcagccttatatgcctttgcaagcaacaatgagattttgaacctctgcaacttttctgcaattgatggattagtcttttgcctacttaactacatataggtggtttgacagcaaataaaagcaatgtgtaggctgacacgtggttcttctaaatctaagctacagatgtataggtatcgtgtaaactgataatatctaaaatagaactttatgtgttggtgttaattttgcaagttcgctgagttttttttttcatccttttgatattggtttcatatatcacctaacacttgaagatgattttgaaatctgtgtgtatgccttgtctaaatgttgtcctttggacttttggagcatatctgatgcatctgtccagagcttgtgaaataacaactttagttgttttgtttgcttatttaccatacggacatacggtcggacttacttggccacatacgccatcaagtaccacaggatgcactagtgcggtcactgcttgattttttagaacactgggtttaaggaagtaatacattttttttgcattcttcttgtataaccatttataccacagtaccactgtgttatacagctcttgttaaaacacttccccctctttttggtgaatattactatttcctgcaattgctcttgtattcctgcagcctagggttctaattaattgtctttggtgcatgtttaacgattctgcacaatgcttttctggtatggtgtatgcagcaagagatcgaccttttgaaaaatcttaatcacaaaaatattgtcaagtatctgggatcactgaagacaaagagccacctccatattattttagagtatgtggagaatggctcacttgccaatattatcaagccaaacaaattcggacctattcctgaatctttggtggctctttacattgctcagtttttatatgaccaggtgttggaaggtcttgtttatctgcatgaacaaggtgtcattcatagagatatcaagggcgcaaatatactgagtaccaaagagggtcttgtcaaacttgctgattttggagttgccactaaattgactgaagctgacatcaacactcattctgtggtcggcactccatactggatggcgcctgaggtcattgaaatgtccggcgtttgcgctgcttctgatatctggagtgtgggttgcactgtaattgagttgctgacatgtgccccgccatattatgatctccaacctatgcctgcactgttccgtattgttcaggatgtgcatccaccaataccagaaggactgtcacctgaggttactgattttctccaacagtgtttccaaaaggatgcgatgcaaaggcctgatgcaaaagcattattgatgcatacatggttgcaaaacttaagacgagctttgcctggttctcttcggcaacctactccattgaggaacatcgatggtgatgatgaaggctcaagaggtgataatagcttgggtttttgcgacacaccaggagatattcaaacaactattacttctaatgttgaccaggagaatgggagtaaagaaccaattatggactctactgtacaaagtaaatctgaagagcttcatgatggaaatttaaaacttactgagggcagtagttcaaacagtgtggcgcttatgaaagataatgtggtccttaataaaggtccgacactagttttacatgagaagttaccggtggaatcttcatctggaggtgctgatttgaatggcaaagtaatggcacatgaactattgcaaggtggtccgccaggtaaggtagagctggagaataaagaaagttcaagtagtgatgtgttctcctttcaggctggaagacagaatattggcttccaaaaggtggttgaaccttcagttgttgaggggccaaaacagcttagtagatttagtgacaaacctgaagatgcctctttggaagacttatttccaccaaatgataaatggggagataatggggctgaaccttcaacatcaactactgtccaagaacttaaatataatggtgtacaaaatgcgttcttgaaggggctcaatgctagggtggagaagcaaaaagaaaatgataacgagtctatgaatggtggaaagctaattgaatttgccatgcaactagaaaatattgacgcgttgggttttggtgaacatattcctggagagagtcttttccctgtgcagtctgtggaatacaacaaaatagtagcacaactgagaccaggggaaagtgaagatgtaatactgttggcatgccaaaagcttctatcaattttcagttaccgccctgagcaaaaacatatttatatggcacaaaatggtttcctcccgctgatggaactccttgaaattcccagaaatcgtatattatgctctgttctgcagcttatcaacaacattgtaaaagatagtacatgcttcctagaaaatgcttgccttgttggccttgtaagactaatgttccagagcaattcacgaccttcatgctctgttgactgggatagatagttgatatttaaaagttatctgcagattccagtggtgatgaattttgcagagccaaatcgtccaaaggatgttcgggtgcaagcatccttgtttcttcagcagctttgtcaagccaggtctttttctttctccaacataacagcaacagcaaagctttttatgtcaagcaagttgggggtaagctagagttaaaaacctaatagaacccacaagtcatggtccggtcacatggatagctgttctccatgcactcctattcaaggctaaacctttgggtatatcacatcctttcaagtccccttttactgtctcttctccaatcaacttcggtcttccttttctctcttctcattactgttgcgccttaggattccactatgcactggcgtctctggaggtctccgttggatatgtccaaaccatctaaaccaatgttggacgagctttctttctccaacatagttgataatttctgatttttttaataaaagagtggaagggacaaaagctttggtgtactaatttctggtttctatctccagcaccctgacattgcaaatgtttgttgcatgccaagggatccctgttttggtaagctttatggagcctgactatgcaaaatacagggatatggttcatcttgcaattgacggcatttggcaggtcttcaagctccagcattcaactccaagaaacaacttctgtcgtatagcggcaaaaaatgggatgcttcctaggctggtgaatacactatatagcctgaacgaagcaacaagatttgcttcagtctcagggtcaggtgcttcagtaacacagaatggctcaaccccccgacgaagatctggccaattagacccttcagttcttgaaagttgcaaggcaaggctggatcatcatcattcatctggttctctgcaatctctacaaacagacgcagataagcaccatatattaatggactcgtcatctcctaggtttagtgataaaaccggcagtaacttggagaggaatgataacgacttggttattcggccacagaggcttagtgtttctgctggaaggacatctacagacagatcaccaaagcatgtagaactagtttcaaatggtcatattagcggtcaaaatgaccaggtccgacctctactgagtttgttggagaaagaaccaccttctcgacatatatctggacaacttgattacgtttgccacataactggattggaaaggcatgaaaccattttgccactattacatacatcgacagaaaggaaaacaaatggtgaacttgacttaatgatggattttgctggtactttattctgtgcccattattcagatgttagtccttagcatattggtgcatcctcctattaggtctctagacatggaagagagaatggccatctggactcgagtataaaagtttcaaatagagttcatagtatgaaatatgcaccttcgacaagtgcctctaatgaaggagcatcaacttctggagctgcatcgcaaacagcatctggtgtgttatctggatcaggagtgctcaatttaagaccagggagtacaacatcatcaggcccattagctcagatgttctcttccatgagcgcagatgtggcacgcgaatatcttgaaaaagtagctgatcttcttttggagtttgcacaggcagacactgtggtaagatctctgatggccagccaaagccttcttacaaggctttttcagatgtttaacaagatagaacctcctattcttcttaaggtaataatctaaaacatttttttggttctgctatatacttgtttatgtgattccatttttttgtgtgtgtttgtttggtttatggaactatttgatcttttgtgcagattcttaggtgcattaatcatttgtcgggtgatcctaattgtctcgagacacttcaacgcacagatgcaatcaaacatctgataccgattcttgagctttgtgatggacctctggtttttcaaatacatagtgaggtgcatagtgttttttgttgaagacttgcaaccaagcatgattgctaaggaagaaatcctactaactagtttttcaggactcattttcctttttatatggtgaaacatccagagtcaatagttttgaagattaagttatgacccatgttctatatctgctggagttggtctactacatttttgtcccaccatttcaaattttaagatgattggcttttctagatacattgcttcaactattgtatgtcgaagtgcatagcaaaatcaatgtatctagaaaaactaaaacgtcttaaaatggagggagtattattattcagagggtgccgtgggggagtgggactatcctaaacgagtgaaataacaatattacatttgatgccttgttatagcagtatgcaatacattagtatactcatagttggagtagcgaaccatcttagagtgagaaaactgtagccagcagaacagcattgtctacaaagatgacaatttgttttagctgtgctccttttttgtaccttttaagttgagacctgatgctattaaatgctaacaaccaatttatcagcagataatttgacttctgttgcactattttctgagcacataattgactgcctctgcctttgtctctaggtcctcaatgctttgttcaacctttgcaagattaataaaagaagacaggaacaggcagctgaaaatggaatcattcctcacttgatgaattttgtcatgtcagactcacctctgaggcagtatgccctgcctttgctgtgtgatatggctcatgcttctcgcaactctagagagcagttgagggctcatggaggactagatgcgtacttaaatctgttggaggatgatgtatgggcgtgcacggcattagattctattgctgtttgtttggctcacgataatgatcatagaaaagtggagcaggcactgttgaaaaaagaggcaattcaaaagttagtgaagttcttccaagactgcccagaacagtattttgtccatatattggactctttcttgaagataataatgaaatcttctaggctaaacacagcaatggccaccaatggcttgacagcattgctcattgcaaggcttaaccatcgagacgctattgcccgcctgactctgctgaaactcataaaggttgtctatgagcatcatcctcgaccaaaacaggtcatagtagagaatgacctccctcagaagctacaaaacctgattgaagaacgcaggggtggacaacggggcggccatcaagtgttggtcaaacaaatggccacctcattgctgaaggcgctgcacatcaacacagtattgtgattttgatgggtcatgtgttttcctctcaagttagtgtttacgttttcgctagaggaagaaaaggggcgtccttctctttttgcctccttttctgctgtggtggcttctcacgagcaccagactcatttgttgtacctgatccctccttttttgggagaaaggttcaacgttttggtgcaggataaaatgggcttgctatcctccagtgctgtgtatatctagcgtatgttagtgaagaaattgcaaattagacaatctaattaaaaaaatttaaaccatattgacattttgttccgtgtgttagtagattttccctagcctgacccacttgcaccaagcaaaatggttgatatcgtggacgtctttaacaggatgcaagaaagcatcacatagttcttttgatgcattacattac

SEQ ID NO: 29961 - DNA, 1498 bp, Zea Mays
cgaagtttgtcactgtcccgttcgtcgtgtcccaaagtccaaaacccaacccacaatggccgccacctcgccggccccggcgccgccgcgcatcctcctcgccggggatgcccacggccgactccaccagctcttcaagcgcgtcaaatcggtgaaccagtcaacggggccgttccacgcgctgctctgcgtggggcagtttttctcccccgagggtgctgcagagggctcaccggaggacgtcaccgactacctcgaggggcgcgcttccgtgcccatcccgacctacttcaccggcgactacggcccagccgcgccgcgattgctatcgaaggccgccgctggtgctcgcgggttcgcacccggtggcatcgagatatgccccaacgtcttctggcttaggggaagcaaccgcttcaccctccacgatatcacattgctggcacaaaaggtgtcttttactcaagggaaccatatgtcaatgattctgctgctcatgttacccgctttattggacttgctaatgttggaaacaaagagaagcagcatctgtcatgtccagtgctgatatcaatgccaagcctccaaacgccactttgtcaccatatgttggttcagcaaaatcagttcctatcgaagaagctccaaaacgtgcagcggagaacatagattcacaatattggcgttatgatgtcaagcggcaaaggcatggggaagctggtgggggtggattgtgtttcaaatttgtatcctcaggatcctgtcaaagagggagtagatgcagttataggcatgatgaagaggcagtggagcattaccagagaaatgtctgttttgattttctaaacaaaggaaaatgtgagaggggcccagaatgcaagtttgttcacagtctttctggggagactgctctaagggatgcaagacctcctagtgaaagaagacgagtggagagcagttgctggttctgcttgtcgagtccagatgtcgagtcacatcttgtcattagcatcggtgaaggttactactgcacacttgcaaaggggccacttgttccaaatcacgttctaatgattcccgtggaacactgccccagtacattgatgatgcctccggaagcagaggcagaacttgggagatataagattgctctgagtaagtactttgagaagcaaggaaaaactgcagtctactttgagtgggtttcaccacgctctcaccatgcaaacctgcaggctgttcctgtaccattgtctaaagcagacgctgttaacaagatatttcatctagcagccaaaaaactgggatttgaattctctatggtgaatccagatggtgcaaaaactgctagagaatcattgatgtctcaatgcgaaagcaaatcagggctgttttatgttgagctcccggaaggtagaattctcttgcacatggtcgacagtaacgagaagttccctgttcagtttggacgcgagctggctgtccttcattttcatgg

SEQ ID NO: 29962 - DNA, 3660 bp, Zea Mays
ctactgagtaggtgtgtcagtgtgtgttgcttcatccaagaacgaccagtcagcctatcataaagctctctccttttctcgcgggccgcggcctcactcccttgtctccactctcccgacggagacggagcctcgaacgaacccaatgccaatgcgcctcctcctcctcctcctcctcaccttcctcgccaccgccgccgcggtggcgggtgctgccggtggcgcggccgcggctggctcggatgcggacgcgctgctggcggcgaaggcggtgctgtcggacccggccggcgcgctcgcgtcctggacgaacgccaccagcaccggcgcctgcgcgtggtccggcgtgacgtgcaacgcgcgcgccgcggtcatcggcctcgacctctccggccgcaacctctcgggcccggtgcccacggcgctgtcccgcctcgcgcacctcgcgcgcctcgacctcgccgcgaacgcgctctgcggccccatcccggcgccgctgtcccggctccagtccctcacccacctcaacctctccaacaacgtgctcaacggcaccttcccgccgccgctcgcgcgcctgcgggcgctccgcgtgctcgacctctacaacaacaacctcaccggcccgctcccgctcgcggtcgtgggcctgccggtgctccgccacctccacctcggcggcaacttcttctccggcgagatcccgcccgagtacggccgctggcggaggctgcagtacctcgccgtctccgggaacgagctgtcggggaggattcctccggagctcggcggcctcaccaccctcagggagctctacattggctactacaacagctactccagcggcctacccccggagctcggcaacatgacggatctcgtccgcctcgacgccgccaactgcgggctctccggcgagattccgccggagctcgggaacctcgccaacctcgacacgctcttcctgcaggtgaacgggctcgccggcgccatcccgccggagctgggccggctcaagagcctcagctcgctcgacctgtccaacaacgcgctcaccggcgagatcccagcgagcttcgcggcgctcaggaacctcactttgctcaacctcttccgcaacaagctgagaggcagcataccggagctcgtcggcgacctgcccagcctcgaggtgctgcagctctgggagaacaacttcaccggcggcatcccgcgccggctcggccgcaatggacggctccagctggtcgacctctcgtccaacaggctcaccggcaccctcccgccggagctatgcgccggtggcaagctggagaccctcatcgcgctcggcaacttcctctttggctcaatccctgaaccactggggaaatgcgaggcactctcccgcatccgcctcggcgagaactacctgaacggttccatcccggatggtctctttgagctgccgaatctgacgcaggttgagctgcaggacaacctcctgtccggcggcttcccggcggtttccggcaccggtgcgccgaatctgggggcgatcactctctccaacaaccagctcaccggcgcactgccggcgtccatcgggaagttctcaggtttgcaaaaactgcttctcgaccagaatgcattcaccggcgcagtaccgccggagatcgggcggctgcagcagttgtctaaggctgacctgagcggcaacacgcttgacggcggtgtgccgccagagatcgggaagtgccggttgctcacctacctggacctcagccggaacaacctgtccggggagataccgccggccatctccggcatgcgaatcctcaactacctgaacctgtcccggaaccacctcggtggagagataccggcaaccattgctgcgatgcagagcctcacggccgtggacttctcctacaacaacctgtccgggctcgtgccggcgactgggcagttcagctacttcaatgccacatccttcgtcggcaacccggggttgtgtgggccgtaccttggaccatgccattctggcggcgccggcacgggccatgatgcacacacctatggcggcatgtccaataccttcaagctgctaatcgtcctcggcttacttgtctgctccattgcgtttgctgccatggcgatcttgaaggcccggtcactgaagaaagccagcgaggcacgcgcttggaggctcactgcgttccagcgcctcgagttcacctgcgacgacgtgctagacagtctgaaggaggagaacatcatcggcaaaggtggagccgggatcgtgtacaaggggacgatgccggacggtgagcatgtcgcagtgaagcggctttcgtcgatgagccgtggctcgtcacacgaccacgggttctctgcagagatacaaaccctcgggaggatccgacaccgctacatcgtgaggttgctcggcttctgctcgaacaacgagacgaatctcctggtgtacgagttcatgcccaacgggagcctgggggagctgctccatggcaagaaaggtggccatctccactgggacactcgctacaagatcgccgtcgaggccgccaaggggctcagctacctgcaccacgattgctcgccgccgatcctgcaccgcgatgactctggcgcatcacagtgtatgtctgccattgctggctcctatggctatattgccccagagtacgcatacaccctcaaggtggacgagaagagcgacgtgtacagcttcggcgtggtgctcctggagctggtaacgggaaagaagccggtaggcgagttcggggacggcgtggacatcgtccactgggtcaggtcgacgacggcgggcgcgagcaaggagcaggtggtcaaggtcatggaccccaggctgtcgagcgtgccggtgcacgaggtggcgcacgtgttctgcgtcgcgctcctctgcgtggaggagcagagcgtgcagcgccccacgatgcgggaggtggtgcagatgctcggcgagctccccaagccagccgctgccgctgcagctgcagggcaaggagacgaggttcccggcagcggcgacggcgacgaatgttccgccgcgccgtcgggtgctccggcagctgatgaatctgttgaagcgccgcatggcgaagccaccaaagaaccgagctcacagtcttcgccgaccactgatctcatcagcatctgagagctgtgtcgagcttgtttttttttcttctcgttgctatgtttccttccttctccttgcgaagttcagatgtttggatgtttctagattattagggtttggtgttttaggtctcacctgcacttagggtggtctctgagattcagacatcttgtgttcatccatcttcatttaggtaggccccgggattcagacatcttgtgttcatccatcttgtgttcatgcatcttagcctcacttaggacactgctgtgtacagtagtacatatcaagctccctaaatctccattttgctgtcagaactgaaggaccatttagggggggattaaggagcctaggattatggagcagtcaaggtcgttaatgttgctgtttgtacttgtgttaataaggtgggcattgatatgttgctgtactgcacttcgccttcaagcaatcaagcaagcctcagtcaatgcaatgcaacacctttcctttgg

SEQ ID NO: 29963 - DNA, 3955 bp, Zea Mays
ggaaccctaggcgtctatccattagaaaattggactgattgaccgcaccgattccgcgatacgttcccgaatccaacccatcttcgtccgctccggccactcgtttcgccgccgtcggtcgccacccgcaaggtttggaggataagattcgggagggatggcttccggtgggcagccgcagttccggtacacgcagccgccgtcgaaggtgctccacctgcggaatctgccgtgggactgcactccagaggagctggtcgagctggggacccccttcggcaaggtcgtcaacaccaagtgcggcgtcggcgccaaccgcaatcaggcattcatcgaattcggcgaccaaaatcaagctattgccatgatatcatattacgcatcgtcaacagagccagcacaggtaagagggaaaaatgtgtaccttcagtactcaaatagacaggagattgtcaacaacaaggcaactggggaaggttcaggcaacgttttgcttgtgggaatggagggtgttgcaccagattctgtcagcattgatgttctacacgtggaatactttgatgtgccaggactgtcttagtaacttctagcacattgttttgcatgatctgaatggattagcaagccgttgtcacggagtatcatggcaggaagcatctggaacacatgtctgtgtttgtttcctctcccttactcatcgctgccctactcctcccctaccctccctcccctgcacctcttctccctacctttcccctcccataccctttcatccaagtaccctcttagggttggtcacatctaccttcgtcgatgtccgttttagttgttattataagttgtatctagttagtgcctaaggttggtggatgcatttttctcaatggaggtcgtttctgattggttacattggtagctggcatatttgtatgattattatcaagtgctcttctctggatttagtaagggaaaagaaagagaaaaggaacataaaatgtaatgcatcaataatagtaaataaatattcttgttttcactaacgccccgtttggatcctcggaattgaattccattctaataatagtaatttaggcaaatatcaattaagctagtatagttttatgcaaaatatatttgtatactattattactttattagcaatatgtgggagatatttatgtgctgcatttttactacagaggagtgagtagaagagtgtcttataagttgcagagtagaaacatattccactgatacacaaaatcattttctatcctccacccccatgaatttgagatagtcttatatctgaactgtggaaagtggcggaatatcaaattccaagccaaatagactactctattaagtaaatttcaattccttcaaaatgaatagatccaaatggcccataaggtaaatataatgaacttgattggcacaaatttgtcatttggttgcactgatttgtgtaacggtttaataccatctttcaagcaggattttagctccttattacagatctgcaagctaccaactcgagttatttgcatctgtatgttgattaaaagaattactttacaatcttctacatgatgattagattataattcttttgcaatcttttatgtgttaattacaagaactatcttgtgtttatcctccatagtgtcatttggttgacgcacctttaatacgctgttaaggcgagcttcaaaattggaacatgtggattatcagttcataaagaaacatctgtctgaacagtttaatgagtttcactcactttccactgtgaatattgtagatttgatcactttgttactggcgcatgaatgaatgcttgttagctgtgctcgtttctgatctctttctctagacaatccttacaaagcctagaaatgcattgattgatttgattctaatactttaataacagcttgatgtcacaattttacccaggagtgatgataaattcatctgcattatctgtactagcaggttgaaaggttttgaacatgtacagttgtgtgctagtctgctagtacccttgattcattgttattggttattgccgacaaaaactttattgtagttgtaagcttttctgtatgtttgtataaatattaattttgtttggcgtagagatcagacaacctttggctgccactttcaatttaagatcatttcactttccagatatattggtgcatgcatttggttttactataatgtttcacatgtggtattaacagttgacgtatgtgtgcacaggtattttctgctttcggatttgttcataagatcgctacctttgagaaagcatctggttatcaggctttgattcagttttctgatgctgaaactgcaacatctgcaaaagctgcactggatggtagatgcattcctagctatttgctaccagaactggatgtggcctgcactttgagaataacctattcagcacacagtgttctcaacgtcaagtatcagagccacaggagtagggacttcactaatccttaccttccttttctggactctgctaaagatggctctggaccggatggaaaaaaacaggaagcagagagcaatatactgcttgcttctattgagaacatgcaatatgttgttacaatagatgtgcttcatgaggtcttttcagcttttggatttgtacagaagattgctatttttgagaagaatggctttcaagcattgatccagtatccagacattcaaactgcgtatgcagcaaaagaagcactagaagggcacagcatctatgaaggtggctactgcaaactgcacctcacattttcacgccatactgagcttaatgttaaggttaacaatgagcgaggtagagattataccaaggggaatgccactccaagcagtgatcaaccttccattcttggtcctcagccaataccaagcgttggtgctgctattccaccagcacagggtagtgttccttctgcagccaccaattcagtaatgccaccaggggatccatcagttgctctaccttctaatccttccagtgagccactcctgcaagcacctgttgtttcctctggagggcctccgcattaccctaatcaggccatcctacaaggcccacttggtgttgttgcacggttcccaggctatggtgccctgcagtttgctcagggctcagctcaagctcaaatggtgcagccttcaggccaaggaagtcaacatatgtcaggtcatgtaaattatcagctacctccaggttcagcccaattcatgcagtatctcagcaacggaagccatccacttccaaacgcacctgggccacagacaatgccttaccctgccctcagtgggcagcagctacctccgggtcttcagatgatgcaagctcaaggttttggaggcctgccgttttcacagggtcctggacaaccaatgccacagttcccaatgtatggcacccagcagtttcctccgggtatggagcccaagatgatgcgcttctctgagcagggaggccagcagtttacatttgcgccgcggggtccaaatagtcgttagcaaatttgaacttagcaacgttagatcgttgatggtgatgaatggatgtcaagccttctatgttgctgttttctaaggtgaataccgatgctgttccattactaggatctatacttggtttatctctcgtactgtggccaaaacaaatgtctaatctgaggtttcgtagccttgtatttgtatcgatttcctcacgcccgcagcttctgcctgcactgtgttacattacggttatactgcagtagtggaagcaaatgtaaaagaaacctagagacctgatgtgccaggttgaaagcccgtagctgcaaactgtaggctcacatcgcgtccagttataaatttgtttgtgctatgttaagagtacaattgtacaaaccaaggtttaggagaacc

SEQ ID NO: 29964 - DNA, 2774 bp, Zea Mays
atttattctacctctttccaatgtcccattttccttgtgaatcactagtgtcgcaaatcccaatctcccagcttgcgcctaaaccctagcttgcctatcgatggcgccgaagaagcgcaaggccgatcccgccgagtcccccgccgccgtggaggcagccaccaccaaccaccgccacgagccggcgtcctcggagcccaagccacgcggctccatctacttccccatcactgacgacccgcccgaacccaacgccgccgaagaggacgaggacgagggcgccggcgacgacgaggacgacgcggaggacattgtcaagctacttgagccgctgtcgcgggagcagctcgttgcgctgctccgcacggcggcggaggcgagccccgccacgatggcggccgtccgccgcgccgttgaggccgaccctgccagcaggaagctcttcgtccacggtctcggatggggtgccggcgccgaggacctccgctccgccttctcacgcttcggcgagctcgaggactgccgcgtcatctctgacaagcaatctggtagatccaagggctacgggttcgtcctcttccgctcccgccgctctgcgctccgcgccctcaaccgccctcagctccaaatcggtggtcgtcttgctttctgtcacctcgccgcctcaggccccgcacccccagctcagtctcagaaccctatctccaacgccaaccccaatgctaactctaactccacgagcaacgcttctggatcctcatcatcacaaactgacaatatacaacgcaagatatttgttggtaatgtgcatgctgatgtggacgtggaccgcctatatgagtattttgcacaatttggtgagattgaagagggcccgttgggctttgacaagaacactggcagaccaaagggatttgcattatttgtttacaagtctgtggagagtgctcgccgtgctttggaggagccaataaagaattttgatggaaagacactcaatgtgcagaaagccatagatgggaggaccaagggctcatctggaatgaatacaaatactaactccaatcccactactgcatctgtggtcgccgcccagatgactgctccttccagtgttgccatcagcccatatgatgcatcagcatatagtgctactgtggttcctgacatgagttttgcacagcaagctgctatgctgggattaggtgcacagcaacaggcattcactcaacccaatgcaatgcttgccatgatagcagcaatgcagaacccagctgcgctagggatgagtccagccatgcttgctgctatgaacccagccttcgccgctgctgcattgggtgcaggggggcagcaggcacacacagttggtcttacaggttttggagctcagggttttgggacaccgtcgtttggagcaggtgccgctttcccaaatgcagcaggtgttcaagcagcagcagctgcatatcaaggaagtggagctcctcctggctttcaagggccacctgggtttcaggttggccaggcaactacccagacaagcactgcagcggcagcggctgccgcagctgccactgctgctggttatcaggctggggcatctgggcagggccaggtgcctggttctcaggtcggaggcactggttttcagggtggatattgacagaactagaaatattctgaatcggaatctagtggacttgctttgcgttgcatgaactatttatgggtatgggcacggtttggcctggttccttgcggggccattggcttattgtgctacaaggatggcagagctataatactatttatccagcacagtcggtgcctcacaaaccggaaagccgtccagatggacaccgccgcgcccctgcaactgaaagcctgcgccggcgacgccgcggagaagctgctgctcgccgtcgcagccgagggtcctatctgtggtgtgccagacttcaagatgaggggaaagaagagtgatgagctcgaacctgtcgatgctggcgatgaagatgatgatggtggtgacgatggggacgaggatggtgactttggggaggagggtgaagaggacgtctcagaaggggagggatatgacaacccaaagggcaatgagaccaagaagcaaagaggtgatcctgaggaaaatggtgaggaagatgaggaagaaccagaagatcaggagggtggcggcgacgacgatgatgacgacgatgacgatgatgagaacggggatgacgaggacgacgacaatggggatgacgatgaggagggtgtagatgaagaagacgatgaccaggacgaggatgaggaggaagatgatgatgaagactcgctccagcccccaaagaagaggaagaagtgaagatcttctgccgctttagttaccgtgcgctgagttctgcctggcttttcgtcatatcctcgcatttcaactttcccatagagagttaagaaggatccacacgttcagcagcacgtgtgggcttgtaggagctttatgatttgaggcaattagggacaactcttatgtcattgttgcttgcttctgtggagtcgaacagatgtttcgctaacataattcgacttgagtgatgaaagcctccagattgaatatgccttctcttttatctcgtatggaatcattgatgcagccctggttgatagcgttccttcaataaatgaattatattggcatcatgacagcttcatgtgaattgcacgtttatactgtgcgttcaaatctcaactaatgtatgactgatcgg

SEQ ID NO: 29965 - DNA, 1504 bp, Zea Mays
ccgagagtctgttctgtctggtctccgcttccgttgtgcttgataaaagccaaatctgggcctctctccctgagacggattctccaacccgtccattatttctttgctgtgctggattcgtgtgcagctaccagtttagtttatgttccaaaagtgctgtcattaccgaactaaagcagtttctgagagcaagcgtcacaatcgccatggaagctgggagaatggatcagccttgcatggcttctatcaatagccagcctttcgtggctgatactgagccagtgaagaaagccagtggggacatgcctgcggcgccgacaggaagcgggtgcttcgactgcaacatctgccttgattttgcagcagaaccagtggttaccctctgtggtcatctctactgctggccttgcatctacgagtggctgcgccctggggtggagtcaaccgccagcgacaacggcagttcggcaaggcggcaatgccctgtatgcaaggcaacactctcaccggacacccttgtgccgctatacggccgcggagggagctcaaagaagtcactggatggcatggccatcccgcgccgccccatggtacaccgggaggctgtcgagcaacagaatgcacggagccatgtcaatgaccagcactaccaccagagcacgggagacagccctcagcaccagccattgatgcaggcgcaccaccatcccgtcccccctgggttcgacttcatataccctccagcgccggtagggcgtggtttgatccactcgactgccggaggggtgctcggagggatggcagaggttgtgctcccgtgggtgctccgtggccagctgccagccagcttgcactacacgagcccataccatgttgcggcacagaacgtgaaccccaggctgaggcggcaacagatggaaatagagaggtccctgcaccagatctggttcttcctctttgtgtttgtgctgctgtgcctgctcttgttctgagacagaggactgttctatatgcctctctgtagatattgaagagggggagagagggatactaatggatgatgcgtatagtagacagggtaatggtctgtatcgacaagcatgctgatatagagttgtaatatgatgagacatgggaggtgaaatgtatatttcattcttctcgtcataacgtcagcggtttcctgatctatcgctgttggcctgttaggtaggttgcctacctgacatgtcttcatgtcagggccttcgatttgctcatttgcatatgtaaatcgaaaatgatgttttggctaccaatgtctgcgtcctcttcaatccctgttccgaaattgatacggcaattttgtagccaggacctcaggtgcacaacagcacaagtgcattttccttctatatgtgattacatgcatctgacgctgatccgggccattatatgtatgtggtatattgatcggagccaatatagattggcgtgaaagctaacagggaagagaaaaaaaaac

SEQ ID NO: 29966 - DNA, 203 bp, Zea Mays
cgttccgcgttgacagtatcgcccttgaagtaatgtaggtggaatctgacatattttcgttgagatttgggaaaacaaagtctattagattgtcaagatcactgtcactcccactataaggcacacatacctcatcaggaagacgaatgtctccatcactatttgtgacctcagttccaccacctacgcgtagcaaatactcc

SEQ ID NO: 29967 - DNA, 896 bp, Zea Mays
tctgagtctcataggagagctgctgcagccacgacctctggaaaattcaaggatgagatcgtccccgtgccaacaaaggcaattccagtcaagtgagtgatggtgctggagctgttcttctcatgaaaagatctgtggctctgaagaaagggctgcccattcttggtgttttcaggttgcccaacctgccctatcttgattagtccacattgtgtttgtcgtcgatgttcagacacattttgctcaattccttgttacatttaacgctgcttggcatcgtccattagaagctttgccactgttggagtggatctagctgttatgggcgctggtcttactgtggccattcctgctgctgtgaagtctacttacctgctatattttttctgagcaaagtcggttaaacttgtgattctttgtatgttcaggtgcccggcgcgtggctactcttctaaatgaaatgaagcgccggggcagagactgcagatttggtgttgtcaccatgtgtatcggatctagaatgggggcagcagctatgttcgagctgtgttcggcccggctggaggtatcgaccatcactcaacactgtaacccgatggtgatcggcgaccgtgagcttccatgttattgcgttctgatacttgagacttttattatgactatgtatgagatattgtctcttattagtactggatgatgagatgtgtcttattatgactatggatgagacttttgtgatgtaattgatgagacttttgtgatgtaattgatgagactatggatttaaatattgttatgtgattgtgtgtgagatgttttatgtgaaaatatgttgtgctatatagctgttgatatatttgttatgttgtggaatgtggtgtaaaataaaaataaac

SEQ ID NO: 29968 - DNA, 512 bp, Zea Mays
gaataaaacagtaccagacaaaatgataatgggaaaacaaagtggaagcggacggttcgatcgttaagatcaggcatggagagaagcttgatgactacatgaagttctttgatggtcttcctgcttagatgtttattatctgcgactgctacggacgatgttttcttggggataattggattttctttgtcaagctcatttttgctttcttgtggttatgtaatgttactggatactggatagctagttggtgcatcctcaacttccttttcatttctgttagtttcgtcaccaagttcgtcctcaattgctatttggttgtaacccagctgtaggatgcctggctagcctgtaaccgcctgagcgtgatttggttgggaactgacggtttcacctggtgagacatgcctgcgaaccaaatctgtcccctgggctgccgtatgtgtgataccaaaatctgttgtagccttgtaggtttactattgctgcatatagtataatgatgtctttgt

SEQ ID NO: 29969 - DNA, 5840 bp, Zea Mays
aaacccccgccccgcccagatccagatccacgcggcgcggcgcgaccgcggctaccggatcccgccgcggaataatggcctccgcggttgcggcgccgccgccaaccccgccggagtccgacccgcgcctcgtcgagatcttctcccccttcctcgagaagctcataaaaaatgcctcgtggcgcaacaaggcgcactccaagctctcgcacaccgccaagtccatcctcgaccgcctccagaagcccccgccgccgcccgcagccgaggcgcaggcgccgtccacgccgacctcctccccctcgacgccgacctcctcttccgcacagcctggtccgttgcgcagcctgtcgctcgcggactcggagctgctcctcgcccctgtgatctcggcactcggctcgggcagcgccaagctcgccgaggccgcgctggagctccttcacaggctgatcgcacactcctacatccatggcgaggccgacccatctgctgatccctcagcacagctcgtcgcctcactcctggacgccgcctgcaatgcgcttggccttgatgacgagcacattgagctcctcctcctcaagacactcctctcggcggtcacctctacgtctgtacgcctccacggcgattgccttctacgtgccgtgcgcgcatgttatgatatgtacctcgggagccgtagtgccgtcaatcaagccactgccaaggcttcgcttgtgcagatgctggtgattgtgttccgccgaatggaagctgactcctcgaccgtgcctgtacaacccatagtcgtggctgatgtgattgagctacctgatgcaatttcgggctcctcgcccactgctgaccccaacgttgtacagggattcatttcgaagatcattggtgacttcgatggtgcactcacacctctggctcggacaacttcatcagcaggggcaggacccaccgttgcccatgatggtgcatttgagacaacggcagcggcagaggaaggggcaaacccagcggatttgcttgattcaacagataaggacatgcttgatgccaagtactgggagatcagcatgtacaaaacagctattgagggtcgtaaagatgagcttggtgtcgagggggcagtggttggcaccttggacgatgatgctgatgtgagaattgggaacaagttacggagggatgctttcttagttttccgggctttgtgtaagctttccatgaagacaccacccaaggatgcaccagcagatcccatagtaatgcggggaaagatccttgctcttgagcttctcaagatcttgcttgaaaatgctggggctgtgttccggaccagtgagaggtttctcggtgctatcaagcagtatctatgcctgtcacttttaaagaactgtgcctcatcccatatgattgtttttcagctatcttgttctatttttattagcttagtggcaagattcagaccaggattgaaggcagagattggtgtattctttcccatgatcatcttgagagtgttggaaaatattgctcaaccaaattatcaggcaaagatgattgttcttcgttttttggaaaagctctgtggatggtaaatggtctactaaagacagctcaaggacctcctgctggtgtccctaccacattggtaccacctcaggacaccacaatgaaaagtgaagcaatgaaatgcttagttgctattctgaggtccatgggagattggatgaataagcagctacgaattccagatcctgcttctcctaatgtagaatcagagaagaacgacaatgatgatggcaatgagcttccgcaggcagataacaatggagatgagtctagtgaagcatctgattcacattctgagttatcgaatggaatttcagaggcagcatcattggaacaacgtcgagcttacaagatagagcttcaggagggtatctatttgtttaatcggaagccgaagaaggggattgagttccttgttaatgcaagcaaggtgggggagacaccagaggagatagctgcgttcctaaaaagtgcttctggcttgaacaagactatgattggtgattatttaggtgaaagggaagatttatcgctgaaagtcatgcatgcatatgtggactcatttgattttcaaagactggagtttgatgaagcaattagagctttcctccaaggcttcaggttgcctggagaagctcagaagattgatcggattatggaaaagtttgcagagcgttactgcaaatgtaatccaaaggccttttccagtgcagatacagcttatgttctggcttattcagtcataatgcttaacactgatgcacataacccaatggtcaaaaataagatgtcaccagaagatttcattagaaacaatcgtggtatcgatgatgggaaggacctacctgaagaatttatgagatcattgtatgaaaggatttggaaaaaggagattaagatgaaagaagatgaatttgttccacagcagcaacaatcaacaagttctaacaaaattcttgggttggataacattcttaacattgttgtacgcaagcgaggttcatctatggagacaagtgatgacctcattaagcatatgcaggagcaatttaaagaaaaggcccgcatgtctgagtctgtattttatccagccacagatgtagttgttttgaagttcatggttgaggtttgctgggctcctatgcttgcagcattcagtgttccacttgaccagagtgatgatgaaattgttgtatcccagtgccttgaaggatttcgctctgcaatccatgttactgcagccatgtcaatgaagactcaaagagatgcatttatcacttcacttgccaagtttacatcacttcactctgctgctgatattaagcagaaaaatgttgaagccattaaggcaattctattaattgcagatgaagatggaaattacttgcaagaagcatgggagcatatattgacatgtgtttctcgttttgaaaatctacatcttgttggagagggagcacctccagatgccactttctttgcgctgcagcagccggaccttgataaatcaaaacaggctaagtcatcgattcttcctgttctgaaaaagaaggctcctaatgctacttcagcttctaaaagaggctcttatgatagcgctggtgtcggtggcaaagcttctggtgtggatcaaatgaataatgaggtgacaagcctcttggagcaagttgggatggctgaaatgaaccgtgtatttgtaagaagtcaaaaactcaacagcgagggtataattgattttgtgaaggctctctgtaaggtttcaatggaggaattacgttcggcttctgatccacgagtttttagtctgacaaagatagtcgagatagcgcattacaatatgaaccgcatcagacttgtttggtcaagtatatggcatgtcttgtctgatttttttgtcaccattggctgctcagaaaatctttcaatcgcaatatttgctatggactccttgcggcagttatctatgaagttcctggagcgtgaggagctcacaaactacaatttccaaaatgaatttatgaagccttttgttgttgtaatgaggaagagccgagctgttgagatcagagaacttatcattaggtgtgtctctcaaatggtattggcccgtgttagtcatgtgaagtcagggtggaagagtatgtttatggtctttgcgacagcgtcatatgatgatcacaaaaatattgtactattggcctttgaaattatagaaaagattttgcgggaatactttccatacattactgagactgagacaacgactttcaacgattgtgtgaattgtcttatcgcgtttactaacagcaggtttaacaaggatataagtcttaatgcaattggatttcttcgattctgcgcagcaaagttggccgaaggtgatattggatcctcaaggttgaaggacaatccttcaaacagtaatccaccctcgcctcatttgactaatgatggaaagcaggaatgcacagttcttgttgacaaggaagaccatatacacttttggtttcctttactagcgggactgtctgaacttacctttgacttaagaccagaaatcaggaaaagtgctttgcaagtgttatttgatacattaagaaaccatggccatcttttctctctgcctttatgggagaaggtgtttgattcagtgcttttccccatatttgattatgtacgtcatgctattgatccatctggtaatcctccacaaggacaaagcgtggaaaatgatcctgcagaacttgatcaagatgcttggttatacgagacatgcactttggcacttcagttggttgtagatctctttgttaagttctatgatacagtcaatcctcttctaaagaaggttctgctgctcttgacaagtttcataaagcgtccccatcagagtcttgctggtataggtattgctgcatttgttcgtttgatgagcagtgctggatctatgttcgtggatgaaaaatggctagaggttgtattgtcattgaaagaagctgccactgagacacttcctgatttcacttatgtttcatctggagcctacctggaaaatgtgccaacagaaaatggagtctctgctgacaatagagaggacgaatctgaaccagtagcggatgacaatgaagaatcctctagatcaaggaatctatactttacaattggtgatgccaaatgtcgagctgctgtacaactcctgttgattcaggctgtgatggaggtatataacatgtacagaggacagttatcagcacagaacacagtaatcctcttcgaagccttgcatactgttgccgcacatgctcacaaaataaacagtgatagtgatttgcgttccaagttgcaagagttgggctcgatgacacagatgcaggacccgccattgttacgccttgagaatgagtcgtaccagctgtgcctcagtatccttcagaacatatttctggacagctctcctgatcatggaagcacagaggtggtggagagtcaccttattggcttgtgcaaggaggtccttgaggtatacttgagcacagcaagaccttctcagccttccagtggcacacagccgctaggccattggcttatccctgttggttcatcgaagcgaagggaacttgcggcaagagcacctcttgttgtctcaaccctgcaagctatcagcggactaggtgactcagctttcgagaagaaccttcgccagttctttcctcttctcgctgggctcataagctgcgagcatggttctagtgaagtacaggtggccctgagtgatatgttcagcacttgggttggcccactcgttctccagtcttgctgatgctgaacatcatgttatacatagtagtatacatcccatcgtgttcctcctttcctccattatgttatgttaatcttttagtcgctgggagttcatattgttgtgctgaactgatcatgcagatcaatttttccttgacgttattttcttgttcgtatcgggaggagtgtatgtcactatagagaactgaattatgtacggtagtttagctaaaattgtgcccattctgttcctaatgtgctgatttctagatttttaggcatgttttgcatgcttttgctcagtagcgtttctcctttctggaattctggaatgtggtagggttggattataattcttgcgagttgggtgtgttaggctatcttcttttatcttaccttctattttaaactctattatgtaattagtgcaatttatagtataaaacattgttttgcacgtccatttacac

SEQ ID NO: 29970 - DNA, 2403 bp, Zea Mays
ataaacactgtacgagatcactgaccataatcattagcaatttagcattagcctcagctggcgtaccgtcgagtccattcccacctttctaccccttccagaaacctccaggatccgactccaatcgaatcgccaaagcagacaggggcgctcgcgggggcgccgagctcgacggggcgagatggccgggaacgactggatcaacagctacctggaggctattctggacgctggcggggccgcgggagatctctcggcagccgcaggcagcggggacggccgcgacgggacggccgtggagaagcgggataagtcgtcgctgatgctccgagagcgcggccggttcagccccgcgcgatacttcgtcgaggaggtcatctccggcttcgacgagaccgacctctacaagacctgggtccgcacctcggctatgaggagtccccaggagcggaacacgcggctggagaacatgtcgtggaggatctggaacctcgccaggaagaagaagcagatagaaggagaggaagcctcacgattgtctaaacaacgcatggaatttgagaaagctcgtcaatatgctgctgatttgtctgaagacctatctgaaggagaaaagggagaaacaaataatgaaccatttggactcaccttgattgaggctgctgcatatggtctacccatggttgccacccgaaatggtgggcctgtggacatacatcgggttcttgataatggaattcttgttgacccccacaatcaaaatgaaatagctgaggcactttataagcttgtgtcagataagcacttgtggtcacaatgtcgccagaatggtctgaaaaacatccataaattttcatggcctgaacattgccagaactatttggcacgtgtagtcactctcaagcctagacatccccgctggcaaaagaatgatgttgcagctgaaatatctgaagcagattcacccgaggactctctgagggatattcatgacatatcacttaacttaaagctttccttggacagtgaaaaatcaggcagcaaagaagggaattcaaatgctttgagaaggcattttgaggatgcagcgcaaaagttgtcaggtgttaatgacatcaaaaaggatgtgccaggtgagaatggtaagtggtcgtcattgcgtaggaggaagcacatcattgtaattgctgtagactctgtgcaagatgcagactttgttcaggttattaaaaatatttttgaagcttcaagaaatgagagatcaagtggtgctgttggttttgtgttgtcaacggctagagcaatatcagagttacatactttgcttatatctggagggatagaagctagtgactttgatgccttcatatgcaacagtggcagtgatctttgttatccatcttcaagctctgaggacatgcttaaccctgctgagctcccattcatgattgatcttgattatcactcccaaattgaatatcgctggggaggagaaggtttaaggaagacattaattcgttgggcagctgagaaaaacaaagaaagtggacaaaaaatatttattgaggatgaagaatgctcatccacctactgcatttcatttaaagtgtccaatactgcagctgcacctcctgtgaaggagattaggaggacaatgagaatacaagcactgcgttgccatgttttgtacagccatgatggtagcaagttgaatgtaattcctgttttggcttctcgctcacaggctttaaggtatttgtatatccgatggggggtagagctgtcaaacatcaccgtgattgtcggtgagtgtggtgacacagattatgaaggactacttggaggcgtgcacaaaactatcatactcaaaggctcgttcaatactgctccaaaccaagttcatgctaacagaagctattcatcccaagatgttgtatcctttgacaaacaaggaattgcttcaattgagggatatggtccagacaatctaaagtcagctctacggcaatttggtatattgaaagactaaatctttgatctttgctggtcagcagaggaatcaaagcaggaatgtaggatcgaggagagtgacaggacttcccctctgtgcacttcgccgaaaagtaataatgggattgctatgcatggcccttgttgtacactagaaaattgggcacgcaaacttgtgtcagtttttccgctgttgcgaaattcagtgatggtgtttttgtaactataccaacctgtgtcagttttgccgttgttgcaaaactcagtgatggtgttttttgtaattattatacatccgaataataagactggtgtttccagacagactatgcaagctaaggggaaatcacgattttcctagatcaaatatgtaatatgttcttttccgatgca

SEQ ID NO: 29971 - DNA, 284 bp, Zea Mays
cggatttaatttcatcatgcagtgtcacacccggatttaagggacaaagccggatgcatctcatacatgcgccaaagaagacaacatatataataacagagtgtatagagataaatgtcacaataacatcagagtacttattacatagcgaaagtcatacaaaaataaaagataaatataaaaacaaactaaatccatccttggtgccaataagtcaactgggagacgccacctagatcagatcaaactcgtcgttttgtggctcctcttgaaccacatgttct

SEQ ID NO: 29972 - DNA, 2338 bp, Zea Mays
cagcgatggcgcacccggccgcggcggcatcccgcccgcagccttccttcaatggcgcaccccacccgcgaccttcctttaatggcgcaccaatcaccccgcccgcggccttccttcaatagcgcaccaatcatcccgcccgcggccactaatcaacgccgcatcccgcccgaggccttccttcaatggcgcgtggaaggtcgtctgttattaattggtgcgaccacggacgacaccatggctccgcccgacgcccctctccccgcaactcgcaagcccgatattgtcggcgttctcgcacccaccgatttggcctgcctcccccaggattgccggcgttctcccccctccccgtcgcgccgcgcgatgccagccgtgattcccgcgtccgcccgccccacatctacaaacttgctctgcagatgtcctcccgcccatcgtcatccatcccctgccgccgccacggacgaccttcctcggccgccacaagggggcttctgtaagcgagcgtgcagggggagctataggcgagcgcgcagggggacccgcacacgacgacgcccgcgaggatgctggaggacgtcatcgccgtcgcgctcaacattagggcctccgacgcgctctttttggcctagaaacggaggaggcgatgcggcgccgtctcgcccgtcagccggtggccgcaccaatgagttccacgccgccacgctgcaccttcctcgtcgtcggtgtcctcctcgaacctgttgttcgatcgaaattcgacctgaaaacgggcacaagagatgtccgtaacacgggtggacttgagctgagaacaagaagcgaagcaactcgctggatctcattctcgaacgccaatcccccagtcccctcctccgtctgctggccagaccagacctgctctgctctgctctttttcctccataagcaacatggagaaatggcctgtcactgcctcccaactctctaacagcgatctctcgcctgggcactaattagtgcttaggctaatgtatgatcggaggatccccgacaaacacgctggcctaatgctctcccatcccaagtgatcctccgagaactagctggtgcgaaggcaggatgtgttgtctgcctctgtgacccccagtcgctattgttttgttttgtgggtggttactgttacctgcttctgaaacaagcaacccactgcagtgagcaaaggaagaaagaaaggtgtggtgtgtgcccgttttcaggtcggtcgtgactttggttatccattgaaaagatatgcttggtggttgtgctgaagaacaagtatcccacggaaccacaaccgtttgtattatctggtgatttcctgcattattagctggcctaactaaaccatgcgctcagaccctaaaccagctgtaagtctgtaactgaaaagcacagtgcactagcggaatggggttccttgctttttggagcgtttccccagtcggatcggcggcagagcaggtcacgtggacggggctccttgttgctggaactaaataccgtggagagtttgaatgcactggtgccacaacactggatgggtataggaagcatatagagaaagatcctgccttggaaagaaggtttcaaccagttaaggttccagagcctactgtggatgaaacaatacagatcttaagaggacttcatgagagatatgaacttcatcacaaactgagatacacagatgatgctttaattgctgctgcacaactgtcttatcagtatatcagcgatcgttttctgcctgacaaagccattgacttgattgatgaagctggatctcgtgttaggctgaggcatgcgcagctccctgatgaagccaaagagctggacaaagagctgcggcagataagcaagcagaaaaataaggctgtacgtggccaagattttgagaagaatctgtagcaaatggctaacgatgaggacatccatcacttgtttatgacaatagaactgatatgttcaagattccgtagcaacgcacgggcacccaactagttctccacatatgggaataacagggcgaccataattcatgacgagtcgtcaatgtccactgcctcagctaaaagaagtttatcaaagatgaacttattgaaaaactattaaaatcaactatgtggcatgaaagattaaattgtatagctacatgttatatggacaagggtatattgaaaaatgtggatctaaacattgtcctcacatattttgcttcaataaatattcgagtgagttatttattttgagagacattagagctatatgtaacctaaagttgcaattaagaatactctgaatttatggtccc

SEQ ID NO: 29973 - DNA, 1065 bp, Zea Mays
tatattaaaatatgttgaccccaataatcctatcaagattttcctttggaggattggcctgctggtggacaaggaggcccccgccctggtcctggtgctgctgctacagctccagcaccagcaccggttgctgctcgcccataggctttagcttttcgaccgtgttgaaagtcttctgcccacgcagtttcggagttgtcgcctatgggtgaaaaacaagaagatggaaaatacaagcactctgtggatctcccgaaaacaacatttgagctgagagcgaattctgtacagcgggagctagagctccaaaaattatgggacgataatcaggttctgaaaagggtttctgaggaacactgggtgatcttcacatgggccatgcgctcaataaaatcctcaaggattttataaatcgctacaagctgcttcagaatcataaagtgtcctttgttcctggttgggattgccacggccttctaatagaactaaaaggtggcttgtgcgaacgaggcgtggcaatcgatgagcagtggcaaacccaaaaatcttcaaaagcctaggcaaaagtagtaactaaagatacatcaccttgtccagtttttctgcttttacttcgactatatgtcattgtgccacaaaaaacttgtttcatcgacttatgatgagtcttctcaattgtttcttgaatatgcttttttagaaccaaattgaattttacaaggtgcaatattgattagaaaaaggtgtgatgctgactgggaaagcgctactcccttgtatgaattagctggtcgatgattttgtttcccatcctttttaatttcttgacatccgtttgttcattggggagcacatatgtagaatgatgattaatgtttttaaatattaatagattttatcataatatattgccgccgtaacaacgtacgggcatacaactagtcattgaagaagtcaaaaagatgagagaagcacggtaagagacagagagacaccatgagaagttctttgagttcgaaaagtgtaagcttgagatggaacagactaaacttgaattggagcgag

SEQ ID NO: 29974 - DNA, 6765 bp, Zea Mays
ccccccgcggccgcgctgcaccagagcctagagccgccactccccgggcccacccgcagcgaccgaacccgcgcagatccgcgattggtcgacgtctcctcctccttcccgttcccctccccctccccctcccccctccccgcgtcgctcgcagcagccccgccccgacaaatcccccattcccaaatcccccctgccccccgccgaaatcaacgccgccggctccgcatcctcgacccgctcccgcctccgttcggctgccgtacggaatctcaggtaccccgtcgccgaggccgccccctgtctctcgcggccccgccgggattctagggtttcggtcgggccggcccaagggagtctgcaaacagcgcgggtcaggctcccccgcgccgatcgccgcgagctgcccccgcgcgggcggccgtgggcaccgcttccactcgctagccttcctggtacatgcggccgctgccacactggtgctcctgctcaatcgggaagccccgcgcctcggattccgtgcagggtagacaatttcctgctaccgcgctgctgcgtgtgggatgacctgagcctccgcctgccgccaagatgaatgtggggcaggctgcccacctgtccgggcagatgtctgggcagacagcgcagatgaatcaggtccctgccaccggtgtcggcattggcgttggcactgccgatgggctaccgcagcaccagccaatgcaggagatggcggcgttctcgggaacggaccagcagtttgtcatgtttcggaccacaatgcgcgaaaagatatttaactatataggaaggaaacagtcatcggctgagtggcggaagcggttgccagaactggcaaagcgacttgaggagatcttgtacagaaaattcccaaacaagactgactactacaatatgatgaagggaccagttgagccgcaattgcagtttgctattaagaccttgagcgctcagaaccaacacaatcaacaaaacccacaaatggcaaggcaaatagcatcatcctctagctatggtactatgattcctacccctggtatgacgcaaggcaccaatgcaagttctaggattccttatgtcacagaaaacaatggcctttcatcgtctggtgcaggcatggttcctcagaatgctaacatgggtgcctcgatgcaaggtccaatgtctaatggcttccaacatttaaatgccagcattccacaaaattctaccacaaataacatacaatctacaatgggttcagttggtgtccagcgacaactacctcatatgattccaactccaggatttagtaatcaacagaatgtaccttcaaatcctgactattcaaatggaactggatatttcaatggtgagccagctgtggcatcacatatgcagcaccagaaccaatttcctagcaaccaaattcagcatattgggggccacaataattctggaatacattcaagcatgctggacagctcatctgcatacggtttatcagatggacacatgaatggtggaataggagtgcatgggtcaaatatgcagctaacaaacaggaccacggcaccacaaacatatatgaacatatccccttacggcaattcgtccaaaccgatgcagcagcaattcaatcagcatcctcagcagagaataccaattgaaatgactggttctggcagcttctatgctactggctctacccctttaaccacagcaaatagtcagagcatgaatgttgcaaatttgcagtctagatcaagaatgaatcagatgttggtttccaatcagttaaacattcagtccattcagcaacagccccagataaaaaatgaggttttggatcaaacagaaaaggtgaattttcagtcaccacagttgactcatgatcaactactacgccaacacccaatgccgcaacatcaggtgcaacctaattcccagtttgttcaaaatcagtatcatataaatcaacagcagccaaattcacagcatcagcaggctatgctaaggaacaattcctttaaacagtctcaaatggcttccacccattcaatgcaactggcagaacaggggtcactgctacacactgaactggtatcttcacaaactagtgatcctgctgatcttccaagcttccagggtcaataccagcaaagaaatgctcttgacaatgttaaaggagggcagatgcttggtcatctatctagctctcaaaattttcatccttctgtctcacatggttctcagcaattgttgccctctaaccagcagcttgatgacggttctaatgctgtaagctatgtgctgaaaggatcgcaggcagagcaaatgctgcgtcctcaatggcagccacaaacaatggaaaaggctcctgttactactaattcaacactcgaaaagcaaatacaagaagatttttgtcaaagagcaatgtcgcaagatggagcacagcaaccattttcatcagattggcgtctttctaattgcactgcagcttctattgatcctgcattgccgaagcctgcagctggagggtttgaacaggtcaatggaaatatacattacctccgtcagataaagtggttgctgctactgtttcatgcaaaaacatgcacataccctgttggaagttgtaagttccatggttgtgttcaggtgcaggagcttttgaagcattttcagaactgccaaagtaaagattgttcatacaggagctgcagtaagtcaaaaatgatgtctcaccattataaaacttgtgtcgatgaacaatgtcctgtgtgcagcgttgtaaggaagtttttgcgccaatcaactgaacaggcatctaagcaaaaagctctcgagtctagaaaacttgctcaacaaaatgtgcctcagagaatcatgaacgggatagaaggtgatagaatggatgttgacccaatgtcagttgaagcatttgatgatcaaccattcgttccaaaacgcttgaagacgcatcctccatcacccagtggcctagagaatgatatctctgtagtctccaattatcatgtaaactcaggctttgcattgcaggaaacacagcctgagcagcttgaccacaataacaggacatcatatctgaaacgagaggtagatgcaaaggctgacatgcgagctcctcaaaagcccataaaaattagttatggtattgatggaaatgtgactgcatcaaggcataatgtgattcctggtgttcccagtgagattaattctcatatcaagcaagaaaacttgttggttgacaaagagacaagtgaaaccgcccttgaggttaagaatgaaacaaatgatccaactgatgcgactgtgtctaaatcaggaaaaccaaaaataaaaggtgtttcaatgacggaattattcactccagaacaaataatggaacatattgacagtctaaggctgtgggttggtcagagcaaggctaaagctgaaaagaatcaagctattggtcattctgagaacgagaactcttgccagctctgtagagtagagaaacttacttttgaacctccaccaatatattgttctccttgtggagctcggataaagcgaaacgcgccatactacactgtgggtactggtgatacacgtcattatttctgtatcccttgttacaatgagtctcgtggtgagactattgaggttgaaggtcaaacatttccgaaggcaaggttagagaaaaaaagaaatgatgaggaaacggaagaatggtgggttcaatgtgacaaatgtgaatgttggcaacatcaaatttgtgctttatttaatggaagaaggaacgatggaggacaagctgaatatacttgccccaattgctatgttgaggaggtcaaatgtgggctacgcaaacctttaccacagagtgctgttcttggggcaaaagatttgccgagaactgttcttagtgatcatatagaagatcggctatttaaacgacttaagcaggagaaacaggaccgtgcagctgctgctggcaaaaatattgatgagattcctggagcggaaggacttgttgtcagagttgtttcatcagtggataagaagctggaggttaaaccacgttttttagaaatttttcaagaagacaactaccctacagagttcccttacaagtccaaggctgttctcttgttccagaaaatagaaggtgtggaagtatgtctatttggaatgtatgttcaagaatttggtgctgaatgctctttcccgaaccagcgtcgtgtttatttgtcatacttggattctgttaagtacttcagacctgagattaaaacagtatctggagaagccttgcgtacatttgtgtatcatgaaattctgataggatatcttgaatactgtaaactgcggggattcacaagttgttacatatgggcttgtccacctttgaagggtgaagattacatcttatattgccatcctgagattcaaaagactccgaaatctgataaactgcgtgagtggtatctatctatgcttcggaaagcttctaaggaggaaattgttgttgagctcacaaatctatatgaccatttcttccttactatgggggaatgcaaggctaaggtgactgcttctcgcttgccatatttcgatggagattattggccaggagctgcagaagatatgatcaatcaactccgacaagaagaagacgaccgcaaactccagaaaaagagtaaaacaaagaagattattacaaaaagagctcttaaagctgctggccacaccgatctcagcgggaatgcttccaaggatgctatgttgatgcaaaagcttggtgaaaccatatatcctatgaaggaagatttcattatggtccatttacagtattcgtgtagtcactgttgtacccttatggtgtctggaagacgttgggtttgtcatcaatgcagaagcttttacatctgcgacaagtgttatgatgcagaacagcaacttgacgacagggagaggcacccgagtaataatagagacacacatatgctccatccggttgatattcttggggtgcccaaagataccaaagatagagatgacatcttggaaagtgagttctttgacaccagacaggcattccttagtctttgccaaggaaatcattatcagtatgacacacttcgacgcgcaaagcattcatcaatgatggtgttgtaccacctacacaatccaactgcaccagcatttgtcactacgtgcaatgtctgcagtcatgatattgaaactggtcaaggctggcggtgcgagatttgtccagattttgatgtgtgcaactcttgtttccaaaaaggagtggttactcatcctcacaagttaacgaaccatccatcagctgctgaccgtgatgctcaaaacgcagaagctcggcaaatgcgtgtccagcagctaagaaagatgcttgatcttctggtacatgcgtcgacatgccgctctggtagttgccagtatcccaactgccgaaaagtcaaggggctattccgtcatgggatgcagtgcaaaacgcgtgcttcaggagggtgtgtcctttgcaagaaaatgtggtacatgcttcaactccatgcccgagcttgcaaggattcagactgcaatgtgccgcggtgcagggatctgaaggagcatcttagaaggttgcaacagcagtctgattccaggaggagggctgctgtgaatgaaatgatgaggcaaagagcggcggaggtcgctgcaaacgaatagttgcctctgtacaggtatactttgtggaaagaggataggaagaagtatgcatgcagggttgcactcctcacccccacaccaaggagaaagcttgggatggttgataaattataggattggtaggtaaagatcagccgcttcacatggatttcttacgacgaagatctcggccatccttcgcctatggttaacaacatataggctcgctgaagcagcagggtgcgccaccgtaggctgtctgtaactgtcgcttgcaccccctccagtgctgaccagctacaccctgcgtgccgcaccgatgctgtcgtcgactggggcgcattgcaactcctgggtgtggtgaattctttgatttgacctgtactagctgaactgatcttctctgttgctgcttgctgatgatggtgtataataggtgtctctggacagttgtcagtcgtgcattgctgaagatttggtgtagctgttgtttgtcccccccctctccattgtcttcttgtctccaggccaggagaggggtataggttaaaaaagggtaaaaagggatgggcgttattggacaagtatttcttttatttctgccccccattttgtaggactcatctttgttaaagtataaagcaaagtaaatcctccatgtcttctcttgtagcactgttgctccatagattttctttctagtgcgggtggcacaggagggcgacaagttgtggtatgtatactcttctgctatcagtttttctggtttttttgacgaaacgaatggattttggttcggtcgtccggaggatggaggatgcagttgaaagggatgtgttgatcctgtttgtattaggggaggataagaggatccatagaatattggtcaaaacatgcgcggtctaactctcatgctatttggtaggatataattgttgtgataaactatcctaatttatctctcttggacatctatcctttcaattagtattggagtctcgtactaacttatttatgcttcaccgcctagagaaagat

SEQ ID NO: 29975 - DNA, 2307 bp, Zea Mays
ttcctcctgaaaaaatcccggacgtatatgctaatggttccactgaagagcaggcgtttatacaaaatcttgcactcttcttcacatcattttttaagaatcacatgcgtatactggaaacaactcaagaaaatattgctgctttgcttatgggtctcgagtaccttattggaatttcatatgttgacgatacagaggtttttaaggtgtccttggattactggaatgtatttgtattagagctatttgaagcacacaatcaaatggaacctgcagtaactgtaagcatgatggggcttcaggcgcagatggttcctggaatggtagatgggggcacagctgttaaacagaggagacagctttactctggcccactctcgaaactacggatgctgatgatttgccgtatggcaaagcctgaggaagtacttattgttgaagacgaaaacggcaatattgtacgcgagacaatgaaagacaacgacgttcttgttcagtacaagatcatgagggaaacactgatctatttatcccatcttgatcacgaggacacagaacaacagatgttgaagaaactaagcaagcaattaaatggagaagactggagttggaataaccttaatactctctgttgggctattggatcaatatcaggttctatggtagaggagcaggagaatagatttctggttatggttattcgtgatttgctaaacctctgtgaaatcacaaagggaaaggacaataaagctgtgattgtatgttgttggtcagtatccaagatttctcagggctcattggaagtttttgaaaactgtggtcaacaaattgtttgagttcatgcatgagatgcatcctggagttcaggatatggcatgtgataccttcctgaaaattgttcaaaaatgcaagcgcaagtttgtgacacaacaggtgggcgagaatgaaccatttgtttctgaacttctgtccaaccttgctacaaccatcgccgatcttgagccacatcagattcatacgttttacgaatcagttggccatatgatccaagctgaatctgacaacactaatagggatgaatacctcaagagattgatgagccttcctaaccagaagtgggcagaaataatcggacaggcaagccaaagtattgatatcctgaagaaccaagatgttatccgatcagttctcaacattctacagacaaacacaagtgttgcgagctcacttgggccacacttcttcccacagatttcactaattttcttggacatgctaacagtctacagaatgtacagcgagcttgtatcaagcacgattgctgaaggaggaccctttgcctcaaggacgtcatttgtaaaactcttgagatctgtcaagagggaaaccctaaagttgatcgagacttttgtggacaaggcggaagatttgccacatataggaaagcagtttgtaccaccaatgatggatcctgttcttggtgattatgctagaaatgtacccgatgcaagggagtctgaagttctgtccttgtttgcaacaatcattaacaagtacaaaggggaaatgcttgaggatgtgcctcgtatatttgaggctgttttccagtgcacccttgagatgattactaagaactttgaagattatcctgagcaccgcctcaaatttttttctttgcttcgtgcaattggcacccattgcttccaagcattaatccagctttcaagtcagcaattgaagcttgtgatcgattcaattaattgggcgttcagacatacagagagaaatattgcagagactggccttagcctgttgttggagatcttgaaaaaattccaggcttcaggattccaaaaccaattctacaaaacctactttttgacaattgagcaagagatttttgcagtcctcacagacacattccacaaacctggtttcaagcttcatgtttcggtgctgcaacacttgttttgtgcggttgatggtctaacggagcctctatgggacgcgtcttctgtaccttaccaatatacggataatgctatgtttgttcgagattacaccataaagctcttagggacatcatttcctaacatgacagtaaccgaggtgacaaagtttgtagatggtcttcttagttcaaaacttgatcttccaagcttcaaaaaccatattagagacttcctggtgcagtccaaggagttctcagttcaggcccttggcgccaccagcagattggcgacgaattctgttcctgctgctgccttgtgtttacaagtgattttgtcttgtgatggacatgtcctg

SEQ ID NO: 29976 - DNA, 5126 bp, Zea Mays
atatggctgataatggtgatgccaaagggggatctggcgcctatgcaattaatatagagaattttagtaagcggctgaaggtattctatgaccattggaaggagcacaagtctgatctttggggctcgtctgatgctattgcaattgctaccccacctccttctgatgatctccgttatttgaaatcatcagccctggatatttggttacttggatatgaatttccagaaacaataattgttttcatgcacaagcaaatacatgttttaagcagtcagaagaaaggaaatcttattgggaccctcaagaaggctgcaaacgaggctgttggtgttgacattgtgttgcatgtgaaaaccaagaatagtgatggtgctgacttgatggatgacatagtgcatgctgctcgtaatcaatcaaaatcagataagccagttgttggacacatagccaaagaggcacctgagggtaagcttcttgaaacatggataaaaaaattatctggatcaggcctacgactcgttgatgtaacaaacggcttctctgagctctttgctgtgaaggacaccacagagatcacatgtgtgaagaaggctgcttacttaacttcatccgttctgaaaaattttgtgattcctaagttggagaaggttatcgatgaggagaaggaagtctcacactcatcgttgatggatgacgcagagaaggctattctggacccactaaaggtcaaggtgaaattgaagcctgataatgttgatatatgctaccctccagtctttcaaagtgggggtaagtttgatctaaagcctggtgcgtctagcaatgacgagtacctgtattatgattcagcaagtattatcatctgtgcaattggttccaaatacagtagctattgctcaaatgttgctcggacatatcttatcgacgctacccctacacagaataaagcatatgagacccttaggaaagctcatgaagctgctattcaacaagtgaaaccaggcaatcagatgagtgcagtttatcaagctgcagtggctgtgattgagagggatgcacctgaacttcttcctaatctaacaaagtcagctggaactggaataggccttgaattccgagaatctggcttaaatctgaatgccaagaatgatcgtaggataaaaaagggaatggtttttaatgtatcccttggtttgcataacatccaggcagaaacaaccagtgagaagacaaagcagttttcactattattagctgatacagttttagtcaatgaaagaggacatgagatcttaacagcaccctgctccaaggcattcaaagatgttgcttattcgttcaacgaagatgatgatgctgttgctgctgaggttaagataaagtcgaagaccatagatgttatgccaaccaaggcaactctcaggtcagacaaccaggagatgtcgaaggaagagctcaggagacagcaccaggctgaacttgctcgccagaagaatgaagagactgctagaaggcttgctggggttggtactggatctggtgacggacgtggtcctgcgagggcttcaaatgagcttgttgcatataagaatgttaatgatgtaccatttgtaagagatttggtgatccaagtagatcagaagaatgaagctgtcctcttacctatttatggtagtatggttcctttccatgtttctactgtcaagagtgtgacaagtcaccaggacaaccgcacctgcactatccgtatcttcttcaatgtgcctggcatgccattctcaaatgatagcaagtttaattctcaaggtgctatctatctgaaagaaattacattccgctcaaaagatccacggcatagcagtgaagttgttcagcagatcaaaacattgaggaggcaagtggcatcaagggagtcagagagagctgaaagggcaactcttgttacccaggagaaacttcagattggaagcaacagaatgaagatgatgaggctttctgatgtgtggatacgacctgcatttggtggtcgtgggaggaagctcacaggaaatcttgaggctcatttcaatggtttcagatattctacttcaaggtctgatgagcgtgtggacatcatgtttggaaatataaagcatgcctttttccagcctgcagagaaagaaatgattactctccttcacttccatttgcacaaccatatcatggttggaaacaagaagacaaaggatgttcagttctatgttgaagttatggatgttgtacagacgcttgggggcagtagaagatcggcacttgatcctgatgagattgaagaagagcagcgtgagagggataggaagaacagaataaacatggatttccagaactttgtgaacaaggttaacgaccactggtcgcaaccacagttcaaggggcttgacctggagtttgatgtcccccttagagagcttgggttccatggtgtcccatataaagcttctgctttcattattccaacttctacatgtttggttgagctgattgagacccccttccttgtggtgagcctgagcgagatagagattgttaacctggagagggtgggctttgggacaaagaacttcgacatggctatcgtgttcaaggatttcaagaaagacgttctccgcattgactccatcccttcagcatcgcttgacgcgataaaggaatggctggacacaactgacctcaagtactatgagagcaggctgaatctgaactggcgccctatcctgaaaactataatcgatgatcctcagaagttcattgacgatggcggctgggagttcctgaacatggaggcgagtgactcagagactgaggacacagaggaatcagaccaaggctatgtgccttcagacgctgagcccgaatccgagtcagaagatgatgactctgacagtgagtccttggtggaatctgatgatgacgatgaggagtcagacgaggactcagaggaggagaagggcaagacctgggaggagctggagcgtgaggcaagcaacgcggaccgtgagcacggtgcggagtcggacagcgaggaggagaggaggcgccgcaaggcaaagaccttcggcaagtcgcgtgcgccggagcgcagcagcttcaagggagcgccgccctccaagaagccaaagttcaggtgaatgctgccttcggcaattcgctcgtgccaaagtgcagcagcttcaagggagcaccacctccaagaaggcagctctggttaatgggactccttgaagctttggcccccggagtagacgtgtctgtaggagtgtggtttgttatatctagattatctgcagtagcttagtccatctaaatgaaatgtgacagctgaactttggaagtcgcatcattggggaaacgaaatttaagtcgattgatttgttaatgccctcgttgatgtaatatttcccttgttcggtggatttccggtctgtataatatttatgcacgcttgcactttatccatggtatttgtatacccgtataaggcagcatggaggatgtttcttgcatgtggacgcattgattgatatatatatatatttaaggttcttttttttttctttttgttgcatctggttgtcgttgtaacagtgtacagccgcaatttgtttgccactaagggtctgtttactgattaacttgtctcattttacctaacttttctatctaagattagttcttcgatccgaaaaagtaactttatataatatgtggcgtaattaactcactttgcctaacttttcaatctaagattagtttttcgatccgaatgagtaactttatgcaagatatggcgtaattagccatcaaccaaacagtccgtaaaagacttgttcctcgaatgttttggtgatggcatctgcctatgatttgaagcccgctccgctgcgtttacagctgggtgtgagtttcctggccgcatgaagcatgaaaagatgggattcacagcggaactttcgttaggaatttgatggcaatcaagtttagttaaatttaattttcaaggctaggattctatgtgcacagccctgatatgcaccggatatcatcccgaatttatattgttatacatatacgaaaagcagtgaactctgctctgcaatcgtctgcatcgtcgtccttgctctctgttgcggcgacacgcacaggccagagcccgtcgggatggaaggcggcggctccggtgggcgggccgctgccgtcgtccccgcgcgtatgaccaccttgtcccggcactacttcggcggcagcgcgtctgagcgccaccacgacctccgcgtggacatcgtcgagcttggtgctgggacctcactgccaggattagtagctgcaaaggttggggcagatgtaacactaacagacattgcgcagaatgcagaagtactgaacaacatcagaagcatatgtgctctcaatgacgccaattgtactgtttcgggacttacatggggagactgggatgaatcggtatttgatttacatcctgacattattcttggagctgatgtactttacgactcagcaaatttcgatgatctgttcgcgacggtgacctttcttctcgaaaattcttctggggcggttttcataaccacataccacaaccgcagtggtcatcatctgattgagtttttgatggtcaagtggggtttgaagtgtttgaaactgctggatggtttctccttcctaccgccatgtaaggctgctttacttcaggggaatattcagcttgtcgaaattgcgcttgacaaggaaaaacataaatgaccctgagtttgattacaggagttgacgaaaagcacagagaaatggaatgccatatttggtcctctgcatacatgtacgagcaactccatgtcaagccatccgtttggactgtcatcataaggatgttcttttaattaaaagaaactcatggggagcatcgttgttcgaatagcctatgcatgcaagaaaaaacagaaaatgttagcagatatgtactcttttgtgacatctgtacagaacatgttggtttcctgaaaaaagatgcagaatgtccttttcttgatgtattcgaaaaaatgagctaaatgcataactttacacaa

SEQ ID NO: 29977 - DNA, 1701 bp, Zea Mays
gtcgaacacaaacagcaagaaccaccaagcgaccaagccaccaagggagcccgatctgagtcaagcgtcttcccatttcatcgcctggaaaaaggcgagaaaccccgaagtgaaggaacagcagcacgagtgctagcagcagcagcgattccttcgccataccgttcgccgcgctcgctcactcggatcgaaccctccctagggtttcgcatcgtcctcccgccaactcctatccctcccccctccctccgccgcgcgcgcgcggggagctaccaaaccctaggacggcaaatccggtgcgatcgcccacggtggaggcctcgtcggccgccgagaggagccgctcggggctcgggtcagggttccggtacttcgccggcgccgcctctgggtggtgggaccggtggatggtcatgggagccagcggctccaagcttgagaaggccctcggagaccagttcccggaaggcgagcgctacttcggcctcgagaacttcggcaacacttgctactgcaacagtgtccttcaggcactttatttttgcattccattcagggagcagttactggaatattatgcaaataacaaaactccaggtgacgttgaggaaaatcttttgacttgtttggccgacctttttatgcaggatgcacacgagttcttaaattttcttttgaatgaacttgttgatattctggaaaaagagtcaagtgctgctaaggactcaccccaatcatcatctccagaaaaagctccaaatggcccagttcaacctttagccaatggagttaaaaaagaaccaccagttactctggtccataaaaatttccagggcatattgaccaatgaaacaagatgcctaagatgtgaaacagtaactgcaagggatgaaacgtttcttgatcttagtgttgacattgaacaaaatagttctatcacaagctgcctgaaaaatttctgttctacagagactttaaacgcagaggataaattcttctgtgacaaatgctgcagtttgcaagaagcacagaagagaatgaagatcaagaaggctccccacatactggtgatccatctaaagcgtttcaagtacattgagcagcttggccggtataagaagctttcataccgggttgtattccccatggaactgaagctcagtaatacatctgacgatgtagacactgagtattccctctttgctgtcgtggtccatgttggaagtggccccaaccatgggcactatgtaagccttgtcaaaagccacaaccactggttgttcttcgatgacgaaaacgtcgagatggttgaagagcagaccctacaaacattcttcggttcctcacatgaatactcaggcaacacagaccatgggtatatcttgttttatgaggggcttggtgggaagagttagatgggtttattcatcttccttgtttcttttctccttttctctttggagcttgcaaattcactcttgtgcctacacagctactatttcattacctccatgggaaacgggtcaatcgaaggggtgttgtatgaggtgaggacgccagattttgggtggtttcagtgtacaggggataatggaatctagctccaacgatgaaataaggtgtattttttttaacttctcagggctaaagagttggactttactattgagcacaacgtacatattttccagtgatcttgtg

SEQ ID NO: 29978 - DNA, 2648 bp, Zea Mays
accgccgcccacgcttgacgattccgccgctcaggacagcagccgaacacagtcaccaccacggcaccaccaaccccaccccggtcagtgtgcgcgtgctgctgccccccacccacatcgaaacccaagccaagatgcggccgccggcgctcaggctgagcgcgctgctgctgttcctctgcctgtacgccgccccagcgcggtcccagaacgcgaccacggtcacggccgcgcccgcgtccgttgaggggttcaactgctccgtcaaccgcacgtacccatgccaggcgtacgcgctctaccgcgccggcttcgcgggcgtgccgctcaacctcgcagccatcggcgacctcttcgccgccagccgcttcatggtcgcgcacgccaacaacctctccaccgctgcagccccggccaccgggcagccgctgctcgtgccgctccagtgcggctgcccctccgggtcccccaactcgtacgcgccgatgcagtaccagatcgcgtcgggcgacacctactggatcatctccaccaccaagctgcagaacctcacgcagtaccaggccgtggagcgcgtcaaccccacgctggtgcccaccaacctcgacgtcggcaccatggtcacattccccatcttctgccagtgcccggccgccgccgacaacgccaccgcgctcgtcacctacgtcatgcagcccggagacacctactcgaccatcgccgccgccttctccgtcgacgcccagtcgctcgtctccctcaacgggcccgagccgaggacgcagcagttcgccgagatactcgtgccgctccgccgccaggtgccgggttggctgcccccaatcgtgctccgaaacaacgcctccgcgacgccagcggccccgccgccctcggcttctcccaacgcgaccgtcgtgagaaacgaccggaacggggtcgtcaccgggcttgccgtcgggctgggcgtcgtcggcgcgctctggctgctgcagatgctgctgctggcctgcttgtgcagacggctcagggcgaatggacgacgaggtgacgcagtgctaagcggcgacggcgtcgagggcggcgtgttcgctaagggttcgtccgccgctgctgccggcggcggggagaggttcctggtcagcgacatgtctgagtggctggacaagtacagggtgttcacggtggaggagctggagcgcggcaccggggggttcgacgacgcacacctcgtcaacggcagcgtgtacaaggccaacatcgacggcctggtgttcgccgtgaagaagatgaagtgggacgcctgcgaagagctcaagatcctgcaaaaggttaaccacagcaacctggtgaagctggaagggttctgcatcgactcggcgacgggcgactgctacctggtgtacgaatacgtggagaacggatcgcttgacctgtggctgctggaccgcgaccacgcgcggcgcctgaactggcgcgcgcgcctccacatcgcgctggacctcgcccacggcctgcagtacatccacgagcacacctggccgcgcgtggtgcacaaggacatgaagagcagcaacgtcctcctggacgcccgcatgcgcgccaagatcgccaacttcggcctcgccaagacgggccacaacgccatcaccacgcacatcgtcggcacccaggggtacatcgcccccgagtacctcgccgacggcctcgtcaccaccaagatcgacgtgttcgcctacggggtcgtcctgctggagctggtgtccgggcgcgaggccgcggacgagagcggggagccgctgtgggcggacgccgaggacagggtgttccggggccgcgacgagaggctggaggcccgcgtcgcggcgtggatggacccggcgctcgcggagcagacgtgcccgctgggaagcgtggcgaccgtggtgagcgtggcgagggcgtgcctgcacaaggacccgtccaagcgacccagcatggtggacgtagcctacacgctgtccaaggcggacgagcacttcgccgactactccggtgagagcgtgtcggttgacggcagcggcgagatcgctgctcggtgaaccaccatccttcgtttcgtcgtgtactcggtcctactcagtagtaatatggtttttagccatcagttcgcgttgtaaaggtctagcgagcggaggatgagtcagcagcagtgagtatatatagtggtattgaataataacaccggcattccgcgaggctgtgacctgtgagtgtgaggtgcatgaaatgaaatacctacaacgaggtgcctgaaagaaaaggaggttggagtttgaatggaaagtatgaatagggaggatttgggaaggggaacggttggatagcctcatagactggcgcgtgacttgacacggcctgcctgtgaggctgtgacggcgggcgtacgtcgtcctggtatctgttcctaggtcagccccagcacggacggtcacgcacaaaatccatcggatgtaatctgaccccaaacgctcctgatctttcttgctcaccagcctgatcgctgacgggtgccatccagatgaccactcaagcctttcattgagctttgagccgtcatccctttcttatgtacttcgactagtcagctagtgtagcatggggatgaaaat

SEQ ID NO: 29979 - DNA, 2516 bp, Zea Mays
ggtgcctagtgactggttagatttggtatatcaaatcagatcacaggaaacattcagatctcatttaagaaaactaaaacaaaaaacggagaaaaatcaggtgattgcttcctttcctctctctccgttgcccaccacccccaagcccgcgatatattcggcgcagcccacaccttccagcgaatttccgtcacccatctccgcaccgcacccgcaacgcgtctctcttcctctcctggtcctcctgccactccgcctcaacttgctcggctattcccggattgcggctcggggttggtcattggccgtgagggcctttcaagaacgggcggcggcgctttacctgacgcaaattgcgccggtctcctgccttgctgcgcgcttgggggttgggctcaggaatgggggtagagcaggggctgcgtcgcctggctcgattcccatctctctgaacttagatggatgcatctgtaaacaccaagaagaaggttagtttctgtgggaacactggccacagccgctgcggtgaagttcatttagctgctgtgtgctcaggtcgtatgcgaagcaaccccttctcgcttcagaaaacatggtggatgtggaactgttttataaggacactagtgatcacagcattagctctgaggaagaagatatgcttgtcaggagctgtagcaatctcaatgtgagctttggatatcattgtgattcttatcagagcttttctcctgaaaatgatcatggaaatgacatttctcctaagaacatgtttgggactaatacgatgatggggtcacggaatggctcatttacttgtttgtccggtgctgctattagtgcaaattttacattggcaaatacaaatatttgcaatggtcttattggcgaagaaattttaccagaactagattctccaaactccttcagaaaaattatttcatctccatcaatgtcaagattggactcgttctctacctcacaaggcagtcctgtgtcaactgagagctcaatatttgagatcagtaaaaatatttggaggtccagtgccccaacaactgtatcatccaattttctgactaatacagaggtgaaaatggctggcggagctgctggagaggatagagtccaagctgtgtgctcagagaaaaatggatggctgatttgtgggatatatgatgggtttaatgggagggatgcagctgattttcttgcggtaactctatatgataacatagtatattacttatacctgctggagaatcggataaggcaacaaaatggtttgtacaattcatcagaaagctctcttaatggtctcaaaagtgagttaacactagccatgagaaattcagaaaatgaaggcataaaattttctgaaacatttcgatctggtgtactgaattgcctttctactgctgttgagcaagctgagaatgactttttatgcatggttgaacaagagatggatgatagaccagatttagtttcggtagggtcttgtatcctggttgttcttcttcaaggaacagatctgtgcatcttaaatatgggggacagtagagctgtgcttgcttccatgccatatgtagaaaatggtgctttgaaggctactcaactgacagagacccactcgcttgaaaatcctttggagtaccaaaaacttttagctgaacatcccaatgattcttcagttgtcaggggtaacaaaataaaaggaaagctgaaggttactcgtgcttttggagttggctatctaaagcagaggaagttcaacgacgcactcatgggcattctgcgagtccgcgatttgagcagccctccatatgtttacacaaatccacacacattgagtcacaaagttacagatgatgatttgtttgttgtgcttggtagtgatggcttatttgatttcttcagcaatgatgaagttgttcggttggtttatcaatttatgcatgataatccaatgggggatcctgcaaaatatcttattgagcaacttatactcaaagcagccaaggaagcagctctaacagccgaagaattgatgaggatacctgttgggagtaggagaaagtaccacgatgatgtgactgtcattgttatcatccttggaaatgcacagaggacgatgactgcatcaacttccttgtgaaagaatggagaggtagagagacgggggctatcagctggtaaatttttgtgggttttttgcatacatgtattccaaaatacaattttttttcctgggaatcgcgtggtagtcaataaaaccaaataaaaatgtatatattgtttcgaaatttgggaagtgaacagaaccttttgttaaatcacagggtgcacctgggttcgtttgacctacttctgtacatgaatcaaacatggaggctcgtacttgagctaatgagtccatgagcagagtggtagatcgtttcagtttccgtctgccaattttttttctctgctaataagtatgtgctgtttgtgttgatcttagaattatgactcat

SEQ ID NO: 29980 - DNA, 1634 bp, Zea Mays
gagctctgctatccttgcacagggctccgaacacgcgtttccatggctctcctccgactccaagagcagtgctcgctcctccgaatctccagctcccaccacccaaaccccatcgatatcccaagaaatcctcgcaagaaccaacttttagtgcccaatgcggccaagattgccaacgcctccgaaattccggttcctcgcatccccactagcacttccaaggccgcaatcctggcccggaaggccgcgctttggcgggacgcccttgtccccgttgccgccgccttcgcgtcctgtccgctcccttccctcgcggcggagggcgacgggaaagtgagcctcgagtccatcgtggagtacgtcttcaagaagtacaagcccgtgagcgccatcgacgcgttccgcaagcttcgcgacgtgccggaggtgcagctgctggacatcaggcggggcaagagcgtgcggttcatggcgccaccgaagctgaagcttatcgacaagagcaccgtgcaggtcgagttcgacgaggaggacgagaaggggtttgtcaaggaggtgctagcgaggttcccagacccggcgaacaccgtcgtctgcgtccttgacaactttgatggtaattcttcgaaagttgctgagctactagttgagaatggttttaaggaagcctatgcaattaaagggggcttgagaggtccggaagggtggcaggcggttcaagaaaactatcttcccccatctgtccatgttttcccgaagaaaaaaaggggcgcgaaattagctcacacagatgcaagcaatgatggaacatacgttcagcaggagggaagcgaggaatcatcggctcctccaagcagtaccctgacttgaagcctccatcatccccaacaccatcaaaaccgacgaattaagagcaatgcaggacaataacatgtgtggaactcaaaaggtcagaagtagttgtctcctgcacaaacatttttgtatacttccaaccgtggatgtccaggagattgactgggatggcatggaagaggaccagcagtggtgtttggagctcttgctgctgttgaggccatggtgaattcttagttgtgtaatttgcgaagcttgtacccgtatgttgtactattaagtgggggcgaaatgacattttgtacctgacttgatacagtttggggtgccttagcgttctcaatttgacaattgtgcttaactcagttttattatcactggctcagacaccgtatataggtggcatcactataattgtaacagaggttcagttcattcacgctacgtacatgctggaagtggtttacattggggataccagtttgagcaacagcattacatcaaacaaagttcaaaatcttaatcaaaacgaatcaagtttgagcgacaacaattcatccaacaaagttcaaaatcttttacaaaaagaataaaaaaaatggcccatgcaggtctcgatccacgctacgtacatgctggaagtggtttacattggggataccagtttgagcaacagcattacatcaaacaaagttcaaaatcttaatcaaaacgaatcaagtttgagcgacaacgaatcatccaacaaagttcaaaatcttttacaaaaagaataaaaa

SEQ ID NO: 29981 - DNA, 3004 bp, Zea Mays
tccgattcatcctctccgcggctccgccccgccccgccgcagtgccacacgcaagcgggccagcccccactttctcactcccctccctctctagcctatattcctctcccatctctttgccgttttcttttcctcccagatccggcggtgaccgtgctcctgttcgttctcctggtcttgattcgattgggaggggaaggggttccttcggtcttgggaaattcgaagacatgcctgcgctctacgcttattacggagatggcgggtgcctcgtctcggcgccggctgagctggccgggctcttctgccgcggcgccgtgcagcagcggaagcgcacgctggtgaccgcgtccgcggtcgccgcggcggcggccgagttcgtgagggcggccaagaagcagaggcagctgccgctgccgtcgctcgacgcgctcccagacgagtgcctcttcgagatcctgcgccgcgtgcccggcggccgcggccgcggcgcctccgcctgcgtctcccgccgctggctcgcgctcctcggcagcatccgggcctccgagctcggccaggccgcggcggcggcggcggacaccccgtcgctgcccgacctgaacgaggaattcgtcatggaggaggataatgaggagtcccccgcggatcggtgcgtcgacagggtcctagagggcaaggaggccaccgacgtccgcctggccgccatggccgtcgtcgccggatcccgtggcgggctggagaagctcgccgtccgcggcagccacccgacccgtggcgtcacggaccaaggactgtcggcggttgcacgcggcagccccaacctcagctcgctcgcgctctgggatgtgcctcttatcaccgatgctgggctcgcggagattgctgccgggtgtccctcgctcgagcgtctggatatctgtcgatgtcccctcatcacagacaagggcctcgtcgctgttgcgcaggggtgccccaacttggtgtctctgaccattgaggcatgccccggtgttgccaatgagggcctgagggcgattggccgcagctgcgtgaagctgcaagctgtgaacatcaagaactgccctcttgttggtgaccaaggcatttccagcctggtgtgctctgctaccgctgctcttacaaagatccggctccagggattgaacataactgatgcttcgcttgctgtgattggatactatgggaaagccatcactgaccttacacttactcgtctcgctgctgttggtgagaggggtttctgggtgatggctaatgctgctggcctgcagaatctcaggtgcatgagtgttacctcttgccctggagtcaccgatcttgcgcttgcttctattgccaagttctgcccgaacttgaagcagctgtacctcaggaagtgcggatatgtgtcagatgctggcctcaaggcgttcacagaatcagcaaaggtgtttgagaacttgcatctcgaggaatgcaaccgggtttctcttgtcggtattcttgctttcctcctcaactgcagagagaagttcagggctctatcgttggtgaaatgcatggggatcaaggatatctgctctgcgcctgcacaacttcctctttgccgatcacttcgtttccttacaatcaaggattgcccaggtttcaccgatgcaagcttggctgcggtggggatgatttgccctcagttggagcaggttgacctgagtggtcttggtgaggtcactgacaacgggcttcttccattgatccagtcttctgaagctggtctggtcaaggttgacttgagtggttgcaagaacattacagatgtggctgtctcctccctggtgaagggacatggaaaatctctgaagaaaatcaaccttgagggttgcagcaagataacagatgctatcctcttcaccatgtctgagagctgcaccgagcttgcggagcttaatctttcaaactgcatggttagtgactacggtgttgccatcctggcatctgcaaggcacctcaagctccgtgttctctcactgtcaggctgctctaaggttactcagaagagcgtgctgttcttgggcaaccttggccagtctatagagggcctcaatcttcagttctgtgacatgattggcaaccacaacattgcatcgctggagaagaagctctggtggtgtgacatccttgcataggcagacaagatggtccattgctggaagggctcatgtctagtctactgggagccacctccagatgcagatatacgaccgtagcagtagcacaaccaggtgatcttcaggtttttggctcgcatgcgatgcgagtgatgatggtgggcttccgcattgttcaaggaccagttgttttagggggtgctttctagtcaagtgctcgtttttcacagatcacctctcgggaggtttatctgttttttgagccttggctgccatcactggcatcctgcccctcgatccagacactggtccttgccttatagtcatataaggttttttaggttgccatagtgtccaagtcctttttcgttttactgcttcctggttatgaagttgcaggcatccgtgatccattggcagctctggactatcacaattctaactcaagaaccagatgctggtgtcatcttttccagggctgctgatgctggagcgtctgtggatttgtgcagtgtgtttggttgtcgagttttgagtttgtttttagtcttgatgtgttgtgtgctgttcatgttctccatggtgtgtaagggtcatgtagggttgcatcttttttacagtctctctgggatgcttggtgttcatggtgatcttggccaatgctaggcgcatactagaagccttgccttgacaaccttttatggtttttttgccagatccctatttttacaagcagattgttgagtgctgtaagcttggcgaccctctttgaataaatgaaatatgtgtttatgttgaaattttgtgcttgccttgtatttataacattgttgtgc

SEQ ID NO: 29982 - DNA, 2188 bp, Zea Mays
cgtttgcacgtcaaattcctcgtcgggcttcttcccgtcgtccacgtccccgtaccttccgttccctttctcccgttcgcacgccgcctcgtgcactcctcctcctcctcctcctcccagatctcgtgaccattgccattccctccctccgctacacgccgagcgcccccgtccggaccaggcgtctccgcggctcctagtcctcgccccctccctctcccgtggaggactgccgcggggcggcgagggagaggagatccgtcggtgctggctgctggttggtcggctggtcaatccctttccatcgtttgctgattgcgcgagacggtgcttcaggactgccccctggcgcggaggccgcacaggctcggcggcgccggcggcgagatgaagggcgcgaccatcccctcggtcgcgatcatgccctcgccgctcttcctctggcggtttaaggttgtgttgtttcttctatggggcttatgttgttgcaagataagttgggactcggttatgagaatgagtgttgatctcagagacttatttctttatgaggctttcttgtactataatcctcttcttcttgtggccttgatgatttggttgtggggagtaaatctatgggtttttgcacaatcatctgtgaattatgcaaaagtgtttgatcttccacaaacacatttatctcaccgagagatatggaggtgtgctacttggctgactttaattgtccctactagcatgacagcctacctatatctgtactcacatggagaagtgtctcttgcagcatctcaaccagttctcttgtatgctattcttctgatgatcctcctttctcctttcgatatgttttacttatcatcacgcttttactttctgaggacagtctggcgtataatactgcctttacaagcaattacatttcccgatttctttttggctgatatttttacatccatgtcaaaggtgttctcagatctggagcgctcagtttgtcgtatggtgaatcgccaggttgcaacaatcgcttggtttgaagcagattctatttgtggcagtcattcagtagcgattccgcttgttctcatgttaccctacttgtggcgtttattccaatgtctccggcaatacaaggatacaaaggagaagacatgtctcctcaatgctctcaagtactcgacagcaattcctgtgattttcctttctgctctcaagtaccatgtacatcctgatcaatgggttggcttctaccggcccctctggcttatctctagtgttgtaaattcactgtattccttctactgggatataaagcgagattgggatttgagcatcctaaccaggattttcatgttcaaaaacccaagcatatggacatatcttctttacgggcagaactgggtactctactgggtactgggcagcaatttggtcctgcgatgcacatggacgtacaagctctcggcgcatctccggcacaactacctgacagtgttcaccatagcagctctggagatactgagacggtggcagtgggtgttcttccgggtcgagaacgagtggaacaagatgacagccaaacagaacatggagatgtcatccgacatgccttccgaaggagacaggctactggattccagtaaccatacatctacacaagaagaggcgaactggatcatgttccatgtgcatttgcttaatctgcacaagagactaattctatattacaaaagctacggcgccgagaaggcgtcgtcgagcggccacgggaggtgccgttcggtgccgtccatgccgtccggctcagcggaccgcggcggcgcctgcaccatggagcgcagcgtgtcgtggaggcggtcgtggcgcctccggtggcggatgcggcgcagcacggcgtccctgtccagcgcccccgccccggggcgcaggtacaggcagctcgtcaccggcgcggcctcgacgacgctgccttcgccgtcgccgtacccggccggcggcggcgcgttcttggacaccatggaggacgacatggcaaggcaggtgctggttcctccccctgatgagctagctggagaacagagagagcaggtacgctaatggcgacgtgaggagggagagagtgatgagcgagattgagaggggtgaagtgaaggtggcattgacggagcgtgtatttatagacggcgat

SEQ ID NO: 29983 - DNA, 4237 bp, Zea Mays
agtttggtgcggcacaccacaaggaagagcacagaaaatcccaaattcccaccacgcaggtcgcaggcgcacccgtctctcccttcttcctcctctccctcttctacacccgacaggcacaggcacaggcacaacgcatcgtccccctccctttccagcgccccaaccacaaggaacagccgaacaggtcggggtcaagccatcggaccttgattccgcttgccctcctgctttatcccgccgccgccgtcgtcgtctcaaccgcccactccttcctctccctgccgctcctgcgaatcgcgaaatcggagacccccggaccgccctccaatgacgaccatgagcgacgatggtgaccgcacctgcccgctctgtgccgaggagatggacatcactgaccagcagctcaagccatgcaaatgcggttatgatatttgtgtttggtgctggcaccacatcatagacatggctgagaaggaggaaacagtgggccgctgccctgcatgccgcacatgctatgacaaggacaggatcgtcaagatggctgccacttgtgacaggacagtggcagagaaaaatgcagagaagaagcacaggacccaaaaggttaagccaaaggcagcaccttcagcagcagcaacatcaactgtagaatctaagaagcatctggctagtgtcagggttatccagagaaatctggtgtatataattgggctacctgcacatttatgcaatgagagcgtacttgagtgtagggagtactttggccaatatgggaaaattttgaaggtttcagtttcccgtccgactgggcctccctctcagcaggcatcagcaaacagcaatattagtgtctatattacttatgccaaagaagaagaggccatccggtgtattcaagctgtacacaattttgtcttggaagggaaagtgttaagggcatgttttggtactacgaagtattgccatgcatggctgcgaaacatgacatgtgggaatccagattgtctctatttgcatgatgtaggcagtcaggaggatagttttactaaagatgagatcatctcagcatatacaaggactagagtccctcagatggcatctggtgtttcgcaaagacgcacaggcactgtgttgcctcctccaggagatgatttctcttacagtgcggtggtttcagccaagcatacatttaagaatggaacacttaataccaccagtcagcccagactttcacctccaaacagtagttctgggaggtccacgcttccatcagctgcctcatgggggcagcgtgatttgaatgccaggacaacagctactggagcgacatcgtcacaatctcatacaaaaccaaaatcagaatcacaaagtaatccattttcaagttcttcagtattttcctgtacaaaaacaccctcttcatggaatgatgatacaagtacagcagcaaaaatatctgaaggacagcaactgtcagaaaaagagtctagaaccttgcagccgtataagcctggtatttcaaaggaaacacaagctttatcatcactggagtcatcactggacatagacttctcaacaataccttcagcttggaatgacgatgacattgtagtaccagatgtgatgccaaaaggaagtgatgaaaatcaagttgcaaataaaaatggtgagctaacccatccagcatccaagtcactggttttatctaagaaagacataaaaatgaacattaccagcaaaactccttcagattttgtatcaagtccagcaatatctaaatcagatgtaagtactagtgatggtgaccactcactcaccaatattactcctaaatgccttgcttcaaatgctgtagaatgccaatctagtcatactgctgtggagaaaatgttggaggatattggatccaaggacactgacatggagaagctatctgctcagatatcttcagtaacattaggtggcaacgacgagattcagagtatggcaggaaatcaacaaccagatgtaatgccatgcacatctgttgatgtgctcatggatcagaattttggcagagacctagctcatcccaatcctgacgagctcttattgccttctgaaaataaggatagtattgtttcttgtcaatatagttctgataagcgtcttgattggagtttggagatgcaaaattgtagcgttactcctttaaatgatagaatggactctgcactgctcactgacaaaattcatagtagacagctggatggttcagagcaatcatcatattcatcatttgttgaatttcctagtacagtggatacctcattgtggaatgatacagaaaataacgctgcattgacgattgacaatataacttcttcacagatgcagccagggttttcttcaactgataacacttatgccttgctaaatggaggtcaagatgggctaggatgcttagggaatctaaaaataatgatgtccattgcattgcgccttcatggaaatcaggaaccgggatcaaagagtccagattttcatttgctagacaggataaccaaggaaacttgtttgattcatctctcagaaactgtggtactggtactgagcagaatttcagtttgctaccccagaattctcgaggaaatatttaccagaatggccttgcattccaatctctagagaatgaattttcaaacaataactctcctggtgtattagatatggcaactactggtacatcgatgtctaaaatatctgcccccccaggattttcggcaccaacaagagtaccccctcctggattttctactgcatttccatcccaggatagtttgaaccccactcctgtgtttccttctggaattttgtgccatggcgggtctatcccccctcctagattctcttcattttcttctggaatttcaactcaggaagtgtctaagcctcctactagaccgccttctccattttcttctagattttcatcacaggacggtcttgacccctcttctagattccctttttcttctggattttcatcacatgatgggtctaatcagtcgtatggctcaacgaacccagaaaatcttctccggggtactgttcagggtggcaacagtaatcattatcaatctcagtttggaaggcactcaagtgacatggagtttgatgatcctgctatattagccatgggcaaagggctgatgcctggaattggcgattcagggctggagatgaaaaatactcctgcttttcaagcacagttgcaaccagcaagtagtgatccaagatttcagttacatgtacagccaaatgtgcagtctcgtcaaaacatgagattcacagaccctatgcaagatggtttgaaccatatgaacgataattacctggcatccagatttttagctcagaaccagggtcctctatctccttatgtgcagattccgcaacaacccagaaactcgcaggttataaatggtcactgggacgggtggagtgatttgagacaagggaataacgctcctatgtcagacatgtccaggatattatatccaagtgaagtgaacaagttgcatatgctgggttcaaatgatgtccataacagagcctttggaatgtgatcgtctcctgggataatgtgcgactttgagctgacatgttcaacttggggcgttttgtgcaagtaactggttgcacaacacatagtatacctgaggtggttaatggtgttgtgctcatgagctggcacacgactatttattgctgttggagttgaccaaaatgaaccttagttttggtccatccatttggaattaccaggttcattctcgtctatgatttgtgaagcttgaatgaaaagaaagattacgtgcctgagaagaacaaggcagctgaagttgaaatagatagagatatgtctattatgggatgtggtgtgacttgcgagcgaaagagatgaagaagattaggtgggcttggcttgatggcagcttgttttttcttgtgtcttgtacatgatgatattggtcggtggttgtatatgacttgtgatcgacggtggctgcattaacctgtagtggttgcccttgctccttcctgcctgttttgtttgcagctcctcctgttttgcatagtttatgctgattaagggaattggtgaaagtctagtgttacccatggtataataatagggaactggtttctttgttagcattacttcatttgtctaaaaaaaatccgttaaccg

SEQ ID NO: 29984 - DNA, 1424 bp, Zea Mays
ggtgcctaggcagtaggcactcttagcagttgtctcttagaaactcaaatgtacagaaagatttcaacaatgctgtgtttgatgagcgcactgtgatactctgtgaccaatgtgagaaagagtatcatgtaggatgcttgcagagtcaatggcaagtagaactaaaggaattgcccgaggaggagtggttctgttgcagtagttgctctgagacacgatcatcattggacaagataatctccgatggagctcaactgttggcggacccagatcttgaaatcataaagaagaaacatgagacacgaggtttatgcatggacaccagtaaagatctcaaatggcaattactttctggtaaaagggctactgaagacggaagcatattgctctctgctgcagtgccaatttttcatcaatcttttgatccaatccgtgaagctctcactggtagagatctgattcctgagatggttaacgggaggggacctaaggagggaatgcccgggcaagattacagtggaatgtactgcgcactgttaactgtgggctctaccgtggtgtcagcagcacttttgcgtgtgatgggaggtgatgtggccgagctgccactagttgctacaagccaggatgttcaagggctgggctacttccaagccttgttctcgtgcatagagagggtgctagtctcactgaagatcaagcactttgtgcttccagctgcacatgaagctgaagggatctggatgaacaaatttggcttctctagaatctctcccgaagagctggaagcttatcttaatggggcgcacttgactatattccatggaacgtcatacatgtacaaggctgttccagtgtcataattgatgggatagaagagatatgggtgatttcgtctgtcttttggggggtgggggtccgctcgctattgtgatgtacagagagagttgataaggaagcaaagcatggcaaagacaatgtacaggagctggaagccaaggcgaagcatcggatgaatctaaatgaatgaattccccttggtttgtttactcttgaatcgaaggaagcctgtctttttttggtgtgatatactagactagatgcaatgcaattgaaggagtcgcaccgagtcctggtactagagccagattttttgcaatttaaattttgactctgaaactgctaccagagctgctgtgcattcttctctttctgcatacaatttaaaagttgcaaatgacaccgtcatgtgtgacgtatcattcattagaggcggaggcacgtgcgcagactcgcaaagcactagcagacacttttttttttgacttgacttggttttcgggaggaggaagagtcctgcgtagttgcgttgcaccagcctgcatttgcagagcaaaaacagcataaataaaatggagggtgga

SEQ ID NO: 29985 - DNA, 2327 bp, Zea Mays
acggtttccctccacaaccacttgctcctcatctacttttctcctccgccttaaactcatccttgctcctgcctgccgtcgtgcatcatcatctccggccagggccagggcattcgtctccgcctccggtccggcctcctccactccgcgcccccccagacgcgtcgctgcgtagctgctggccgccatggccaccgtcatggccgcggccgcgtccgccgtcgaggcgcccgccacggccaaggccaagaaggagtccaagaagcaggaggagggcgtcgtcaccaacctatacaagcccaaggagccgtacgtcggcaggtgcctcctcaacaccaagatcaccggcgacgacgcgccgggggagacgtggcacatggtcttcagcaccgaagagttatcagaggaatcagtgaaaagcctgtaccaaactggcaaggcatatgtacatgattccttggacatttatggccgacctgtgctgattgtagtggcagccaaacattttccttcgacacaggatccagttgaaaaccagaagctatgtgcctatttggttgagaaggcagtcaacagacttccgccaggagcagagaatatacttgggatctttgatctgcgaggctttcgggttgaaaatggtgatctccagttcctaaagtttttgatggacgttttttactattactacccgaagcggcttggccaagttctttttgtcgatgctccatttgtttttcaaccaatgtggcaggttgttaaacctctattgaaatcatatgcctccctggtaagattttgtgatgccgagactgtgaggaaggaatacttcaaagaagaaacggtgcctcctgatttccgcgattagaaatgtgcaggtggtctcggaaacatgacctttaattgattcagaatcgattggcacccaggggggctggcgccttcctataccttttgattaacttctcaaaagttgctcagacggcagcaaacgattggagagtccagtaaaaaatgaccctgtacttgtataacttctgcgaagtagaatgctgagtttaggctggtgtctggagtgctcctgtaccatatttttctggttttggatgaagctatatggaccaaattcatctctgttgaacaattgccaattacataacttgtgtttgcccaattccatggtgtagtaccataacttctcagtgcagtgcagacaacacatggattccattttttgattaaagtatcatctgctacaaatatgaatcatggcttagtttgtagacttcataaagaaacacacagattaatcaaaccagtcttcgaagagtctctgtggataggaacgttccaaagcaaagtaagatgcaagttgtattgcataaaaaccaggtacacatcaatcagctgcattctggaagactaaactgcaacacaactacatctgcaatcacagagaaatcaggtcaacaacggagagggtcaagcgatccccacgtacagatgccagcatggtcttttacatggttccaagaggaggtaaatcgagtgtagccctaaaaagatctgccttgtgccacttcaacactttaacccagatgcaataaaaaaacactttaacccagatgctgcattgtggtgtggcaaaggcttgagaatatgacaataacagctgctcaaaaactgttggtaggaacatttatagcagcaaaagaacaaaatggaatgtgtggtttcttatctgccttagatgagataagatttcggacatgtgtattcatgttttcgagtgatttggcactatgaatgcgctagatggttggttgcttttttttgttaattgctcaggtgatatatgctgtatttctagtcactagtgttgtattgtttgtgcttgtgctaagatgatctcttttgcacttgtaacaggggctcattcaagtactctactgatcgaaaatggatggcgtctgtgatggttcattcttttgcacgtcttctacacgggtacattgacggttgatggagatggatggtggtgtagctgttttgtttagcaattagcactctaggtgttggaccactgttttgttaatggatgctatgtaacagtagtatgtaactaatgtgaacttgtttaggttgctgtgaaactgttatacaacacattgttatggggttgttacacagctgatatgttatgaacatgatatggagatatcttttcctttttggtttgggttttactgttgtgccattcgtctcataagttatgccattttattatttacttttggattgatatatattcgtctctgaagccttcc

SEQ ID NO: 29986 - DNA, 1810 bp, Zea Mays
attatagtcaacatcgttcatgatatatcaagaatgtttggaagaggatctcctaggatgaacttgatccaagctgcaactatgaaaaaaatatcccccagatctactactaacaagcgcaagaagagaacatcaccaaaagttggtcgtcttagagcaaactggaatagtggactagaaaagggtttagttgaaattcttcaagatcacaacaatgattgttataagggtcaaaatgggtggtcatcggaagcatggaatagaattgtcaagttattccatgagaaattctcttatgtcacatttacaaaatgccaaatccaagataaagagaaagagttaaagagagactacaaggctcttaaagaggcaaggcaacaaagcggggtatcatgggatgagaggttgtgtagaatagaagcagaagaacccatttggaataacctcaccactagtaacgagagacttaagaagtttcggactaaatctttcccactatttgaggctttaggagagctatatgatggaaatattgctgagggaaccatgaattttacttctattgagccttctcgacctcctgtcacacaaccttgtcaaggtgctgctacacagccttctcaagctgctttcacacttacacaaccttctcaaatcgctttcacacaaccttctctagctgctttcgcacgaccttctcgaaccgcttttagacatccttctctagccgctttcccacagccttctcaagccgcttttgcacagccttctcaaaccattttcacacagccttctgaagccactttcacacagccttctgaagccactttcacacagccttctgaagccactttcacacagccttctcaagccgctttcacacaaccttctcaagctaatatctcacaagccatttgtgatgaagatgatgagctcagagtattggatccaccagcccctgcatcagtgagcaaaagggcaaaaaatgttggtactggtaattcaagaacaagaattaacaagcgtacacaagatgggaatgtggttgagatgatgggaaggtttctagaaatgaaagaaaaacaagctgaggcggatgaaagggccacaactaatgcaaatgaggatgatttccctattcaaacatgcattgctattgtggatggaatggaagagttttctgatgatgagaaggttgattcttatgatgtttttaaggatgcccaaaaccgggccattttcatgactgccaaagatgctacgcgcataaaatggttgaggaagaagattgcaagaacatgatatgctaggctgtgtgtgttttttttctttctttcctcctgaacttgcaaagggcgctatgccacctgtgttcaaatgatacacagcatccaaagagaaagcatgaggaggaaacatgatgcactcctgcctggcaacagatcctccacatatatatgaagctaaagtaatgaaggatgattttgtagtatcgtccagcataaagaaagaaagctgcaatttgtgctattgtcagagatggatatttaactttagcaatttgcaacttttaagtaatctgttaaattaaagatgagatcttgcagacttttcttattacctaatggattctcttattagctgattcaaatctaatcatgcatattgtagtaaggactatgtatgttgaatcaatgactctggttcaattttaaatatcacatgtgttttaagtttcttaattttatggcttatcttctgattttattttcttttatttttatctagcggattttttagtaatatgatc

SEQ ID NO: 29987 - DNA, 429 bp, Zea Mays
ctgggaaaacagtgctaccacaagggtggtatgggacgcccttggctaactaattaggaaagctagtggaggactaccttacccgataggggcaagggcggtaggggagttcttggtatagggaggttctcaggttgatcttgctgagatggcattttagacgggggatttctatattgtgctccttagaaaccgtagcgagttttctgaagctaatggaactttgtaaaggcctcatagtgttaccctgccttgcttccttggtagatgtgtatggggcccgtacaaccccatggcagatgggtaacatgacttgtggataaagatgtgcaacctctgcagagtgtaaaactggtatatcagccgtgctcacggtcatgaacgactcagaccctcacatgagtaacttatggaattaaatttaattgg

SEQ ID NO: 29988 - DNA, 9850 bp, Zea Mays
gccacgtaggctagctgatatgttgctggcaccatgggaggacaccttagctgcatgtcaaacatgtcaggaacaccttgccccatattcaagtatttatagggcatggtccagtaaagaatactccttgccctcgagctctaaccaataaccactgcaagggtgaagttgttctagtgttccagccagtgttaatcctctcccttactgcagagttaagttgttcctgagctgagtgtcaacctcctgtgtggtgaccagggtcatccaagtgcccacctcgccgcggtcaagcaatcacaagcgattccccagctgtacagtgcatgtttcgtgttctccttagggttttattccctgttgtttttcataatataactttgtgctgctgtgatggtgttaagtgccggtgggctcggccttcttatataagtataccccgtctttatcttcttactgaggatggtcatttgagctagcatatatttcaaacttatactcttgtaatcactccgataaaatattgtaaaatttttgtaacctgtaaaatttggtaataaaatttccgctgctaaaatgttgtgtgtgtgattttttgttacttaatcccgcggttctggttgtaagtggtttatccgatgtccttggggcaatcggatggatcctgttaagttatctggtgcacatgcatgccgtctgaggtctttgagatgaggacaggtgcatgtgggcccgataccttgggaggttctgccacacctaacttgtcaatacattcaaatatgcttaggagacccaaatttgactcttgtgctagaaaggtgatgagttcaccacattctaggaccaaggctatttgggtgcctaagtccttattggctaaccttgatggacctatcatgagatgggtaccaaaatgtacttaataagttttgcaggtacccagagatgatatgaatctttggggtgcttgagcggttcaactcaattcttatctcaagctatcaatcttacattatctatcctttaagattaacccaaagatgaattgagttgttatttcactaacttcatattcatctctagcaagaacttgtgttgtagggaataaggattaacctttgtgggaatcaagcaaaaggcctacaaccaagtgatatccaaaggatggtaacaattaattcttaagtgcacattgcttttaattggtatattcctttgtgtcttttgtagccacataggaaaaatgaagcacttgagaatgaacttaaaagattttaccttgctttggaaaggatctaattatatggtagattgcaagttcatattttatattgtgacaatctacatgctttaaattgattgtatgtatcttgtggcatatttcaagttaatcatcatattattgccatgacctagacataaagagtgttatcccatgttcttaaatgaatagagtgctaagtaagaaattcaaattcttatagcacttaccaaatggggaattctctatatgactagagttgtgagactaatgtttctatctaagtgtttatgtagtctcacaacatgagaatgtgtttcccaaatgaagtgtgccattcaacattcaaagaagatcgaaccaatactatgtgatgtattcattcttgtttaaattggttttgagtcttctccattaatcactcaccatgctatgaattaaacttgccatataaacttaattaaataatcatgctactttcatcttttttacaattgatgttatgcatgatgcttgtaagggtaatttagttcatatcatgaggtttccttgttttagtaaccttcttatcattcatatactagaggttgctaaataggaaactattgcttgtgttactaatacaatctcttttaagatatttcatggaaattcataagtagagattgtgctctttcaatttgtcggcgttttgaccccggggggtccctagaccgacgagtaaattgtcgctgcgtgccccaacccagatgggtcgacgcgagacggaacacaaggaggggaaaaccgcgacttcgtgttgtcctgctcccagggtggatgcgcttgtagtagggggttacaagcgttcacgagggagagagagagagcctatccgtcagcccgtcctcccgcgcggccacctcttcgtacgagggtcctggaccttccttttatagatgtaaggagagggtccaggtgtacaatggggggtgtagcaatatgctaacgtgtccggcagagaggagccagagccctatgtacatgctgacgtggctgtcggagaggtgttagtgccctgtgcatgtgatgtcgtggccgtcggaggagcgcttgagccctgtagaagcacagatgtcggggctgttgggaccttgctgacgtctccttgcttccatagggggctgagaaccgccgtcgtcatgggagcacgtggggggccatcattacttgtttaccggggcgagccagatgggacaccggtcttcttccccgtagcctgagctagctaggggtagggtaatgatttacccccctgtagcgtggtcggtccaagcccaaggtcgggcgaggcggtgactcctccgaggtcgaggttgaggccgagccctagggtcgggcgaggcggagaccgtcttccgaggtcgaggcgggggccgagtcctggggtcgggcgaggcggagaccgtcttccgaggtcgaggcgggggccgagccctagggttgggcaaggcggaacttcctatggcacctgaggctggacttggctgctgtcagcctcaccctggcgggtggcacagcagtcggagcagggcaggcatcgctgttttcctgtcaggtcagtcagtggaggggcgaagtgactgcagtcacttcggccctgccgactgaggaacgcgcgtcaggataaggtgtcaggcgatccttgcattgaatgctcctgcgatacgatcggttggcgaggcgatctggccaaggttgcttcactacgaagcctgcccgagctgggcctcgggcgagtcgagggtgcgcccgttgcttgaggaggccctcgggcgaggcgtgaatccgcttgggtctactgttcctgcccgaggctgggctcgagcgaggcgagatcgtgtcccttgagtggacggagccttgacctgaattgcgcccatcaggcttttgtagcttgtgctgatggtgattaccagccgagtttaggagtcttgggggtacccctaattatggtccccgacagtagcccccgagcctcaaagggagtgttggcactcgcttggaggctttgtcgcacttttttgcaaggggaccggcctttctcggttacattttgttccggtgggcgcgcgcgagcgcacccgccgggtgtagcccccgaggccttggaggagtggtttgactcctccgaggtcttaatgccttttgtgacgcctcgaccggtctggttgttccctcatgcgatctgatcgtagcccgggtgcatggtcaggttccaagttctcgggctagtatgttgacgctgtcaacggtttggccggagtcgggtttgtgagagcagcccccgagcctctgcacagagtgagaggacggtcaaggactgacttggcttttatcatacgccccttcgtcgcctttccgcaaggaggagggggggaaagcaccatgtttcccttggagggcgccgaacatggtgtctgcagtgagttgctaacgggtgatccgagtggacgcatgtgccccgttcgataagggtcggctagtggcccagaggcgcgctccaaaagtacctgcagatgatttgccggacccgatcccgtttgatagggttcgagggctcgatgcctccctctgatgggattccgttacataatcgctcctgctggtctcagaaatgtcctagggtacctcgggagcgtagcccgagcctcggccatgtatcggacgtacctagagtcatccctcgctctgcgtgttctggggcggctttcgaacccttcagggggccagccttcgaacccctgatcagtagtgggcgcggagcccgagtgctctgaggcggctatcgaacccttccgaggggccagccttcgaacctctgatcagtaatgagcctgaagtccgagtgctctggggcagctgtcgaacccttccgaggggccagccttcgaacccctgatcagtaggagggctcggggcccgcttccttcgcggagaaggatcccttccggagtatcccctttcccgatcactgtagcaagagagagaaaggggaaggagaaaatgatacgaatttaaatgatatggcgcaccttttttgacgcggtcatcatggcggaggtgaaatgtcgcccgcttcacctgccaaaggtgtcgcctgccctgccgcgaagttaatgcgacgggacggttggttcgcggggcagccattgtgcatgcgtgagttgttcgagggacggaacacgggcgcgtcgtcttcacgccgtgggagagggctcccctgctgttccaggaggggacgtgagcctgcggacaatttgactgctgcttccgcccgcctgctgccgccattactgccggcccacttttggcaatattgaccgtcgcgccttctcccgcggctgactgacccgtgaccgatgcgcttggttggcacttgttgggccatgcgcggggttgcctcgagtcgcggcaccggttccgtagtcgagaaggcacgacattggcgtaagtggcggtgcagtttttcgcacgtagtaaccggcgcgccgattacatgacgtgtgggcctgggcctccatgctggatgcgtcgaagtcgaaagggtgcgtctccatggtgcagttgcatgccacctgcatggcggtccgccctttcacccgctggtttaagcgaagatggaggagtgcttgtaaccgctgggcggttacacgctccgcgcgcgacgatttggcttctcctgtcccgggccagcttgcatgacgtgtgggacccagcccccgtgtcatagggggaggaccctggagcgcgttggtgaagacttagtccgcgacgcctgaggacgcgagtggggagagtcgcctttaaaaagggatcgacccccctgggtggtagccacgccttcgcactcccctcatgcattgcgcccttccaccttccgagcccccggatggggagcgcccgcgttgctttcgtcttgctgctgttggaggagcacaacttcgtggaggttggcacctttcagccattgctcggcttcaaggattttcatcaggcagcccggctgcattccctcaccaatggtcacgtaggatggtgaccatcggtttgatggtggagagaagcaagccgggctgtggcctctgccccgccctcagcttcaaggatcttcatcatccttgctggggcggggagcgaggcgaggcggggcctaccttcgcgtgggctggcgtcccgcttcttcctctggcatctgggggtggaaaccatcctctagctctgcggaggaggcgtcctccagccatgcgggggaaggcgaactgctgctgcccggccagggtgcagcattccgtcctctacccgggcgactgtggccggctgtaccggagggtctcacaacacgtcgtacgccgcgagggcggtactcgtgttctgggacggtcccattctcgttttcgtggcgaggacgggagtgaggacctaccggtgcgctttggggcggcctgcgctcgttggtgcggtgttggtcggtaggtggacgccgccgtcagtgctgaggtggtggcagccggagaaggtttctctgccaacgagatcgtcggcgccatctacgctccgggcctccggctctttggctttaatgtctggttctcgtcctccacgaggggaagcgaacgagagccttccagcggtagcgttcgccttgggaccatcgctgctgctgcagaggtcgccggcgagtcacccggagtttgtcgtcccgcaggccctctgatgtgggggttgttcatacccgcgggagtggaaccaaagttctatttgtaatggcaccttgagtgccggtgtctgttcattgtggctgtcggggcctgaacatctaggtatttgagtgcaataccgtgtttcttccttatttcgagcgccaggacttgcctgtcggctagctgaaccgcttaaccaagtgtgagttgccctgtgcggaaggtgacgagtgaggtatccgtatcccggaggcataggagtccctcggctcggtcggccttgccacccaaggcttctcttgctcagttaaagaaaccctcggccgctctgcgatgagccggagccagaggcagcggtgtcagcgtggacagaggcagagtcggctcaagaagaaacttcgtcggcccaggagcaggtgacttcccaggccgaggaggcatagcagcggcggctggaacctggccaggtcatccactggcgagaccaaccccggagttgggctgccgagggcatgagccgggctgatgtcctcgggggacagctggctgcggctacggagcggccagccgagccatctgctcgggccgggttcctggaggagaccttggcggcgatggcccaggcgcagtgctgacatcttccttcgaggtggagatcctccgcctgtgtcgccgtccgaggccgggccagattccgtcgaaggtggagacgacgccgagggtgctgctgctccctctgttgatgtctgaacctgcaggaacagtttgtctgtagtacgtgtatgttttttgcggccgccgaggcccaaacatatcattgtcgtgttataaagctgtgtttcttttcctcttgtttcgagtatcaggacttgtttgttggtagcagaatcgcttatccgagcgagagttacttatcgtggaaggtgatgagtgaggtatccatatctcggaggcgtaggagtccctcggctcggtcggcctcgccgcttacgtgtactcttatttgtccgtaggattctgttatcgatatagtcgagaaggcacgaaaaatcattttggcagaaaagttttcgagcgttaagacttgttcggtcagcagaatcgcttatccgagcacgagttacttatcgcagaaggtgatgagtgaggtatccgtatcccggaggcgtaggagtccctcggctcggtcggctgtgccgcttacgtgtactccgtcgttttcaggatcccactatcgaagtagtcgaaaagcgcgaaagatgttctggcagaaagactttttccgaggaaaattttgacgcagagggggttccccccttctagcccccgagggagggtcgggctttgccgaggcaaggcggacccttccttaatggttagactctatttgtgtatgtaaagaggacgaggtatatgaacgacttgaaaacatcttaagggtaaaagcgacgtagctgtcggatgttccaagcgttgctgtagacctcgccctgactgttggccagcttgtatgttccgggcttcgaaatcttggcgatgatgaacggcccttcccagggaggagtgagcttgtggcgcctgaaagtcgcctagagggggggtgaatagggcgaatctgaaatttacaaacttaagtacaactacaagccgggttagcgttagaaataagaacgagtctgagagagagggcgcaaaacaaatcgtgagcaaataaagagtgagacacgaagatttgttttaccgaggttcggttcttgtaaacctactccccgttgaggtggtcacgaagaccgggtctctttcaaccctttccctctctcaaacggtcacttagaccgagtgagcttctcttctcaatcaaacgggacacaaagtccccgcaaggatcaccacacaattggtgtctcttgccttggttacaattgagttgatcgcaagaagaatgagaaagaaaagaagcaatccaagcgcaagagctcaaatgaacacaacaaatctctctctctaatcactaaagctttgtgtggagttgggagaggatttgatctctttggtgtgtcttgtaatgaatgctatacctcttgtaaggtgtagaagtgtagaaacttggatgccattgaatgtggggtggttaaggtatttatagccccaaccaccaaaaatggccgttggaagtgtgctgtcgcatggcgcaccggacagtccggtgcgccaccggacactatccggtgcgccagccacgtcaccagatcgttggggtttgaccattggagctctgacttgtggggcctctgggctgtccggtggtgcaccggacaggtcctgtagattgtccagtgcgccaactgcgcgtgctctgactctggcgcgcactgtagcgcattgaatgcggttgcagacgaccgttgcgcgcgaagtagccgttgctccgctggcacaccggacagtccggtgaattatagcggagcgccctctgagtttcccgaaggtagcgagttcagtttcaagtgccctggtgcaccggacactgttcggtggcacaccggacagtccggtgtgccataccagggtgcctttgggttgtcctttgctctctttgtttgaacccttttcttggtctttttattggctaattgtgaacctttggcacctgtaaaacttatagactagagcaaactagttagttcaattatttgtgttgggtaattcaaccaccaaaatcaattaggaaataggtgtaagcctaattccctttcaatctccccctttttggtgattgatgccaacacaaaccaaagcaagtatagaagtgcataattgaactagtttgcataatgtaagtgcaaaggtttcttagaattgaaccaatataaattctcataggatatgcatggattgtttctttatttttaacattttggaccacgcttgcaccacacattttgtttttgcaaattctttttaaagtccttttgcaaatagtcaaggtaaatgagtaagatttttagaagcattttcaagatttgaaattttctccccctgtttcaaatgcttttcttttgactaaaacaaaactcccccttaataaaatcctcctcttagtgttcaagagggttttaagatacattttgaaaatactactttctttcccttttgaacataataagataccaatttgaaaaactctttttaaaataaggtggtggtggtgcggtccttttgctttgggctattactttctccccctttggcatgaatcgccaaaaacggatacttgagtgaaatataagccctttttgcctactttctccccctttggtaaataacatatgagtgaagattataccaaagacgaagagttgctcgaagcgacgacgaaggatgagttatggagtggagtggaagcctttgtcttcgccgaagactccaattccctttcaatacacctatgacttggtttgaaatttacttgaaaacacattagtcatagcatataaaagagatatgatcaaaggtatattaatgagctatgtatgcaagatatcaaaagaaattccgagaatcaagaatatttagctcatgccaaagtttgttaaaggtttgttcatctagtggcttggtaaagatatcagctaattggtctttagtgttaatataagcaatctcgatatcccccttttgttggtgatccctaagaaaatgataccgaatggctatgtgtttagtgcggctatgttcaacaggattatccgccatgcggattgcactctcattatcacatagaagaggaactttggttaatttgtaaccatagccctaagggtttgcctcatccaaagcaatt

SEQ ID NO: 29989 - DNA, 1793 bp, Zea Mays
tgtgacatagacaatgaatttagtatgggaggggacagttcatttcagctacttcaagctgctgcggctgcgaatcatgcacaagctattgttattattatgatggaggaatttgatcagatatttgatgacttggaagaaggttcctgttcttcagatgcttataccgagtctgaggatgatgatgttgataaggaatattccacagataatgacattaatgatgatgatgacggttcttatgattctggtgaagatgacattgaagaagacttggactactctgatgacagtgaacatgacagtaagatcaacactaatgtcaaggatggcaaggttaaaaacaatatctcagaaactgcaggtaatgacaataaccagtatcttcagcctcctataagagcaacaagaatagaaaatggtgcatcaagggaaggcactgatcagaattcttcacttaattttttccatagaagttgcacaggcaaagggtgcttctcatatggagaccaatagtcaatccaaccagaaacaagaatcatgtggaccaaatggatccaaagatcgtatactaagatcaacttctcgttcatcatcctccagagaaaaatctatggagaaatcatgcagttcggcacacaggggaaaaagaaccttatggggccgtacttcagcaagaaaagacctgtcaacagaggagattgaatgctgcagtgatgatgagtcccttattgagaaacttgagagcaacaaggttgatctccaatcgaaaattgcaaaggaggccaaagaaaatgctattctacagtcaagtctagaaaagcggaaagaagaactacatgagcgccgtttagcacttgaaaaggaagttgaaaatttgagggagcagctgcagaaggagagaagtttgaggacatccttggagtccggggtgatgaatttgcgaagagggcaggtgtccttgccgtcaacaacagacagcaaggtcagtggccagcagctgtgctgtgaatcatgcaacaaaaggctcctaaacacagacaggcttggcggacctgaaagctcatcagtggcagcgtcaccgaccattgggagtgactctgcatctggcatgggtgatatcgagcaatcaaggaagcagacggcacaggattcgccttcttcgacagacaagccaggtcacgaggcggtcgggggcagcagccagagggctcctcaaagaaggcaatcgattgccagggagggccaagatgggtggtcgtcatcatcctctaattcgaagtggaatcttgctcagaaacaatattcaaatagcccattgataagagggcttcatggatccagcagactagaggatttcggtggaagcataccaccagcagcgtcatcggcattagtcaagctgacaaaccggctcaacttcctgaaagaacggagggcgctgctggcaagcgagatgcagagcttggatctgggtcggcccccagcagcagctgctgctccatcagccaagtccccaacaccaaaaggccatgaaaggaagaagagtcgagactgaggaagatgttgtgctcttctgaatgctagttagccttatgattaccagcagtgtagtttgtgtgcatcccattcccttccatagtgctgtctgtctgtacatgtttccacaaattctactgcggatacataatatagatacggctggacaggctgctttgttattgttcaaattgttgctgaattgattcgtcgctcaaagcactttgctgacacatttctgatgttaaaaaaaa

SEQ ID NO: 29990 - DNA, 4838 bp, Zea Mays
tcccactcctgtcctctcctctcctctccccgccatttggctccgaaccctcacaacagtgcatcgtctctcctgtccccgccatttggttcggaactctcgcggcctcaactcctcctcgtcatcgtaacacccacgcttagagttcgtgagggtcgcccccaggggatctcgagacgtccgtttccaagagtggaccggctcgcaggcgctgctgttaccttgggtggagctcggacctgcggatcagttggattctcaagggagacggtggtttctgatttcctttctctaagcataccaaatcctttgtctcgagtcgggagcaactggttttgggcgtcgcggagcacatggcttaagaataatttcttccagcccggcgacaaattcgcagttggattcagcatatgcattttttatgctgacataggatgtgctcaaccatccgtggactccctctagttgcacaaaccacctcagtgctctctctttcttcgaatcgggctaataatgggcagtgcttgccaagctggcacagacgggccttcccgcaaggatgtgttagggatagggaatgccgccttagagaatggccaccatcaggctgaagctgacgcagatgaatggagggaaaaggaagaggacttggccaacaacgggcacagtgcgccaccgccaggcatgcagcaggtggatgagcataaggaggaacaaagacaaagcattcactgggagaggttcctacctgtgaagacactgagagtcttgctggtggagaatgatgactctactcgtcaggtggtcagtgccctgctccgtaagtgctgctatgaagttattcctgctgaaaatggtttgcatgcatggcgatatcttgaagatctgcagaacaacatcgaccttgtattgactgaggttttcatgccttgtctatctggtatcggtctgcttagcaaaatcacaagtcacaaaatttgcaaagacattcctgtgattagtaagtagatttcctcaactaccctaatgcacgtgaaattttatcttgttaattgttgggtttaaatacttttagctgctacactgatgtgttttgcatgcagtgatgtctacgaatgattctatgagtatggtgtttaagtgtttgtcgaagggagcagttgatttcttggtaaaaccactacgtaagaatgagcttaagaacctttggcagcatgtttggaggcgatgccacagttccagtggaagtgaaagtggcatccagacacagaagtgtgccaaactaaatactggcgacgagtatgagaacggcagtgacagcaatcatgatgatgaagaaaatgatgacggcgacgatgacgacttcagtgttggactcaatgctagggatggaagtgacaatggcagtggtactcaaagtttttatgtcaatgtattatcgagtgcacaatctgtttcaaaatgcagagctcatggacaaagcgtgctgtggagattgacagcccacaacctatatctcccgatcaactagttgatccacctgatagtacatgtgcacaagtaattcaccctagatcagagatatgcagtaacaagtggttaccgacagcaaacaaaaggaatgtcaagaaacagaaggagaataaagatgaatctatgggaagatacttaggaataggtgctcctaggaactcaagtgcagaatatcaatcatctctcaatgatgtatctgttaatccaatagaaaaaggacatgagaatcacatgtccaaatgcaaatctaaaaaggaaacaatggcagaagatgattgtacaaacatgcctagtgcaacaaatgctgaaactgctgatttgattagctcaatagccagaaacacagaaggccaacaagcagtacaagccgttgacgcaccagatggcccttccaaaatggctaatggaaatgataagaatcatgattctcatatcgaagtgacaccccatgagttgggtttgaagagatcgagaacaaatggagctacagcggaaatccatgatgagcgaaatattctgaaaagatcagatcagtcagccttcaccaggtgcaaaacataatatcagtgtcattactaggttattaacataacagtaagttgcatgctaacccattatgatttctgcaaggtaccatacatctgtggcttccaatcaaggtggagcaagatatggggaaagctcttcaccacaagataacagttctgaggccatgaaaacggactctacatgcaagatgaagtcaaattcagatgctgctccaataaagcagggctccaatggcagtagcaataacgatgtgggatccagtacaaagaatgttgctgcaaggccttcgggtgacagggagagagtagcgtcaccattagccatcaaatctacccagcatgcctcagcatttcatactatacagaatcaaacgtcaccagctaatctgattggggaagacaaagctgatgaaggaatttccaatacagtgaaaatgagccacccaacagaggttccacaaggctgcgtccagcatcatcatcatgtgcattattacctccatgttatgacacagaaacagccatcaacagaccgtggatcatcagatgttcactgtggttcgtcaaatgtgtttgatcctcctgttgaaggacatgctgcaaactacagtgtgaatgggggtgtctcagttggtcataatgggtgcaatgggcagaatggaagtagcgctgtccccaatattgcaagaccaaacatagagagtattaatggtaccatgagccaaaatattgccggaggtggcattgtaagtgggagtgggagtggcaatgacatgtatcagaatcggttcctgcaacgagaagctgcattgaacaaattcagactgaagcggaaagatcggaactttggtaaaaaggtagcctgttttcagttacatgcctgttgtagctatgacttgaaatcagtaatagttatttgagggttgaagggccttccacttaatatataaaagtaagggtagggattcaaatggtttgcacaattataatcagaaaaaagatagaagtgattattaataatctctacctttggaggatataaaaatgcttatgctacttccagctatgccttttgtctttttttagaaaaacttccagttatgacttaattgttaatattgacaataccagtgtaggaatactgaaattagtcttgaaagtaagacattagttgctgctgtttgcgtgatggcccctagcttgaggatactttgccgctactcttgcggatgctttgccgctccatgtcatctctagcggacgctctgctgtcgtgctgctggatgtttgtctcgtctcctctcaggggatgctctgccactgcagtgtcttcgtctttattggcaacctggagttgatgtgcttttccttctgcaggttcagtcggttagattttaggtggagagtccttcttactgcattttctttctctggttctttgggtcggtttaggttgctaaccacttctgtgcttttgtaatatgggcgacggggtctctcagtagctttgtcataaaacaattctacttccccttaatatagtacatgtgactctgacatgttatcgaacaaaaaaaaacattgctcgctctaaattttatgagatctggcatgatttcaaactattcttcttttcaaaatcctgttttctgactgcagtttttacaagattttatggtcttgccgcttcatttttctgactgtttgcattggaccgataccttctgatggccttgtccgcctattttcaggttcgctaccaaagcaggaagaggcttgctgagcagcggccacgggtccgaggacagtttgtgcgacaatctgagcaagaagatcaaacagcgcaaggttcagaaagatgacacgtaatttctaatacaacgtatcatcttcttcggcagatctgagaattaggcggttcttcctattgcgcatcttcgtcgacagatctgagaattaagtggtccttcccattgctgatagtagcccactgattcccaacgttagagtacacaataaataagactctagttgtcaatttctgtggttgactgcagatgatcaccctagcgctatggagtcaacaatgtaatatttatatactatgttcgtgccttggcgccttggcggtttgcaatcttcagtttcctttctgagagattcttggccaagtgccttgaggaggagcaaactagcagcgtcgccattgctatattaatagctggaatcatgtagtagtagttcatccattcattcgaagatcgtgttccaaatcaacacaagtaggggtttgcttctcctctttccaagaaaagtggttgtagcgtgagatgcaaataggtctcttgtgctagatcaagctcaataaactttaggccgtgttaggcagctgatctacttcaccaatgtggcaaggcattcgtcgtattctgttgacagaaacaaggtgttcactgcacgggcatgccgcacgactcctcgcagatcaaaagagggaacacggcatgcttttaccaaaattattttcgaataacattgtgaggaacagacaataattaacttcccaaaacgtctcgctatactggatttttcgatgttggattcgtaatcagatccttttgacaataattttcgtacatcaggcatgtcaacagtaactgaagaatatgttagagccacatgtctcaaaagaaaaaaaaaacagagataatctcttcagtggttcagacatttcggaagagatatacgctcttcaac

SEQ ID NO: 29991 - DNA, 765 bp, Zea Mays
atgggatctataggcgagaaatctgcaaaagaatttttccatagatatcctatattttccaaatcaccaaatcagcctaaaaaagagagagaacgcactgttcagaagtgtgtacggtgtaatatacaaccacgcgcatccattattatcttcatcgaaatcttggagaagcaaattaatattcatccagaaagaaaaaaaattgaaatgacaactgacaacagagggggcgggctacctctagagactcggcatcatcaggcaggcacgcagcaacttgcagactagggaggagataagcaaggacgatggagattttggatggcttttcgtttgtcggtacagcaccggcaacttgacgctccgggctccacgccaaaagcaggggcgcggcgtgcagcttgcaattgcattgggcctccatatcaagtggacaagttcttcatacggcgtcgggcgcatggccccaaccccaagcgggccagggacaacgtcggccgccgcatttctcttgattcttcgttggctcgcgtttccaagctggttgtcaggctcttcctacgctgtgttcgatcggacgccactcgttttcgtccctcctcaggtagctcaccttgtatctccgtgcgacatgggcagagacgcggccgggcatgtctatccgggcaaggatctctgtagcagccggcggctgcgcacgcacacgcacgtgtagtgggcgcgtgtgtggttgtggtcgcgcgcctcggcggctggatggatgcg

SEQ ID NO: 29992 - DNA, 3459 bp, Zea Mays
gaagctccctcacgaatcgaatcacatgaatcaccacgcgggagaggaaaaagtgctaggtgtacataaacctggccattagtttcgcaacgttaatggtaacggtaatggttcacactcgataaccaacggtaacaagattgaatataccaatatcaatttctagtatgatatccaattacggttagacttaaataaacaagatttaatcttatcggttaaatatgtgaaccaaacaacacctaaaacttttatactccagtactagacagttgcaacctgcatatatttattcgaaaagaaaacatgattcagcaaacagacaaattctctgtgacataagaaaaaaaccgtccaacttttttaccatccagaaaacgggagctctaccagtgtgccgggtgcgcctggtaaattacgggcgtccatgcatggagccccacccccacctccatgtaggacccacgcccaagtgaccccaccacatacccgtgaatgaaaggaagactgaaaagcagagttcctgccatgttccccgtccccacacgctcacgcggctcccatggtgcacacccacggccacgggccatagcgacaccccccgcggcccgcctatttagccgcccccacccacatcgcggcggggtctccatgcctccagtgtccagtccagagtccaggctccaggactaccaccactccgtctcgtctcgtcctcacaccccactccaccaccacctctgccttgcaaagctttccaccgatccgccgcctcgtccgcgcgctcgcaggcagcagtgtggactacccgccccatactccatcccctactcgaaggatacaccgtgagtaggcgtgatggtgcttgataccccgttttcgtgcagcttgttgctaattcgttttagtttgagggatcaagaaccaccttgttctttctttctttcttttttggactatgatgaatcattgcaaatctcttgaatacatttttcactataaaatactgccttgcctttgagctccttggttcacgtgcaatgtttctttgccctccgattttgcaggacctcgagttattaagttgggcgaggagaggtggttcattccagcagggatccttctcgtgagcccagtcgatctgaccgtccttggtatctggggggggttgttctgtactctctctttaatttgtgagtcgtgacagggacctccaaagtagtgctgggatgtatcgcctttgggattttctgggtgatggccgtcttccccaccgtcccgttcatgcctgttgggcggacggctgggtccctccttggtgctatgctaatggtcctgttccgcgtcatctccccggaggacgcgtacgccgcgattgacctcccgatcatcggcctgctcttcgggacaatggtcgtcagcatcttccttgagagggctgacatgtttaagtacctcgggaacctgctctcgtggaagagcagaggcagcaaggacctgctcttccgagtctgcatcgtgtccgcgtttgccagcgcgcttttcaccaatgacacatgctgtgttgtcctcaccgagttcatcctcaaggttgctaggcaaaacaacctgccaccacagcctttccttctggcccttgccactagttcgaacatcggctctgctgccacgccgatcggcaaccctcagaaccttgtcatagctgtcgagagtgggatctcatttggccagttcttgctgggagttttcccagctatgatcgttggggttctcacaaacgctgctatcctccttttgtacttctggaaatacttgtcggtggagaaggatcaggagggtgggcagcccacaggaccagaggtggttgccgacgatgaggttacttcccatcggttcacaccggctagaatgtcacatgtttcttctctgaatccagatgacatggattgcgtaagcgaaccgatcatcaggagcaacagtgtcagtactactgggaatgagaacctgagaagcagaagcatcaattctgaggctgacattcagcttgcgatcaagtctctgcgggcatcaagcatgtcgcatgagatggtagaggtctcgacggttcctgatcggagagatgaaggtgcatcctcaaggaagttcacaaggactgctagccagcaaaggagcgtgataatagaggatttagcaccctccccagagattaatggggaaaaggagaaagaaactgaagttgcagagaagagatggaaagtacttgtgtggaagactgctgtttatcttatcactctcggtatgctcattgcacttctaatgggactgaacatgtcctggactgcaatcactgcagctcttgttcttctggcactcgattttacggacgcacaagcttgtcttgagaaggtgtcatattcactgctgatctttttctgcgggatgtttatcactgttgatggcttcaacaaaacgggcataccgaacacactatgggagttagtggaaccatattcacgaatcgatagtgcgaaaggtgttgcacttcttgccgtggtgattcttatcctttcaaacgtggcctctaatgttcctacagtcctattgctcggtacaagagtggctgcatcagcggcttcgatttctcatggttcagagaggaaagcctggctcatccttgcatgggtcagcaccgtggctgggaacctcaccctcctaggctctgcggcgaatctgattgtctgcgagcaggccaggcgggcccagttcttcggctacaacctcaccttctggagccacctccgattcggggtcccgtcgaccatcatcgtcacggcgattggtttgctcatcgtcatcagttactgaaacagctgaaggcagaagagcgtagtgtaagagaagcagaatggataaaaatccttccaataagaagtacatgtaaattaggcttgccctataactcaagtgtgtatcggtacgttatgtctccgtctgtgctcttgctcgtgagcaagcagcacatggctgaccgtgtagcttgcatttccattgcataataggcttatgaagaatgctttggtaatatgattttacagtctgacaaggattgtgaagcagaggcagtgtaccatcaagataatacttctggaagcatataaaaaaatttcgtatatttggatttcaaatccagtctgcttcagactggaaattcatattatcttctggaatcgtgctttattgtcagaaacatgggctaaaattggaaagtccgtcatttattgggcttgcaatgggacaaccttttgggtctgttatatatcactataaccagtgacaactttggttcgcaaactcaaaccagtttctaatctttattttatgatttttatataaagttcttaataggtcctcttgctattttcaatctaaattctaaatactaaaaaaagtttctgtgaa

SEQ ID NO: 29993 - DNA, 1054 bp, Zea Mays
gccactccatctctctctggcgcatgggaccccccctctcctgcttctcttcctcgtagggcacctctggcgggttgttgcgctgcctgatatctccaccgcccacggcctcgccttgtcccaactacaaaagcgaacccaatccctcttgactcctctcatccgcctcgtctaaccaccaccacgagggagagttaaagtcgccagtacagaagagtgaaggggagagggttgctgggtccgattcggtgggctcatcgccgtcgggtccacgaattggtgcctaggagtctcgcgtgcttcggggacataatcgatggtctcgctgcggtgggttggtggctggagacctcagaattcgtcgtcatagtgcgagctcctccgcgtgtgcaccgtgcgccgtggccaggggtgtctgcgctgcaattgccaggcatacaagatgacgatggtatgaagactatctcatttccaaaaagctttgtgcagagcaactagtgcaatgcaagtgtttggtgcttttggttgatagaagctgctggatgcttttggtatttttgaaagatgcaagtcgtgcttctggttgatacttagaagttggtggttcaaaactgaaaaacctgtcaggctgtcacttgcttttggtttcttgtcaaactgctgggcgcctgaacactgctgtgcaccgtacgtcaggctgtcctcatgcatctgttaacagatcttttgtcctctgctgcttagactgctttatgaaatttgaaatgtgatgagacttatgccttatggtgactggtgatagcttattagattagagtatcatacttttggtcatggtcttatggaatatggaatgtgatgggatcattggaccgcatggtatgggtcatggatgtgtaaataaattataatttcattatttcatctctcgtctattaagtattaacagtttattactgtgttgtctatcttgtgacctgaaaatagcttcaaatctgtaacttatgcttgctggcaaccgaatctgtcacctgggcgcagtggtggccctgag

SEQ ID NO: 29994 - DNA, 3168 bp, Zea Mays
attcaccgccttgagccttttcttccctcgcatcctcccctgcggccctgcctgaccctgctctagatctccatcgcgcgcgcgcagatctcagtcctaagtctagacctctatggcggacctcgtcatggcccctccgccggccatggacctcttcggggagccgatcgaggcgcaccctccctggttcaagcccgacgccttcctccgcgcgggcttcgacgcggacgcctacgtcgccgagctccgctcctacgtcccgctcgacagcctcgccgccgagctccgcgcccacctcgccgcgctccgcgccgagctcgtcggcctcatcaaccgcgactacgccgacttcgtcggcctcagcgcgcacctcaagggcgtcgacgccgccgcggcccggatgcgcgccccgctcgccgacctcagggacaaggtcgccgccttccgcgccggggcatccgccgcgctcgccgcgctcagggaggggctccagcagcgggccgccgccaccgccgcgcgcgagctgctcgagctcctgctcgacacctcccacgtcgtctccaaggttgagaaattgatcaaggaactaccaactgcaccgtcagattcatctaatgctgaaattcctatcaatgacactggaacaccaaatgggaaggctgggacaggtgtcagagaaacacagagcattctcctagaaagaattgccagcgagatgaaccgtcttaaattctacattagtcatgcagagaacctcccttttattgagaacatggagaagaggatccaaggtgctacaaaactgctggatggtagtttggagcgctgctttgtggatggtctggaacaccgtgatgctaaagttatatacaactgtttgcgtgcttatgctgcaattgacaatacatcatcagccgaagagctttttcgtacaacagtggtgtctccattgatccagaaaatagttcctcaaaactatgcaagagctgttgctggggcatcatctgatgagctagaagaggattatcaacagataaaggcatgcgtagaaaaagattgcaaatttatattggaaatatcttcgtcagaaaactctggattgcatgtttttgattttctgggtaattcaatactcaaagaagtcctttctgcaatccagaaaggcaagcctggggccttttctcctggaaagcctaaagaattcttgaggaactacaaagtgagcttaggatttcttgattttcttgaaggctactgcttctccaagtctgctgtaacgaagttacgctatgagcctgcttacacagatttcatgcgacagtggaatgttggtgtctacttttcgttgcgatttcaggaaattgcgggtggccttgattctactcttacaaatacctttagtcctactggattgaatgaggctcaacagaaaccgttgctcttgaaacaaagtattaagctcttagaaagtttggattcatgttggagtgatgaggttcttgtattctctcactgcgataaattcctccgtctgtccttgcagcttatttcaaggtatacaacatggctttcatgtggtttatcagcacgtaaagcttctgacaggagcccaaattcacctgcagatgctgaatgggcactgtctattcctatagaagatttcatatatgtaagttacatctgcaataatgtctgaactcgtcatgtcccaataggatctagcgtttttcattctgtactatggacctagctgcttaggactgaaattttgggtgctattgtcctatttattaacattattctatgtttctgtattaagtttatgcttagcttgaaatttctggagtttcgaagtagttataagatgactagttgcttcagaagtgctcagtaagtctgcaggaagtcactgtttccaccttttgactagagagacatgtactggtgttggttcagtggaaaaagaactgcagtttgtactttgtagtccaatttgtggcaactctgaggtaatacaagctcttagtaagtgccttctgtttttcatatacatatgaactgaaaagcctgtttgtcccttattgttgtacgttcagttgtatgaatggaggtaagttcgtgttacttagtcttggtgcgcctttcctgtttctgactcctaaggcatgagtcttgttacgctaaaaaggttatgcaatgttgagcaatggggctgtgtgaattctaatgtctttgttcattgatttacagataatgcatgatgtgcatgctgtaattggtgagctttcagaatcaggcagctttattggacatgtgaatcagtcactagggtcatgccccattgaagtatttaatcttgtgaaaggaagtatattgcaagctgctgaacctttaaaggagctgttgcctgcaataatggatgtcatgattggaatcatagttaagaagtctaatgaggacctgaagcacctgaaaggaataacagcgacatataggatgacgagtaaacttccagtcaggcattctccatatgtatcagggattttacatccactgaaggtgtttcttgaaggggaccgtatgcactatctatcagaagatgataaaactaagttgtgtcgtgggtctgcaaataagattactgcaacctactatgacttggtctctgaagttgtcactgtggcaaggaaaaccgagtcttcattgcagagactgcgccaaggtgcacaaaggcgagtaggagctagtacagatgcctcagatagcatcatatctgatacagacaagatctgtatgcagctatttcttgatattcaggagtacgcacggaaccttcgtgcgataggaatagacgcgagagagattgattcctacagagctctatggcagtgtgttgccccaaaggacaggcacgagaacatccagttttgatgtaaagaacgctgtcagtatatataaaataaaattgtcaacccgtagatatctcagtatgtgaaaatgatacggttggcactggttcatccagtcttcaacgacatgacaccctgtcagtttgtgaaacaaggacgtgtttggtttgatgaatgaggtggtacatttctctcttacttcttatttttatatttggtttttagaatagtacgagttgattcatcaccatttcattcc

SEQ ID NO: 29995 - DNA, 1013 bp, Zea Mays
ggctgctgttcattcttcctttgctgtctcatttcagtgatgccagcttgctgaggttccttgttgacatgaggggagctgacgctgatgatcgccagcttcgagatgatcttatgacaatgcttattgctggacatgaaacaactgctgctgttctgacatggtctgtttttttgctagcccagagccctaccaggatgagaaaagcccaggcagaggttgattctgttctcagcaatggggcaattactgtcgaatctcttaagaaactggagtacataaaactgattattcttgaagctcttcgcttgtatcctcagccaccattgttaatcaggcgttctctccggccagacaagttgccaggcgggtgcaatggagcaaaagagggatatgaaataccagctgggaccgatatatttgtttcggtatacaacctccacagatccccgtatttctgggaccggccaaatgagtttgaacccgagaggttttccgtcccgaagaaggacgagagcatagaaggctggtctggttttgaccctgaccggagtcctggcgcaatgtaccccaacgagatcatagcggacttcgctttcctccccttcggcggagggcctcgcaagtgcgtgggggaccagttcgcgctcctggagtcgacggtggctctggccctgctgctgcggaagttcgacgtggagctgagagggtcgcccgacgaagtggagatggtgacaggcgccacgatccacacgaagaacgggctgtggtgcaggctgaggagaaggacttgacgggccaacattagctttgcagtttgcactgagtgagaagtagctctcgtgcttgactcctgtgatgtgctttaggcgagctaaactgcatcgcagacagaccagtggatgggaaccgtgtacactgaaaacatatcttgtaggcttgtagcgtaacaggtgcaaccacaacaatatattatttatctatctatctaattgagcttgacattccggtgc

SEQ ID NO: 29996 - DNA, 390 bp, Zea Mays
ccagcgtccagcctccttggggcttgtacttgttcactgaatcactacttcgcgaggtcagccgtcaacgcatcagcagcaactagcaaggccgccaagcggcccaggacccaggccagctccaagcgaacaacctacggctgcaggccatctgggctccggcttccagcatccaccagacgtccttagaatacggtgcagcgagcagcgagcagcaagtcaccgagcagccgagcgaccgccgagcacagggcaccaccaagcagccgagccaccgcccagcgccgagtcttctctggtaaattaaacaggcttggataaattagtgtttcaatttagagttttagacagattgcttgtagggatttgaaaagattacttgtatggatg

SEQ ID NO: 29997 - DNA, 3391 bp, Zea Mays
tctacgtacccgattgcccaacgcttcgctttctcgctgactcgctcccactcccagacgaccggccgccagcgccgccgcgttgatggccgccgcaccggaggagcgcctcgacgtcctcaacgccgctggggacaagatcggcgtctccaagcccaggtcggaggtgcacagggacggcgactatcaccgggcggtgcacgtgtggatctacagcgagagcaccggggagctgctgctgcagcgccgcgctgactgcaaggactcgtggcctggacagtgggacatctccagcgccggtcacatctccgccggcgaatcctcgctcttctcggcacagagggagcttgaggaagaactaggcatcaaccttccagtcgatgctttcgagcttatatttgtatttcttcaggaatgcgttatcaacaatgggacatacacaaacaatgagtacaatgatgtttaccttgtgactactttaactccaattccacttgaggcattcactctccaagaaagtgaagtatctgcagttaggtatatgcgttgtgatgagtacaaaagctgccttgcaaaagaaagtagagaatatgttccttatgatgtgaacgggcaatatggtcaactgtttagcattattgaagaaaggtacaaagagaatacagagtcacagagtttaactttgcaaaagcaaatgaaccgttatgttcccatccatttggaaccagatttgactagtctctctgaaggagacagggaggccttgggatatatccttaaagccgcaatagttattgatgacatattctatgaacaggtatggaatagtaacaaaatgcttagagactggctgaaaggacattctgaattctcaccattcgataaattgaagtgggcatattattctattaataagagtacctggtcctgccttgatgaaaataaggcttttctatcgaccgcagattctgctgtgcaattactcacagaagccaccaaaccagtttcaggatggaaggggattgagtatcgagcagcatttcctctacataagcctcccggtgctaacttctatcctcctgacatggacaaagcggagtttgaactttggaagagtaaactgacagataaagaacaaaatgatgccactgggtttttcaccgtcataaaacgacatgactctctgtcttcatcgtcattaacacaatcagatggatcggatcagaccaagactaaagatgatctttttattgttccatactccaaggagtatagaccattcctagagaaagcagctgagcttcttgagaaagcatcagcgtgctctgattctccaagcctcaagaatttgctgagaaccaaggcgaatgctttcctttcaaatgattactatgaatccgatatagcttggatggaattggactccaacttagatctcacaattggcccatatgaaacatatgaagatagcctttttagttataaggcaacttttgaagcatttgtcggaatacgtgatgacacagcaacttctcaagttaaactctttggtgatcagctccaggatttggagaaaaaccttccaatggacaatattttcaaatcagatagtatatctgctgctcctattcgtgtgatcaatcttctctacaatgctggggatgtgaagggtccacaaaccattgctttcaatttgcccaatgatgaaaggattgtgaatgaacgaggaacttccatggttatgctcaaaaacatttcagaagccaagttcaagcatatcttaaagcctatagctgatgcctgcatcagagaggaacaaaaggaatatgttgatttcgagccatattatacacatatagtctgtcatgaatgctgccatggaattggacctcattctatcacccttccaagtggtaaaaaaacaacagttagaagggtacatactcagacagcggctcaaaaaataatcgattttaattcagcgccagcagtagttttccatttcccttcaaaaccgttccatttccccatctatgttttaactgtatgcacataattttgaagattttgtattataacatatatttaaaaattagtaaaaacaaaatatctacaaatgaccaaaagttttgcagggtatattcttgtgacacatgattcttagatgatttcatccagaaaagtcactgtaatgcaatttaatatctttaaactttctacatatggaagcttttacttctgcctcaaatttttacatttttatactttacattttttcgttatctcttatactggtgccactgagttgagctgcttcatcctgttcttttcttgaatgcataggaacttcaagaattccattcagcattggaggaggcaaaagctgatatagttggtctctgggcactgaatttccttattaagaagggattgcttcctaagagcctgtcacaatctatgtatgtctctttcctggctggctgcttccggtcaatccgctttgggctggaagaagctcacggaaaaggacaagctctgcagtttaactggttgtatgagaaaggggcttttgtgttgcagtctgacggaaaattctcagttgattttacaatggttgaggatgctgtagaaagcctgagcagggagatactgacaatacaggcaaagggcgataagccttctgcccaatctcttctccagtcccgtgcaacattgacacaaccattgagaatggcattggagaggatagagcacatgcaggtacctgttgacatagccccggtattcagcacggcaaacaagctatttgcagacatttaactatttgggctcagaatcgttgtgctttagtaccgcccacaatacctggacgaaaccaggaattgctcaagaataaggcggcactaggaattgctcaagaataaggaagcgccccatgttaagcaaagctgataaaaccatggcgatatgtgagtgacctttttatcggaaggaaaattgtttgcatgcttatgtattgacctcaatttttacgtattggagtgatttgatgtgaaatttaaccaaattccacgtccagtacatggccatccaaacatggcctaaagtggtgtttgatcagtgagaattggaataaacccagctttgcctgaacagttgcgaagtactgagttacatcaatgcatattttgtaacaccaaaaaaagatgtattatcctaatggatgattgaacgaaggcattgtatatcgatccccaatggcccaatctttatgcacattctggcttgatcagatctagtttattagttaggcatatgacatctttaactcttaattttctaatgaacttgtcgaagttccatactagttttacattgactaacagataaa

SEQ ID NO: 29998 - DNA, 913 bp, Zea Mays
tataattgaactaacacctaaacaaaactgtgttctagcattacctcttccaatagacttgagctgcaccgagtataaattcttggcattttccctcatagcaatgtcaatctagaaacataatgtcaaatgatacttaataccatggtaagtaaagaaagacattcttatttggactgtgagtagtggcattaacacttgatgaacatttgtccaaactcttcgaaatatcaactgcatcaaaagcagcataacaactatgcaaagagcaacgttgccagaaaaaacgaactgaacttcaaaatacagaacaaataactctgtgagatcaaagcataaaactgagagaaggcatgcaaaaaattaacaagcatttttataattaattacctgagaatcagtcaccccaaacagacgtttccaaggaagtaggaatacagatgcatctccaaagacaagattggacacataaattaacttctgaaatgcctgcaaaaaattcgacatggttataacatgggccaacaggaagttccaaacatctcattcatatatcaaagcatagacacttgcccgtctttgttccatgtcagcatcacgatcactcgtttccaacctctctctgtatatgcgtctaccaatctagtacaacaatcaaagaggaaaatgtaccttattggcataaaacatagagaatgtgggaaacaaagacgaaaacaataagagcataggagatagatcgggaggcaatacctccatgtgcatgttagcagcatctacatcatcaagcccaagagcacttttaaattttataattgcctgaacctctgtacctttgagatcttcatctcctggaggaagtactgagtaaagatacctgcataaaagcatggtcaggaaaaggatgaccaaa

SEQ ID NO: 29999 - DNA, 489 bp, Zea Mays
caaaagattttaccttatccttatggattcatcttgccctaattagcataattatcctactctaaaataacaaccatgagctaatccaaaatttatttagaacttaactagtctaatctagtcatatccaacctaacctagattttatctaatctattatggtctaatatagagtaagttatttaatgctggtacaaaagataaggtcatacccctcatgcccttaaaactaaactagttccttaaaccaactcagccacatgcatgagatctgatccaaccatagagttatgatggattgcataatctatctatgcccaccaaatatcaaacaagatcttgacctacaccatgtcgtctatctcatccatatctatcttaactttattcccccaactccgataaaatacactaaccttgaatcaatgagactaagacccgaaaaggacaagatcaacctcgtcaaggaaggagagaagtcaaactcga

SEQ ID NO: 30000 - DNA, 4439 bp, Zea Mays
actcgcgactccgcccgcctgcccagcgatagcgccatagcggcgaccggcgagctccaatatcacgcggatcggcggcggcgcccttgccccggagccccgcggcggcgcggccctgtccccgttccccgccccggcggtaggcagccccgtctcctgtcgagcgctcccaccaccccagccccggcgcccccgctcccagcccgaccgctgtatccgcggcgaccggcgtcccgaacggacgcggcccgagcgcctggctcacagaaaatctgcacacaaaactacaaaagtttaaggtcaccaagaaccttgcaggataacacaagtgctggattttggaaatggaccatgggctttatgctccacaacatggatgggagaacaacagtgtaattgcagtcttttcctttactaactactgaagatgatgaaatagcagaattttggccatgtgattggcctctgtgtatccagcctttagttgtaaaggagttcaagaagaggccgttgcttaaatggaatggatttacctgcctgttctgtagaatttgttgctgactccacttattctgttgaatctacaggcatcaaatgggtatggtgcaatcaatgagccagattttaggtaaggcaactggtcatttagtgttctgttaactgggatattcatgtcctttattcctgtaaaaacgtcatttttttttctctagcaagctgatatatgtttttatttggtactgggttaactcttcaacaagttctcttcttttgtgatttgtgtcatgcatttaatatttatatagtgttctgtcatattaccatatcttcccctattaacttaatttgcaggtctggtggatcctacaatggtaggagatctgtggatgaaggttttcctagagattcatatgggaggggtgcatactgtcaggatacacatgatagaaatatgtatgcaccaccgccatctgttggtggaatatggtctcagcctcgaaggaatcatgatgaggaatatgcaactgcaagagatcacagaagtcgccctgattttggtgttgataggagcaaaaggattggaagcagagaaagtgcggagtttcatggtgagtttgaagaccggtaccacagttctaaccaaagcagagatgacagctatgagagagatcatgaatatggtcattatgattatgattcggaccatgagagaggcaggagagatagtagctggaaaagacgcgattcatgcgagagcaaacgtgaaagaagtggattaagtcgtgaaagagaggaaagtccatacatgcgccatagccgttctcgatcacatggacgtgatgaccgatcaagatcatggtctagatcaagatctcctcgtgcgagaagtcatggtcggaaccaaagagatggcctgtatgatgataatcgatttgacagaagaagggaatatgattgggatgataggaggcatggtgattcagtggccccatctgccactgttgttgtcaagggactgtctatgaagactaatgatgatgacctatatcagattctttctcagtggggccctctacgcagtgtacgtgtgatcaaggaacggaattctggcatgtctcgtggatttgcttttattgacttctccactgtggaagctgcctgtagaatgatggaagctactggaaagagtggtctccaaattgatggcaggaatgtgttctttcagtacagtagtaaaccaaccggtgtaatgggtgggtcttctcctggacaagaaaatcttacaaggcctacttatgggccccgcactgttgctgcactctgtgactggatttgttctatatgcggatgtatgaatttcgcccgcaggacctcctgttttcagtgcaatgaacctcgtgctgaggatgctctaccagctgatgcgacaggttcctctccacactttgggagaaagggatctgaactaggtccaactcatgttttagttgttcgtggcttagatgaaaatgctgatgaggaaatgcttcggtacgaatttgctaagcacgcaccattaaaggacatccgccttgttcgggataagtttactcatgtgtctagaggttttgccttcgttcatttccattcggtggaagatgctacgaaagctctggaagctacaaatgggattacactcgagaaaaacggtcaggttttgcgtgtagcatatgctaaaagtacacatggacctgcatcagggggctcacagtcaaacagccttgctgcagctgccattgaggctgcatcatttgctcaacagtatgatgccataggttgggctccaaaagagtacaatcctgatgacaaacagaacagtaactttgaatctcaaaaagacgatggcagtggcacagcacagtcgggatttgtttgggatgaaaaatctggttactactatgattctgcatctggattctattatgacggaacaactggcctttactatgacagcaactctggagtttggtattcgtacgatcaacagactcaacagtatgtcccttgtactgaccagagcaatactaaggcagccggggagacgtccagtgaaaacatgatctcagatagtatttgtgggaaaaaggttgtgatctctgcgcctgctgccacaattaaacaaaacaagaaaacatcactccctgatgctgttcaagctgctgcaaatgcagccctggctgcagaaaagagagaaaaggagaaggcaaaagagattaagttggcctcaaaaagtagtctcatagctaataagaagaagatgaacaatgtcctagccatgtggaagcaaaggaatcaagaagggcaggccgcacggattgtcattgatgacaaagaaccaccaaattctgatgatagatttaatcattcacatagtggaactggtttctcttcgaaaagcaagccaaattttgaatttgaaaatgctatggataattctgttcgccaaggaattgcatcgacccaaatgttggattctgatgtaaagcctagacctgtcagtaacagcttaggtactacagttatgggtgtcataagaggttctactagaggagtgatcaagtcggatactacgtttcatgcattatctgatgccgggagcactgattcccgcaccactataatcacaagatcaaatgggttaatgacaagtcctgtggaacttgtaactcctgcaccctacaaaactgatgtgtctgccttagtctctaatacttcatcgggagtttctgggagtggtaaacgtcggttttctgaggcaccagggcaatcccagtacagggatcgagctgcagaaagacggaatctgtatggatcatctcttcgcactgatgctgttggattggattcaagtaagaatacactttcttaagtttttctttatcgcgtacaattgttgtcattttcccattgtcattccttcagcacgatgtgttagtaacagcaacatactgtccgttcagattttttttgttattctcatcattatcattttgctgaagcatcattgtcagtattagtgttggtataaggctgacttggtatttctgggagtctttttgttaccataggaatatgtccttgaccaacatacagttcaggaatcttattttttgttttgtttgtaagctttttattgattttctggaaattacctgttgtcaagctggtcactatccgtcccgaaagggtccaagtgagatagggtcgatgccatttcctcctggcgtgggtgaacgttctaatggtgaaattggcaacaacgaaaactatgaagttattaccgctgatagcgcaatcgacgaaagcaatgtgggtaaccgtattctacgcaacatgggttggcaagagggactgggtctcggaaaggatggcagcggtatcaaggaaccagtccaggcaaaatccgtggacgtcagggctggactaggaagtcagcagcggaaggctgatccaatcctggaggccaaagccggagacagctacaaaaccatcatccagaagaaggccatggcaagattcaaggagatgtcctagctagaccttttttttttgtatattcggttgtcgtattttgtcgtccgtatacttttttttttacaatctgtgcactgttttgcttgtgttttttttcttcacaaacctagccactgaattgtgatttattatcctcaaaggggcaccgtgtttatcttattattactatgtagttcgagacctggatgctttttttttcatgtgtgttggggttttcatttgcacgacgaatgtgcccgatcagttgctttgccacacatgatgtggcggtactgcctctacatcttatcgtggcacaggttgttttttaaacggtgttagagattgatgattttacaaacttggcaactctattttttcgtgaa

SEQ ID NO: 30001 - DNA, 1507 bp, Zea Mays
atcgaaacacagagcttcatgtctgcccagtacttgcaacacacgttctagccaagccatgtgactccctaccaaagaatatcctggcaaaaggattgtcaactttaatgcctcccacatcaccaccgacccctactgggtggctgccagggccacttggtacggtgcgccaaccggcgctggcccctatgacaacggtggtgcttgtgggttcaagaatgtgaacctacctcctttctcggccatgacatcgtgcggcaaccagcccctgttcaaggatggcaagggctgtggctcgtgctaccagatacgttgtgtcaaccacccggcatgctctggcaacccggagactgtgatgatcaccgacatgaattactacccagtcgccaagtaccactttgatctcagtggcacggcgtttggtggcatggcacagcccggccgcgacaatgagctccgccacgccggcatcatcgacatccagtttaggagggtgccctgcatctaccccgggcagacagtgaccttccacatcgagcacggctcaaaccccaactacttagcagtgctcgtcgagttcgaagatggcgatggcgatgtggtccaggtggacataatggaggccaactctgggtggtggatgccgatgcgggagtcgtggggatccatctggaggatggactccaagcgccggctgcaggggcccttctcgctgcgcatcactaacgagtcaggcgagacattggtggcttaccaggtcatcccggcaaactgggcgcccaacagctactaccgctccaacatccagtacgaggcttttggctctgctgctggacaggctactggctctgctgttggactggtcattagctctgctgctcgactgcacacgttaattaccaggatcattggcttgatctgtttggtattattgtatcatttgcaagggattgaggtgccttagttttaattagcacttgacatgttgggtgtcctacgctgtaggtggtgttgtgtgtttgctggaggcgtcgtcggtccagagtttcatcttttcgaaaaagttttgaaaccaaataattttcctatgaatttcgttgattcctgcgtgacaggtagctgatgtagctctgtgggagatgtacacatgtatttggtgctagatagctgggctgtcctgtcttgttctggctgttgtaaggggctcactgctttcaactgttctataaatcttactagtcggttgcccgtgcgttacgacgcttacaataatacccacgtaaactatccaccaaaaagatctcaagattttttattgattgtctcagctctctgtataatatttttttatttggctaaccgatgttattgtttactccatgcaatatgtgttggtacaacacggccaatgaagtgaacgattagaaaagagtttacaacgactaactgaatgaatagagattataaaatgatataattctaccatacagagaccaaataagataaa

SEQ ID NO: 30002 - DNA, 1882 bp, Zea Mays
atggaggaggaggcgccgcccatggagttggtccgggagaagaagctctctgagaagatccgcctttgtaagatggaggttctgaagaaatcacatacctctgttgaagacagtgatcacatatttctagagtcctctggcttgcaggatggtttgagttgcaagaaggatctccatagttgcggcaccaaagcttcagatgaggaaatttctgatcggttgcaagagaatcatgacaacacccagccaagtgataaccataactattcggtagatcaaactcaactgccctttcttcaagccctactgagagtacagatgaaacggaggtgtgtatactcttctatcacccatctcaattttccacaacaaccattgtagttgttgcctatatgccttggttccagcaccataattcccccctagtcatttgacctttttaggatgaaaagtcccctgccctgcccttcattgatctgaaacatggtcggtatccctgttaggggcattgaatttgagtggctaaatgaaaacattatgttaatattatcaactttgcctacacaaaccagttctagagccctgttagctctgtacataaaacatgcagtgacttcttactttgttttgattttttggcaaacttgcacacttatccagaggatagttatgtattactccctccgtaccaaaatagtattcgttttaggttgttaatggattcatacaatatttgatgtatgtgttttatatatgtgtctagattcattgtcatccatttgaatatggacacaaaaataaacaagtaaaataaacagtattgtggaacagagggagtatttttttactgacatggacgtatgggagggcagatttgctcccggctttaatagtacgaattgtttagtagttgaatttttctgaccttcattcattactgacgtgcatctattgttcaccgttaaaacgatcagaggacaccaaacctacagaagcatgaattaatacaagccctcatgttctccaggttgtaccataccattcatacttgtgcgttcacttttgcattgttgtatgggttataaacaaccacctaccaaccatctggtgttgggtttggatcactatggtgaaacatttacagttaatcggagctaattcgtatagcgactttgaaatcttacaaccacaaactggagaacggatgagactgctgtaacaccttatgataagcacaccttttggttctttgtgactgcaacttttggttctctattgactatatactgtacttctgcccacaatgcttccattccattcactcctgataattttatgaccttcattcattgcatctattgtcatcagagattttggatggttctatccacaatggcatcatgtgtattccttgcagtcatcgtttcttggacaaactgccagtggttcactggcatcttctcacagataagtctatagatcctacgtatttggtagtgatgacagcaacagcagcagtaggagctgcaactctactgcagagagtaattcagatacggaccaagccaactcctcccaacccacgaaggccaagttcagttcaggcgtttcactcttcgacatcctgcgcaggacatcagagcagagcaatcaggaaagctgtagcacagtcagcggtgcatcggttctcggcattcaaattattaaagaggttttctagggtgagctcgaaaaattgacaactcccaggaggttcaagacagatcacagtctcacagatggtgcctgtatggttggagattctgaattctgaccactggcctggaagttcacgacgaaagctgtctagaaaaaggcttcaggcgaggctcgtgaaaaagga

SEQ ID NO: 30003 - DNA, 1334 bp, Zea Mays
acgacacgtaacaagtcgaaacttaggtttgaaaggagagcccatacaaagacgacttgttgttcggcccgacttaattagttaggcccataagcgtgcccgttctttttcgcgtttcacggcggcgcggacagagagccatcggcggcgcaccgaccgccggcgaagggtacagagatgaagacggccgacgagggacaacctcgtgcctatacgcgtcgacgtcgaggtggacggccagcgctacagggacgccttcacctggaacccgcgagatcccgactcggagataatcagcttcgctaagcggacggccaaggacctcaagctgccggccaatttcgtcccccagatgctccagtccatccaggggcaacttgcggagttccgttcctacgaggggcaggagatgcaaatcaaagagaagattgtgcctctgaagattgacctccgagtgaacaacactgtaattagggaccaattcttatgggatatcggcaaccttgatagtgaccctgaagaatttgcgaggacactgtgtgatgatttgaatattacagaccctgaagttgggcctgcaatagctgtttccatccgtgagcagctttatgagattgctagtcagagcgtctctgttatgagagagaagcaaatgtcaaagaagggaaggcgagcaccagaattttcttcaaatagtaaagccgtgaacaatgcagtggatttgttcaagtattttggcagcaaagggagcgtcatccggaaaaggaaggaatggtacctgtatgagcctgttgttgatgtggtagctaatgacgaagacgggaaagaggaggctaataattctagcaggccgaagaaaagagccgacgaagagaaagctgcaagccttcagtccctttgaacacaagctgctgatagttctaaccaaggagggtttctcttgccaatcccagcagatgcctgcctttgacattcgtcgtaggatggcttcatcatagctacatatttgtatgtaagcggtgtgagagcgtgttattctctagagttgagttccacaagagtcttctctagagttgagttacaagcggctcttaatttctctacacaagacaaggaagaaacactagctgtagaattccaaaaggctcttaatttctcttaatttgtctacttgcataccttttggagaacctctatgttttcttggatcaccagctttaggagaaggcttctttgttgcactttttgataagagcatgttgattcttggagaaccccttccaaacatgttaactgatattatataacacaatattaaaccaaatttctatgct

SEQ ID NO: 30004 - DNA, 3425 bp, Zea Mays
cgcgagctcttccactctcagctcccgtcccgaagccgcacccccgccagcggcggcgctcccgctcccgctcctccctgctcggcgattcggcgcggcgccgccacgcctccacctcacgcggccccgccctctcggcgctgctctctggcccctggcggcacgcccttccctcctccgttcctcagccgcaaggcgccaagcgggcggccctgcgtgcgcgggcgcgggcgcggaccctccgaggcagccagacgcggcggccaccgcggatcaagagcgcgagtgccgttcaccagcgaggtggcgcggagagccgagagcaccagcacagatataacaaggcagcagccgccgccgccgccgcccgccgtaaccaggtgccaccggcgtgggcgtgacccaccacgaggcggtgctggcaacacccgaccgtagcgcggcatctccgtcctcgtcgtcaatccctgcgggtgtgcaacagtagcgatgactaggtgggatgaaattttgactcttccagttcagaacccaccatcattggagttctcagcagcggatatctcgtggtcaatggtggagggctggagggattctatggataggcttgcgctgattccatattctagggtgaatgactttgtcagaggagagtcgaacaacaaagattgtccatcaagatttcatgttgaagcacggagaaggcgtcctccgacaatgaactgcaagcccaaagttgatgggatacttgagtatattctgtattggtgttcttttggtccagatgattataggaagggtggtaatgtacggcctagcaggcccatcgcggaaaagagaaaaacacctgctggccgccctaatacaaagaggggatgtgtgtgccattttattgtgaagcgcttgattgttgaaccatctgtggctcttgtgatatataaccacaataagcatgtagataagaaaggcatgccatgccatggttctatggacaagatggctgtagggacaaaggcaatgtttgcaccatacatatctgatgagttgcgtcttcaagttatgtctttgctctatgttggcattccagtggagaccataatgcagaggcatactgaaatggttgaaaagcaaggaggtccatcaaacagggacgatcttcttactcatagatatgttaggagactggaaaggaaaatacgtcgttctgtttatgagcttgatgatgatgacgctattagtattggcttatgggttgaaaataaccaggattgtgtgttcttctatgaagatttttcggatacagacacctttgtcttgggcatccagacagattggcagctacagcaaatgattcagtttggcagccatagtttaatggcttctgattcaaagtttggaacaaacaagctaaagtatcctgtacatagcatccttgttttcgatcagcacaaaaatgcaattcctgttgcgtggattataacccccaattttgcacatggtgaaatatataaatgggtgggtgctctttatgatcgagcgcatacaaaagatcctacttggcaattgggtggcttcattattgatggtcccttgactgacgttcgcacaataagagaagtattccattgccctgtgctgatcagtttatggcgtatccggcatgcttggcataaaaatttggttaacaaatgttcagacattgagaagcgatcgacaatggccaaacgtcttggagatgcaatttctattatatgcagaggaactggtgatgttgaattatttgaagcctttctgcaagattttgttgagtgtgctgggtttcttgactacttcaaagctgtatggcttccaagacttggggcatggataactgtcttaaaggccacggcattggctagtgcacaggtagcttcagcaatagagagttaccatcacctgctaaaacttcggctgctgaatgaggcagatgaaagtgtctactggcgtgctgattggttggtcgataagttgggtacaaaggtccattcttactactggctggatgaattctcaggaaagaacagtttttcgcgttactggaggagtgagtggagtagtggcccaaacccatggtgccagggaatgcagattccagattccgatgtcgtcattgaaggcaattatgccagtgtggtcagccagaagaacaaggagaagtcccatgtcgtactgaatccaggttctgagtttgcgttgtgcgattgtagctggtcaatgaaggggaacctttgcaaacatgtaataaagtcggcaaaggtctgccgtgacaggggattggcactgccatcgttggccatgttccactattaccaggcattggcaaatcttgttcattgtccacccagtgatactttgattagtgaccatgcaatggctctggcagtttctgttaaaacacagctagatgcagtgttgtgcgctgttaatggaagttcttcaattaggccaggtttccaggatccacagtcaacgagtaagacaagagaagctgaaattgaggaagccaactctgagaatggtgtgtgcacaagtcaaccccagcctggtgctggtgatgatgaggatcaggccattcggactggcaagagaagaaagttaggggacgcttctggtgacactgaagatggttccatatatcaggacagtctggctcgcaagaaatgcaagtcaggggaagcttccggtgacgatgaagaggcctccacagaagagggcagtcgggcttgtgaaagtaggaagccaggagaagcttctactaacaatgaagaggtttccataggccagggcagtagagatcatgagaaaagaaagtcgggagaacctcctggcaatgaaggaacttcagcaacgcaagctacggaaccttctgagactgaaaccagccaagcaaccaatggactggttaggtccctcctcccctcttcggaatgcacctagaacgccttgcgggtcttgtaaattcctagttggattagtcaactgatgaattaaacagcagctgagcttaaaaaaaactagtagctgcgtctgttaagtgtgaacggaagcataaatcagttcatttatcattatgaatgggggggggggggggggtcgtgtgcattatgcaggacaacaattgcaagtcccagtttaactgtttggcacgatgttcaaaatctaatgatcccatgttcttttttttggtaaatgaagcaataccatatcatatggttacctaaacctaccgaattaaggtactgttttgctgtatatagcattcacacttctctagaatagcttgttatgcataagtgattactacttattattacttcctcccgtccctgtgttctggattgaactagagatacaaagttaatctcagttcctatgctttttttatc

SEQ ID NO: 30005 - DNA, 2460 bp, Zea Mays
ccgccattacgcgcccccgattcaatgccgtcttgagctcgtctcgtcgcacataacagtatcacgtcctccccgccccgctgcttgctccctctcgtgctcctcccacgcacggcacgcagcacgctctcatcctcctcctcacgcctcccgccccaccctcacaggccggaaagctccaaccgagaggcctctgtttgtatgtaggacacccagagcgcgtcaagaaaatatacgagagggaaggttgggagcagttcccctgtgtcccgtcccctcatgtgcctatacctgcctgccgattctatcttggccgaccactcccttgtcgtcccaattcaattctgattgccggcgcgcgagtggtgtggtgtgtcgtcttcgtgcgcgtgggaatgcaggttttggaggcaccagcccactaatcgcgacgctccacgggacttgcagctcgagtttctttcgaagaggagcgtgaaactgacgggagctgggcgtgggcgagaatggagagccgaggacggcggctgcggagccccgagcgccagaggccggcgtcgcggaaggtgccggtggtgtactacctcacccggagccgccacctcgagcacccgcacttcgtcgaggtgccgctggcctcgccggagcggctctatctcagagatgtcatcaaccacctcaacgtggtgcgcggcaagggcatggcggcgatgtactcgtggtcctgcaagaggagctacaagaacgggttcgtgtggcacgacctcgcggaggatgacctcgtcgtcccggcaaccgacggcgagtacgtgctcaagggctccgagctcgtcgaccagtcctcttcaggtccgttttaccctgtcactgtcagtaacggcagccagaagcaacagagcaggccgaaagagggcgcacggcaggcattgccaagagaccattcccacccgtcctgccctcccagtagcgtgacagttagagaagccaaggcccggcggtcaccttgtgtgcctccacaagacgaggacgacgacaccacctctccgcgccgggatcgctccttggagaccatgccgcagcaggagctggagccccagcagaggaacgagagggctcagccgccagccagcgggtctgcgagcccagtggagttcagagttcacaagcagcacgccggttgcatggacgctgcgactcaaaccgatgatcttggtcgcagaacacccgagctgcgcaagaagagtctgaggagcacagaccatgacgccgtcgttcgtgaagtcacagagtgctggcagaggcagagccatccttgcaggtcagcagacctcccaggggtgtccagggaagaactcctgcaccagtctactactccaccgagcacaccgtcgacccgtggcaagtccgcgagcttagagtcgctgatacgagcggacaacgcgacgagcagcttcaggatccttgaggaggaggaggaagaggaggaggaggaggaggaggaggaggaggaggatatcgtcgtgctcagtgcctgcccgaagctgaagccggcgaacgtgctggtgcagctcatcagttgcggctcgctttcggtgaaaggccacgaagacgccgccggacctgttcgggcatacaagcctaggctcccaagcatgaagctcccctccccgtttgtttctcgcgccatggcgatgggcgagcttgactacctgtcagagaaccccagcaggttggtgggagtgaggatggaggagaaggaatacttcagtgggagccttgttgagacgaagacgcaacgagatggtacggctgagaggtactcggcgctcaaacggtcttcttcctacaatgcagaaagagaaagggccagcgacgctctggattgcacaagacgtgaagagggtgaaacagacgacagatcgtcgtcgcgcgcgaggtgcctcccgcggacgccgatgatcctggcatccttcctgcacccgaggggcgacccgctcaagtctcccgtatcggactgccgccggaactcctcggcccgccggcaggactgcgacgcggcctccggcgacggcgggagcaggagtggactaagccaggcggcggtctcgtccgatccttctcgtattgagggctgtgctctgaacccttggtgttctcgtattgagggctgtgctctgaacccttggtgcaggctgtcgtccggagcccgcgtcgtgatccactgcaccatcgcttgcaacgacagcgacgaaggctctgaacgctcagggtcaggggagtcacgatggctgcagggagatcatgctgctgctttggaaaattagtgagagtttacattgcttgaaacgtgtattcagctagatgatccttttcactttcttaatttctttccttagaaattttatttaggtccccttatcattgtatcagctatgcgtttcgccaaaaaaaaaagatgtg

SEQ ID NO: 30006 - DNA, 4551 bp, Zea Mays
aacacaagcgcccccctcgtcgcagtcccgccgttacatggcccgctctgttcccctttccggcgcccgcgacggactgcgacgagcggatagatagatctgtgccccgtccctgtctcgccatcctcctttctcctcctccactccctatcgactatcgagcagagcgaatccttagcggggaagtctttccgagctcagggagtggggtttaaaacgcggctcgacgaaaggaaggccgcactcgctgctgctgctggtcgcttgctttcggtggcgagcgtctcggtaaagcggcgtcggcgtcggaggcggcggcagagactggacttgcttgctccttgctgcgcagtgtagtgctgtgctaccttggagacaggatcctgccgcagggactcataattgatcagtgtgccccaacataagagcgaaacgtgactgagtttgccagctcccccttcatccactgtggtcgctcgtctgctaatgcccgcatcggaggattgctcacggatatgcttctggtgatgggcaacccggggcgctcgcggcagttgtcagcgctggttgcttccgccgccatcttgctgtcactgtccgcgttgccaatttgtcggccctacacctacgagcaagatgtgtttgcgataaacggcttgtacacggcacttggagcaccacagctgcctaattggacttcaaatggtggtgacccctgcaatgaaggctggcaaggtgtttcatgtgtagcgtcaaatataacctccataattctcagcggtgcaaatttaggtggacagctgggcaacactttggggaattttacatcattaatcacctttttcctttcagctaaccaactaagtggtagccttccaagtacattgtcatcccttacacttttgacaagcatgtcactcaatagcaatcatttgactggagcgataccagatgtattttcagcactcactggacttgcaaatttacatattcagaacaatcaaatatctggaactcttaatgtgttgcaagatctccctttccaagatttgaacgttgaaaacaaccttttctctggtcccgtgcctgtgaaattactgaacttgccaaacttcaagaaggatgggaacccattcaatacaagcatagctccatctgcgcagcctcccatcgcgccaacaccattaccgtctatcccaccttcgtcagggcatgtcccctcaaaagaacctgcacattcttctagtgttccaggtggtagtacttcaggatcaggaaaacatactacactcaaattagttggatatattcttattggagtggtattagcagtagttcttgtgctaattgcaatgtactgtttatccaagtacaaagaaaaaaggtcgagagatgatatttatatgaaaaacaagataggaagggtacctcagaagcttggagagcctaaaatcaaggagccaccattaaaactcaagaatgatgctgagaaagaaacttcaaatgtggtttatgatccaagtccaagggatggggcagaacttagattcatcaccgacagtttcagtgaggaaaatatcataagagacagcaggtttggtaaggtgtatctggcaaagcttcctgatggagagctactggaaattttgaagattgactcttctaactcaaaagtgccagtagatgcctttcttgagctagttgtgaggatttctgaactgaggcatcctaacatacttggtcttgttggatactgtgcggagtttgagcagcgattacttgtctatgagtactgtagcaagatgaccctacatgatgaacttcgtcatgtggatgactcaagcaagccattatcgtggaatgctcgcctccaagttgcttcagaggcagcaaaagcattgcaacatcttcatgacggttgccaaccaccagttgtacaccagaattttgaaccctctgttgttctgctcaacagcaccttagttgtgcatatttctgaatgtggccttgcatcactagcatcaaaatcagtttctcagttgtctggacacaccttattccattatgaagcacctgaagtgcatgaatctggatcagtaagcgatcgaagtgatgtttacagcttcggtgtagttatgttggagcttctaacaggacgtaaaccttatgacagttcgtatccacgagctgaacaacatctagtacgatgggccacttctcaactctatgatattgatgccataacgaagatggttgatccttccattcgaggacaatgttctgataaggcattatcccgttttgctgacattattagccgctgcattcagcatgaaccagaattcaggccaccaatgtctgaagttgtccaagacttaactcgcatggtaagtaatgtatcaagggcttccatgtaggctatcccttaaacaatggtaaaatgtggaggtccgtccttatagaaattagaattcgaggacgcacctcgttctggagcttcttgctagattcagttctctctggccatgattcaagatgcctttgacgaccattgatgcggtagtaggatattttggccaatgcaaaatgggtggaacacagtggcaggatgcagagactgcaccacgttttgtccactgccagaatgtgaagcaaaatttgcagagatacagttgcggtactccgcatgcaatgcttggtttgaagagcttcgtaagcagagagttgctgaactgaaaagggaattggagaagtcggaaaattctatcggatccctccaatctgtgattcaaaagcctcagcaatagcaaaacatgttgacgggagttctgaataccacaccagtcatactgaatcatgtcccccgctctgaaaatacagcagatactaatttcctcagggaaagaaacatccagggatagatcatcagctgctagtttcacagaggaggcaagcaacagtcagaaatctcagaaagtgcagcagtgtgatactgattcaattcaagctatcaatccatcaccagatgagtcatatccccaggcccaagttgaaaaggtcggtcccaaagatggcttgctttggggttctagaaaacaaagaggagggagagctagaaggacacttctgaaaggtggtgatagtagcggggatggtgagcctacatctacagcattcatacagagggagggttcgtctaaaggctgcatgaagaacttcataactccaaaagtagaaccagttgttatgaagaagggtgtgaaaattccaaaagtagaatctggtgtgatgaataaggatttgaaaacttcaaatgtaggatccggtataatgaagaagtgcttgaaaactcccaatgcacaagctgatatgctgaagaaggatgtgagaactcctaaagcagaatccgatgttataaagaaggggttaaaaattcccaaagtagaacctgatgttatgaagaagggcttgagatcttcaaaggcagaatgtggtcagcctgtgattgagagagttaaactgaagctggcagagattttaaatactatatcaactcaagatgactgcaaaatgttgcaatgccaacttgatacccagaggaaaagagctagatataagaagatgattcgccggcatatggacttccgaatgcttcactctaagatcaagagtggcgcaatctcttgcaccaaggagcttctgagagatgtgctcattttcatcaataatgtaataaccttctatccgaaggctacattggagcacatggctgcggttgagcttcgtgagtctgcatgcaaaactgtgaagcagagtgcaagcttgttcttgaaaagccatggagagatcggaacagctggtgcccccgtagtaaagaatactcgagtcctgcagcctcgatgccctggccccggtgatgcaaggccaagcaaggtttcttcaagggacgctactgccagggaaggagatggcaagcgccctagtgatcagctggctaatcaaaagactatacagagaaatgagccagccaagaagagaggtgtgggtcggcctccaaagagtgggcataggattgctggggcacaggaagatagccccataaaaggcaggaaaaggggcgctggggcacaggaaggtagccccatcaacggcaggaaaaggggcgctggggcacagctagatagccccggcaaaggcagaaagaggagtgcggcagcacaggagaataaccccagcaaaggcggcaagaagagccggcggtgaagctaccatcagctcaatgccggtgaaacagtgtacagcttaaccatatatcataggctggtcccttccaacgttgtttgcctgtcaaaaaagtttttgccccagtattcaaactgatgtaacaggaagggttagctgtttctgatgttgttttgtaaggagtatggacagttaggagggaaccctcattttcctgtagagattatccgagctaggctatacatgtctgactgtgtaatgcttaatagtttaatttatatcatgtgaactgatgcttgaacaccgaca

SEQ ID NO: 30007 - DNA, 2642 bp, Zea Mays
ccccctaccccgaaggccgactaccccactgctccgcctcgcctcacgccaccacggggggagcgggagcccgcgttctgtgccctccgcgccgctgcagtccctccccctgtccaggcggagagatcaggttgccggagcggaggggggattggaattggagcgccagcaccaccacagatggggggtctgctcaaggaagagggcccggcggtggatgtctccgtggagggtaccctggtctggctgcgccgccccaacggctcctggtggcccagcatcgtcatctcgccgcaagacgtccccgaaggctgcgccccgccgccgcgctgccccgccacgcccatcatgctcctcggccgtcgccccgacggaccaaccttcgttcagtcaatctcctgctcactcctcaagtcctagagttatggagtgcagccagctactctaagcctaacgaacacttgcttgcgctcgccacagcgactggtgtaacctggccaggtgcaagcgcgtcaagcccttccgctgcggggagctcgacttcgagcagcgcatcaccaacgccctcacactcgccgccagcggcaacaggtccagctggagctacaacaagggcaggtacgcccgcatggagggcgccattctccaggccctcgacatagagaaggatagcgctcttggcccggtaaccaaggcctacctccatgcccccagctgctcacctagtcccaaagttggaatgcccaacggacaagtcaaagatgctgcaccaaaggatccttctccagccatccagccgcctctgccgccgccgcggtccaagaggaagcgcaagacgccctatgactccgaggacgatacgcctcaaggctcctgccgtatgagggatctcagggacatcggatccaagacggtccccacaatggacctgtctaatgctgccgcaatctttgctcccaagtataatgatctgcctaatgttgggcaggccagaagaattgtgcgctctcaggccaccacaaagaggaagcatgctgctgcacatcaggaccaaccttgcgggatccccaggaagaaggataggtctcgtccgctctcagagctctgcaatggagatatctggaatggttccagaccaaatggtcagaaggctgatgaacacttgttgggtgtggcaacatgttcaagcagctcctctggcacttcaaccttggatactccattggacacaaacagctgtcatcgcagcgcagcatccacagatcaagcaaagggcacagcaatatcctgcatggcaaggctactcagtgatgattcacggcatgggaatgattttgtcggaactccccctgctgcacaaaatatctcggaacccgatcatttgcatagatatcaaccttgtggattgacaaataatcctacctggaaagctgggaaacatgcatgtaaaagtattaagatgagaaccataaggtctgttggtcatgagggcaaggacaggacaagagattctaataatgatcatggctgccagaaaacaaagacaggaaagcacgaagcagcaagagatgatgaggttgtccttttggagaataggctggagaagcgttcattgaataagaacaagccggctgaacatgatactaaaatgcatattgccatagttcctagtggtatggattgtgttggcacggttcagcagcaacactgtaaaagcaagtgtggtcctgaggagtcattagaaaccttaagcagccattcgaactgtgagagtggttcagtatcgtcagtggtgtttgaaaagccactgcatttgaatcccagcctttatgatgtggagttgagtgtgctggggagcagcaacacttggcgccgtgtgccccttgtctctcttatgagtaggttgaactgtaaacccgtggtggggtatccagtctcggtggaggtcagcgatgatctgtttggctgtccttcatcaaggagagatgtccagctgcccgctacgagtcgttttcagcgcgccgtgccatcatcagcgttggagaaagaagaggtggacaggttatggcagccgcatgccaaaaggggaggggcaggggcaggggcagtgacctcgtcgtcgagaaagacgcgaggagcggcgtcgggggcgaccatcgcgtgcatcccgctccgagtcgttttcagcaggatcaacgaggcgctgagaatgccctagctgggtgccttttgtggccaatgcatttgctttgggaaatgcttgttgtggcctgtcactaggaaggagcatggtgctgatgtatctatctatctatcatgtggttgagccactccactccactcacagtaataaaaataaaataaaaatctgcttctggtgttggtgatgtattgctttctcttcctttatttgacgttgctgtagacgtatgggctgtgcccaattttcatcctactcaaccgaccgacgaattccaatcaacatgattctgacagaaccaaaatagctacagatgccatatcattctgacagacacagcatatttacactgaacaaaaaacataaggcgggcgggccagccaatttacggcgatcattataattatcggtcaaaaaattagtctactccctccgttctttc

SEQ ID NO: 30008 - DNA, 753 bp, Zea Mays
acacttttgatgtaccgcgtcctgacccatctggacatcacaccattcacatcgaactcctgctcttcagggatttgatatcaagcaagctgaattagcttccatcctgccatcgtctgggtttcatagagaagttgtcacattatgatatgaaggttggtaaggcttatttagttattaaacagactcttcagcagattgttgagaaacaatacaatctatctgatgtttttagcgagttaatagatgaggtcctccgtgccgagtcgggagacaatgaagatgtttatgatgtgcagaaaacaactacaaaatcagatgatattcttccccagtcggcagaaagttgccccgatgaagctgacattgatccactgggtaaacatggtgacgttggcaagaacatgccgaccaacacaaacgtcactcctcaagcaacaccacatacggaatcttgctcgccgatatttgatgcgacgccgcaaataaaggtttctgttgaaaccgatccagctacaaacactcctcaggttgaccagatttcacttgattcggagatgcaaactgtgttagctctacgcgaatatttgtgtgatacgcaatctgacactagcagtcactactcaactttgaggaacagaaacgacatagtcggaaccctcaaccttttgatgaatctgtactgtacacttctagacaatgcattgcccgagacagatgaaatggataaatgcaaagcagtaacaatcatat

SEQ ID NO: 30009 - DNA, 1751 bp, Zea Mays
caggccgaatgcgagagccgggccgagaaaccttcccctacggcagtggaccggtgcttctctcgcattcggcctccccttcccaccctcaacagcgaagagcacacatggataccgccgtcttctcccccgccgatctcttccacggagtcgacgacagcgacgacgaccgagatgagatgcaaatctgctccgatggggagaagccggtggcgttggagtatcaggagagagtccacgacttccctgacatggttgagccattacgcagtgaaagctgctgacttgtgaccacaaggtcctgtgtctgagttgtggaagcctcttgcaaatgcagggaaaggccgtgtactatagacctaataggtctgaccctttcctggaccccacacaagtggggctgccctaagttgtgttttttctttaatatctatctttttgttcaccattcaaaaatcgacatacagaaactgagtgtaagggagttctcatgtcatgagcttaacgccaacctgttgtggccggggacattttcatttgctacttggctggttaagaaccggtcaattttggatggacgacgagtcctggaattaggaaggtatggatgttatgctctaactctaatgacatggaagaattttttgtctttcttttctaaccaattcagttcgaatggtcactttatatctgactaaaagttttacaattactcttgttatttccctgtcgggctcagtaagtaactcaaaatatggaccatccttctcttggatttttcttctttgctactagcattgacttgaggcatcttttgtgtttttttgtcattctatcaagactttatccaatgtagtcacaagaacatgatgtgtattctacaacttaaatgtttattcctttttgtttattcatgtttttctgcatacatagtgggacaggagcgcttgcgatctttcttaggaaggcatttgaggtgaacattacaacctctgattatgatgacggcgaaattgaaaagaatatatcttacaattgcagagcgaatgccttagatgtgttacctcatattagacacacgtggggagatccatttccagtttgcacaccaaattgggacattgtcattgcaagtgatatcctactctatgtcaaacagtatgacaacttggtcaagacagtgtcctttcttttgaatgagtacaagcagaaggatcacaaatctggctgcataaccatcactgacaaatcaggtactttctaaaccaatttgatcttgtaaatcattagaggatgctgtgcgaaatgtttctttttcacttggcagggacacaaatatctgcaaaaccaccggtgtttctaatgagctggcgcagaagaatcggcaagggtcatcaatcactcttcttcgacgggtgtgagaagacgggcctgcaagtgcagcacctgggtgatcttgtgtaccttattagcaataaacaagaggcggattttgtggaaacgaagtcagacggtggcagtagtgaggggatgattttttgagtaggttttgttaagtcatattttgttcaatttcccccaaacacttgattttttgtttctctgattctatttgggatattctgtttgattctgttgcaagattgtttatgcactgaggtggtttataatggcttaagcatgcagcccagcgaggtgatctatgcaggcttaagcgtgctgctctcagtatctgcttttggctttctgca

SEQ ID NO: 30010 - DNA, 2591 bp, Zea Mays
cggccctcggcgccgctcccgccgcctccctgcccggcctccccgccgcctccctgcccggcctccccgcctggcttggcctcacttccacgcaggccaccgctgctctctctgcgcagcagcgcattcgtcgcccgccgtcaggcttctcagatccagcgtgggctgacaccgtcgtgtcttcgactgctactccacccacatcctccgcgcttgtcgcagccatcgccaccatccaggcagccgttgccgcttcccaggagcacgaacgcgccgcgtctcttgccttggagcaagaacgtgccatgggtgccgccctcaccgcccagatggccaccgcgcaacgtctcctcctcggtcgcagccccaccatgctggtcgcccatgacgatctcccgatcacttccgaggctccccatgtctctgggctcgacgccaccaccatcgtcgccctccacgcccaggccgtcgaggttcacaacattcggtccctttgtgtctgcggtgttggatccgacgtcctcccactaccctcgctggcgcgctcaggtgctcctcacgcttcggcggttcgccctcgccgaccacgttctctacgacctcgtcaccccgctgtcaccatcgtgggcccagatggacagtgtggtcctcttttggctcaacaacaccatcaccgtcgagctacaggacatcgtccgcgaccaggcggacaccgctcgccagttgtggctagctcttgaggaccagttcttcaggaaccgggaggcctgggcgctccacctcgacgaccagttccacctgttctctcagggggatctctccgtgggggagtactgccgccagatgaagggcatggcggactccctccgggacctcggcgagccggtcgccgaccgtaccgtggtgttaaaccttttgcgtggccttagcccccgctacagtcacctgaaggctttgattaagaggaccgtgccctttcccaccttccatgtcgtgtggaacaagcttcttctcgaggagctcatcatggagactgaggcacccgctccggccccgcccctctacagctctcctcccggcggtcaggcgccttcgagggagcaggcccctcgctctctgtcgatcggggctcctacccgccctccacccgcagtccctgcggctcctcgttcggcttccaccgccaacggaggtcgtcgctcccgcaagggcggtcgcgggggtggcggctccacccgaggtggtcccttcggccaaggtggcggccaggcgtggccatcattctacaacccctggaccaggaccatctccatgtggtcgggccaggcctctagtgcctcctatcctccggtgctggcgctcctgacagcgcctccctacggcgtgcctcccacgcctccctatggcgtgccaccaacgactctggcaccattccagctctcgccctcgtggaccaccacatcgacgccttggtccccgctggctggaggatggaactctgcctccctcgtcgccgccttcagcaccatggcgatgaccccacccccctccgactgggtggtcgactcaggtgcttcctaccacaccactcccactgcaggcacgctctctcggtcccatcccatccattcctcccacccctcctcgatcgttgttggaaacagtgccactttgctagtcacctcagtaggtgcctcggttctccctgggccgttcggcgttctcgtagcccctcacatcactcataatcttattttgtttgtcggttcaccaccgacaactcttgttccatttttgacccctctgttttttctgtgaaggatctgaccaccaggacccctctcgcccgctgtgacaactcaggggccctctacaggctctgccctaaccccaccgccatatctccatgaatctcggcatcgtcatgcaatgaagcgagtccgtggaccagggggcgtttcctcaacaaaaaggagctccaggagcagcagctgaaggcactgccttcacttcagactccaacaggtggggtcagcaaaatggcctttggcaggaacctatgccctgaaagcagcacatctcactcgccttcgacgagctctacaatctcgagtgcttcaaactggagtggcacgctagctcatcaagagcacgttagcttcgcatctgctaataaattcctccccagcatgaacttccacgcggagaatggaggtgaaaagatggccatcaatggcgtccgccaccacacccctgtcctgaggtgaacaacctcaactgtgggggtgctgtgctggtaccatcactggcgcgctccggtgtgcccgtggcaattcatccttggcttatgatgtatcttatagtaatttgctttcactttcatatggaacttgtctcagattaaactcggtgatatttattgcaactggatgactgaaataatctcatgtttcttacaagtgtgtgagccaagacccgtttatcttgtaaaagtttacataggtcaatgcccatttatgttgctagaaggctatctccagtagcttactcatccacatacttatattcaaacctcactctatgaatgatgc

SEQ ID NO: 30011 - DNA, 3019 bp, Zea Mays
aaccctctgttcttttcaaaacaaaaaaccaaaacccttctgtggaaaaacgtaaaaccaggcgcgccccgcaggaattgcggtcaggagaacctcatccctctcgccttcaggttctactcgccctctccccacccgcagcgcctcctcccattcccccaacggacattgcctaggaggctaggacagaaccacccagagcgcacaaccttacccgaatcgccgttgcatggaggccgtgcgcgcgtcggcggcgtgggtcgccagtcgctcctcccatgtcacggtcgaccttcaagaaattgagaaggtagtggaccaaatccaaggagatgttccaaaagttgagtgggattacgaaggaattcactactttgacaatgggccactcacagtccagtacctgttcgtcttggatgcactaaacttctgcttctggccagataaggacttgagctatgaccatttggcttctggactgaagtcagccttggagaaagacaaaaatgcccttgattcagatcgtctccagaattacactgggccccagctccgccaacttctgaactggccacgaccactgccaattgaggaggaaagagtacgccttctccacgaggaacttaaaagaagctttggaggtcaggctgctaatctagtgaagtctgctggaaactctgctgcgactcttattgaactgattactcgacattttcctggcacctacagtgaaagtgaaactggaatggcccatccacccactactactgtttgtctgcatatggatttatgttctgcctgctactttggatctgagagtcaggaaacagtgatgattgatgaactggtgcctcatctaggcatatgaacttcgtatgagctgggccattcaaaaccagatgattgtgaatatttgatgcttacacttacacccttacattttttcatttctcgtgcaaaacgttagtggttttcattttttagcagttggccaagaaatctgttcacatgatttcacttgaagttaacatttattctcggtgttggtgctttcgttggatctccattgatttgagacattgaacatggagtttatttcctcaaagaagaacatgaaactgttcccgtagtgtttaactgattatacttgttcgacaaatatgtccagacatgagctaatcatctgaaattccagtgatttaggagtaattgatttcaggcttccagcacattattctatcatatatggacatatttgattgcacagataggttcactgacaaacatgtacaaatcttaactattcaaccggttagtctgaattcagaaacaaggaaggatgctagttttacccctgatctggccatagccaacttcagaatatttcacaattcgttcttcgatcattgaatttaaattgtaccttgcgctcttgcagggaattttagcatgtattgaatcttttgttaataggatagcgttgtgcaacttgatggtaccttttgctaacgttctatgaacacgtacatctgcatgcattcaaaaccaggtttccgggaccattcactctacaaggggcaccaggttttcctgtacaagagagcccagatctttgttgctgatttgtggggcgccttcaagggacaaaactatggcgagttccacgatatcaattccatcaccatatttgctgactacattgttccagcggtcctgagggagcttggagtacttaaatatggctcgaatctatcttgctccatcgactcgaacagtgagatagtgcctggaagcgaggaggaagtggagatacgcgcgtgctccatctatgcagtggagaagatgagggacctgatcagtaagaagtttggaaagcagcttctgagcatcgacattgatctctggctctggtcctgcggcgtgcagaacatggcgctgtcacatcaccgcaccctgtcgatttactactagacagggcagtggcggaggacggataaaaattttggtatggcttgagctatacctagccacaatggaccctccgcccctgagacaggcagtcagtcaggaagctgaccctgctggtgcgctcgttcagctggccgggcgttgtcgtcgcttgttcgtcctaaccataacggtgcatgtaggtgtcgagagttttgtctccttgggaatgcacacaggtgcaaggtattgtaggcccgtcccatgaggatgcatggggttggtagtacaacatttttttttgtgatttagagacttgaactgctgcagttttcacatgaatgttatccctaaggacaaggcgggagagcgagtgtttctctatctccagaactgatcgcggcgtttattttctgtttccagttactgctccaactctttctgaatcttgctgaatttgagtaagcgcactgcgatcagtatacaggtaatgtatcagtaagagcgtacagcaaggaaacagacacctgaatactcggacgtcaaacttgtctcctgttgcgggggagacaagacaaccctgccgaggtgtcgagagaccagcctcgcagtgacaaaaagagtccagccgctcacggcccgatggaggagcgaagcaacctcggaaaagacatgtcgcgtcgaataaatgctacctcgtctgcatccaaggctgacctgcacacctgcaccggccgcccccggtcctacctcccacggtgacgggactgtccgaagcggccagcggcctagctttccgcgcctctgagccaatgcctgcgtgcagtagagtagagcacgcggcgccgcctgcgcgtcagcgtgtgtcggggacgttcggcagcgtggcaggcggcttgatggactggtggtgtcagagctgtcgcctactcgcctcgcccagctggtgccggcacgccggagttgggcgtcggcagtgggctgtgggccgccttgggcagaagctgggtacagtacaggtactcctacctggctggctgccaggcagcgcagaaaagcagtaggcggcgta

SEQ ID NO: 30012 - DNA, 1364 bp, Zea Mays
ggagaactcatgatactcacatctatagatgattttgcaaattcagacagtaactgtagcaccgacgtatactgtatacacacacaaaaaaaaaactttccgtttctgatttccgtacaaggggtacaacgacattccaatccgaatactccgacactgccctactttttgtggttagcgcaagggtcagtgttctaggttggttgcttcagtatcactacttttcctagagctgggccacatagccatgtgcaggcaggagtgttgctagtagccctgccagtgtactacagactcgataggtggccataaaagaggagagccaataagcacaatggcgcctgaagagaggatgaagacagaggccagtcacaaggcgatagcagcaggtggtggcaagatgacggtgctccactctccggttggagttaggagcatcgtgacctccttggtggctttcttcatcctagccagctccatcgtgttcctcctcgacagaggccaggaagagcaagtgcaagtggcagtcgagcatggacgccaagaagtgcaggtgaagctggaatccgggctgcaagaaccggcgataagagggacaacccaagagggggacgccagcaacgaggagtgcaactggtccaggggaaggtgggtgtacgacaacgtgtcccgcccattgtacagcgggctcaagtgctccttcatcttccccgaggtggcctgtgacaagtatggcaggaaggatgccatgtaccagcactggagatggcagcctcatggtcatggatgcgacctcccaagatttgatgccatcaagctgcttgaaaatctgagaaacaagagaatggtgtttgtgggcgactcagtcaacaggaaccaatgggtctctctcgtgtgcatggtggaggcctcaatacctgacgacaggctcaagatacgcaccttcaatggctcactcatctccttcaaggcattggaatacaacgcaacgatagatttctactggtcaccactactggtggaatctaacagcgacaaccccattatccaccgggtggagtaccggatcataagggcagacagaattgagaagcatgccagtgtctggagggatgccgacatcattgtcttcaattcttacctgtggtggaggaagcagaaggatgacatgaggatgaaggtcatgtatggttcattcgaagatggtgatgcaaagttagacgagatggaaatggtcgatggtttcgagatagctctcaagaaactaaccgaatggctgggggagaatattgacaagaacaagactaggatatttttcgcaggatcgtcaccaacacattcctgtgttcacatatgttactttc

SEQ ID NO: 30013 - DNA, 213 bp, Zea Mays
agctcacccttgctataatcacaccaggtcaagaacaggtaccgctggaggagcatgaaggatgctacgaggagtttggagaggtgtagcaagtcgtctcccaatcaactatggttgaggaggatcatggtcgtcatatgatgtatttatttaactattttgtactgaaccctattatataataaagatgtgaaattaatttatgtaccatga

SEQ ID NO: 30014 - DNA, 2306 bp, Zea Mays
ggacatatccctttgctatcactatatatattttctctcaatctcgtttccatcaggatctatggatcggtcggttcaattttcgatcggttggcgcagtgttgccacgtgtctcccgtttgaagtctaaaaagaaaaattagatgctcagctcagtcatgtattccatgtcacaagaataatcccttacaaagccacatagtaggcatgactaactccaccagcagcaacaacaaatagcaatcacttgtgacaaaaaaaagaacttgtttgtgtatcatattctttgatctgctcctggtcgctcataaaaagatggtgattcaacttcacttcttgcagtgttcttagcatactatgaatatcgaggcagcacctgaggcggccatcaactgctcagtcataacagccttacctccatcggcgatgcatcacaagaacagaggaggctgccatgtcgttattaggacctccggcacggggagccatctgcttgctagttgtgtcgtcgtcgatcgtggtcctcagcacggccggtggtctcggatccgatgccactagtaggtccgccgctgcctatctctcagttgacgacgactacggggaggaggacgagagcggcgactcctccttctccttccccgaccccgagacgagttcagcttcaaccgggctagtgttcgggttctacgacgacaagtgcccggacgccgaggagatggtgtcgtccatggtgcggaagctctaccacgcggaccccaacgtcgcagccgcactcgtccgcctcttcttccacgactgcttcatccacggctgcgacgcctcggtgctgctggaccgcgtcggcggccagagatcggagcgcgacgccggcccgaaccagtcgcttcgcggcctgggcgccgtcgaggccatcaaacggggagtggagaaggcgtgccccgggaccgtctcctgcgcggacatcctggcgctggccgcgcgggacagcctcgtgctggtgggcgggcctacctacccagtgctcacgggccgccgcgacagcgcccagagcttctactacgacgcggacggaggtggcatcccgccgccgaacgccacctacgccatgacgctcgacgcgttcgcgcgccgcgggcagttcacggagcgagcccacagcatcgggaaggtgcggtgcaggttcatcgcggacaggatctacaacttcgccgggaccggcgcgccggacgactccatcgacccggacatggtcggcgagatgcgcgcggcgtgcggcggcggcgacggcgcggcgccgatggagatggggtactacaggcagggccgggaggtgggcttcggcgcgcactactacgccgagctgttggagggccggggcatcctgcgcgccgaccagcagctcacggcggggagcaccgtgcggtgggtgcgcgtgtacgcgtccggagcgcgcggcgaggagctgttccgcgacgacttcgcgcacgccatggtgaagctgtcggcgctcgcgccgctcacggggtcggctggccaggacctaggactagagtttgaagggaaaggaggcttgatgcccttttgatgactcgtcagtgtatgtttgttcaaataaaggcgaggatttggttgcatccctatgcagatgtgcaagatctgctgacgagaggcagtgcctgcctgtgcgcagcgcaagcatcagattcagagctgtaaaatggctgagttctgactttcagcgtactccttccatctattaaaaaaagtgtaaattcatgtttgaaaccgatcatatttcattaaatttaagtaaactaataaaaaaatagcaccaacgtttacatccataaacacatttgttaccaaaacatttaataatacagatgggcaagtttaggcctaatatgaagcccttgtgccaaaaataaaaaaaaaaggaaaacagtcttggatcctctttttttctaaataaaaacggaaaggtgttggatcagcattccttcgaataacagttcaacccattcaagtacgcctcaggtactgaaaccctaaacacattatagtgatggtttagactcctctccccatgcaacctgtagactccaccgagtgctccggccacaggattggggaaggcgtagaacacgcgcttgaacctatgatgcacaagcgccatcgcacaccttcaaattaaagcagcaaacgagtaagattggtcagcagtaagaggagaaactatgtgcaggctggaggatggttgagcatacattgtgcatggttcccaaacaaggtagatatcaaac

SEQ ID NO: 30015 - DNA, 204 bp, Zea Mays
accgaggaagaggtagtttcgcctgagacgcggaggggtgggctacggcgtggatgcaggtgcacaggttgatggacgcggtgtagtggcttgggcatagggattagtggttgcacggtagtggtggccatggccgccggcatgtggggtagacaaggcggaatgggggtagacgccgaggttatggaggctcggccaaggagc

SEQ ID NO: 30016 - DNA, 176 bp, Zea Mays
ttaccagtgctcgaagcaatggtgcggctatactcaaggcttacggcggtggagcccatcgttagggatggtgccgagcgcggcccgaatcgggtgacgcaagaactccggtggggatcagggttagcacgtgaggcgagcctctttttatgggttggtgaggcgaccagctggag

SEQ ID NO: 30017 - DNA, 718 bp, Zea Mays
catttagccacgaaccaaacagtccctaaatatcggagttggatggtcggggcgcaggcaggaggaggagaagaaaaaaaaaatcaggacggaggtcgtacctggtacggtagtagatttcactgtccccatattttttaatattaaattactacgaaaagcagtaaataagaaaaaaaaggaaaggaaaggaaaggatcggcagtccttttgcctgcacgcccacgcaccgaccaccgacccgaggcaggcgtcagcggatgccccacctgtcgctgatcttccctcccattcccgccacgaccacgagaagcgagcccgaaccgcagcgcgggaacgcgtgtgggcctcggcctaggcctaggcggtgacccgacctccgccgatgacgcgtggggcccgaactccgccacatgtggtcccgggggtgtgaccgagcacgtcgcggtgcgtatcggctagtaatccgggggattcggcgagcgagcgagcacacgcctcctacccgctacgagattagcgtggcctccggatccgctgcggcgcggcgggcaacggccaccggctaccccggtagcggggtcccggcggtgggcgctatggccctgtgcctgtgcgggcggcgagcgggacgatgctgcaatgcatgctgcgcaggtaggaggagtaggaggggggagcgggtggtggggccgtccccctcgggatccggtgtttc

SEQ ID NO: 30018 - DNA, 1711 bp, Zea Mays
ctactcccgaacttccatatctctcctctgctctcactctcctcccacccactccagaaaacctcacaaaaaccctcgctccccacaacccgccgccgcccacgccgccgcctgtaccagcggcgtcaagatgagtcggcaccctgaagtgaagtgggctcagaggatcgacaaggtttacatcactgtacagttacctgatgccaaggacgctaaggtcaatttggaaccagatggtgtcttcacattctctggcagtgctggtacaaacttatatgaattgaaactagatctgaatgacaaagtaaacgttgaggctagcaaaataagtgtgggtgtcaggtccatattctgtattgtagaaaaagctgaggccaaatggtggaagaaacttgttcgagatgatcaaagggcacctcactttgtgaaagttgattgggacaaatgggttgacgaagatgatgatggtatgctatgtacttgtattttttgatactactaaaggaatataatttgtgtatcagatacagaaactggtacatgcgcttgacctcatgtcagtacacaaagatttggtttaagtgctcaacattcccaagtttaatgagcaacaacgaaccatgatcttagcaaaccacagatgcagcaagaactatgttacttgataaatgtacactgtggagtagtggattatttcttgtaactgtttctacttgaaaaatatgtcatgagcaacacctctgccttagattatacccaaacacaacctaatagacataagatcagtgtgcccagcttcctggagattgcacctaagatgatagccatcctagcttcaggaaaacattttgtatattcgatgtacagacttaatactgcaacattatcatagatgtacgacaagacaacaacaataacaacaaagcttttgtcccaagcaagttggagtaggctagagttgaaacccaacagaaaccacaagtcaaggtttaggcactagaaaatattttgtttgacactatacatgaagattgctgattacattgggcatggacatgtaaaaattattatgttcatctatctcttcttttaggtgctgatgtcaacttggatgggatggacttctcgaattttggcggtatgggtggtatgggtggcatgggtgatatggctggcttgggtggtcttggtggaatgggtggtatgggaatggatgattttgaggatgatagtgatgaagaagaagtatcgaaacctcaagctgccggacatgctgctgaggccgagaagactgagtcggcggaagccaagactgagtcggctcagagcagttgaagatgcttccgacatgatctaaactagttgtatcgtcaagttaattctgctgaatcggtggacaaacttctacgttgtggcactggccgatcccagtgacttgccctaaaatttacgttctgtctttacatgggcatcctagtgttgtgctcatcacattattgatattgtttctgtgatgcttcctttggtcgacaatcatgtgctggagtttgtttactggattgcttttcttctgtggtttttggctttatacctgtatggaaagctggagccgcaaatggagaaatagggaacgacgtgtatttttgttctttgggggtacttgtgcacatttgtttggttccttaccgtataatactctaaattttaagct

SEQ ID NO: 30019 - DNA, 2979 bp, Zea Mays
cgaggctctcgagccattcctttttctatgtggccaagcacgggcttcaaccacggcatcagccaccaggcaaccatgcggcagccgccccgcggaccacgcagattagagcagcccgcagcagcgaattaaagttacagcgggtcgtttgcgagcacacaaggatctctagctctgccatggtggtaactggtattctgggcgggctgctctaaccatcaaagcgtagcgcacaccacttgctcgacaaaaggaacatgtgcaatatggaggggaacaatatgcatgcttctagtaccagggcataacacaatgatgcctataatttttagtgtgaaaaaagttagatcaggtggcttatgaatctgtcttgtggagtagcttcatctagcaccatgtaaactgaaacctctgatgctattgtaaccgtgtagggacaacacgcatagctcacatattttggcttgagctgcctcccacactgcccatctcaatcattagaaaatgaaaaggagaatggaatatgattcttgttgtatgtagtgggcctggcacacacaaaaaaaaatgagaaaaggtccaggtttttttgttttttctaccagcttagcattttcttggaaaaataccatattttgcatagacatcagtttatatttatctttttgtatttttaatcacctcttaaaatttgcatcattgaaaaagaatcaactgctctgcatttgcaaaagcaatatgaatatttgcaaaggtgaacacctttgctggcatgcaaacctggagtttttgcagtctgtaaaaagttaatcttctgaaaatattgagagctggaaagaatcggatggtttgcatagctactttgttacaaaaccttgaattcaaaaccttaattttacaggtgttctcattatattaaaattactacatgttaaggctcttagcctcttatattggtgtactcatgtaccatcatgaagagtgtagccacgtatatgctgcaagtggacttgcatttctgcctttggttcccatatccatgctgattctgtactgaggcttgatagatatgtcttgcaatataatcatcttttctgaattctttattgtatcctgatggtatatcatttgcaatttgcagtagaatattatttcgtttttgctttctttgtgaaaatctgccaccaagtggttttctgtgggtctgtgggcaagtaatgtttccatcaaagattttttgcagtttaatcgaacagaaactgctagtggtgattcaaaagaaaaaagttcatgactagaaaataagttgactaatgcttattccttgcaagtttgttttgagtttgtcacatagggagttgcatggatttgttggcagaaggaagtgcgcattaatactccatacaccatgcagcagagagttgttcattggctgcagaacagagaaaaaggagaagacaacattatatatttggttatttctccaccgtcagagatgcggcctagtaacctgtgtgccaaatgcattttcatgaaatggcaaagtgccattgccaccctcaatatgtatatctgtgtgcaactctctgcgtgcacgattcttcacttagagggggaaaataatcttatatcctttcgtgccataagattttcagaatccgattatcctctacgacagcacaaggtgtgacaaaccgcactgccatgcaatgcagattcaaggaatctttcaacatatattcctctctccaggctttcattataaatagaggccaactgggttttgcacttcatacaaccccataccttcagagcttacaaggagtagcagagctcagaagagcattcgtattcagcacatagtgcgccttcttgaaagaactgtacaggagatcacacaatgagctattatggcagcagctcttctggtggacgaagcagtaggagagtcgactatgggaggacatatgtggtgaggccaaagggaaggcacctagccaccattgtgtggctccatggcataggtgacaatggtgctagctggtcccagctcctggattctcttcctctaccaaatatcaagtggatatgccccactgctgcaacccggcctgtcgcggcttttggtggattcccctgcacagcatggtttgacgttgaggacacatctatagatggccgagacgacattgagggactggatgcttcagctgcacacattgcaaatctgctgtcgtctgagccgtctgatgtgaagcttgggattggcggtttcagcatgggcgccgccgttgcccttcactcagcagcatgctatgctcatggcaaattcacaagtggcattccctatccaatcgcactcaacgcagtcatcagtttgagtggctggctcccttgctcaaggaccctgaggagcaagatggagggttcacatattgctgtaagaagggctggctccttgcccatcctgcttagtcatggaagagtggatgaagttgtcgtctacagggatggcgagagatcagctgaggttctgaggaactcaggattctcatttctgactttcaagccctacaacgggttgggccattatacgatccctgaagaactggacgacctctgcaagtggcttagttcgtcgcttggcctcggccgatctcgctaaaagaatagttttttttttttggcgtatgcgcaatgggtttggtgacagcatatattttgaggggaggtttggtttgatagcttgtaaaacacttgatgctagctgctctcttcgcatgtggcttttgtttccgtcgtcctaatttacgtactctatgtctctatgtaatgcggtactttgttgtctgatgtttgctaataaaaagaaaatgccgttgaggcctctgatcaatggaaacagcatttgtactgtatccaggcagcaaaacaacatttgtactcatcactgcagaaaacagaaaatctggagaggtc

SEQ ID NO: 30020 - DNA, 5955 bp, Zea Mays
atggcctcacccacggtcgcctccccgatccgggcgagccccgtcgacaaccccaccgtcgcgccctcactggcctcctgccgctgcgccttatcgctagatgctcgacatccccatccgcgcgctcgaggcagaggccagggacaccaagatgagcccgaccgcgaccgcctagccatcagctccaaagaagaagccaggggaccgatggacgtcagtgttccgtcgtggtggcccgctagatccatattcagcaagaaagatatctcgccatgccggcccagggccgcagcccgtcaccttcctccccccgcacccgccgtgacagccgcctccccacgcccgcttacccgactggccgcacaagatgcccacagtggcccccatcgcgcccacccgctccccccatccaccgcgacctcagccgccacgccgacgccatccccgtcctctagcgcgttgtcgccgtcgtcacaccgccaaaggtgcctgccccctgctaccgaggtcgacgaccagcagcggcaagctgccgagctcgacgacacgcacgccatgcttggccatatggacgagtccatcgcctgctacgagaaggggctccagatccagatgtccgcgctcgatgagcgcaatccctgcctccctgagacctgcaggtgattgacaaggtttaggaggaaacttccaaaagccggtcaagtatggagtgcttaacatcactttggcaacttatatttttttacatgtttgctttgtttgttaacaacataatttatgggctgacaatgtgatcatgtattctttctggtagtcttcgtgtcactgcttgcagttgcaggggagggatcatggctttcttttattttccatgtgcaatgtttaatttaggtgatgaactccaaagcttatcccattgttttctagcaagagctaagcaatactggatggagaacatttatctttttaataacgagtaaaagcataatggcatgcttgtgtttagttctctgtttgttgaccaatcgctatatttaatcttgattttttttatctataacttgaatttcaaagattcaatattttttattcagacattttctcttctctagatattcttttatgcaaataacgcggttacactagatcagccaacattctgggaaataagctatatggtcagagtaagaggttcaagagttgatagttcaacaactttaactgagagcaaatctacaagaaaaaggaaacaagcaacctggaacctacaactgcaggagcttgcttgaaagtgaacaatcaaggttgtgtgtatatattatgcccgacatttttgaaggatattgcgagggccattgtatctgctggaaaaatcatttcaacttgtcgaacatggtattaggatacgaattggagtggtcaacagaaattctggacagatatgtcaaatttcagaatccacgatggtcctccaagaaataaagatgctcttgatcatctattgagaagtggaatactaattttttgctgcagcgtgatggataaaggtttttgcgtattcttgggtttttttcctttcctttttggctacacacaactctttttaaatatacattcagtaggtggcaatgcctcctatttccctaaaaatatagcgccaaagagttcaaaattgaattctcataatctgctattaggaaaagaggtcaacttctatattttttacatcaggtaatttggctataatacaacggcatgctgaggtcaacttctgtatttttttctgcaagtaacttggctataatacagcggcatgctccattctgaagctggtcaagaaataaatatagcacttgcaatattttccagtagtcaaacctctccattacttcaattctcgttctcatttttgactatgttcttcatgtcagttcaacataataattaagaggtcgcttgcccctgagacggcttcatggtattttatttgttttttacaaagtattttttaagcgctaaacttacagtgcactttctctattcgttttggtgctgcttataagtcttttgtgttttagatccatcgaagatggcgcttaatctcgagagctagggagatgaaatgccttttgtacatgatggaaggaaacaaattacgtacatgtatatgtggatcgaattgactgttgcattctgcctgtatttaagcaacggtttccacccaaaacgtctataatttggtccttcctagatgtgtcaaatgtgtttactgcactgcgtttgcttttgtggcagcgccctaatagttgtttataaagtctgatgttaacaaactattgtcatgctatgtaatatatagtcttaacatgttggtttgttgagtgttcgaatatcagttttatattattatgtcaggtgttattagtgttcaattttttaagttcttgttgtacatcctatcattacatgagacaatgttgtgatgtttacaatattgtgttatgtatgttatatcattttggtattatagtataatttaatttgtatcagtttagttctgtattggttgttgccaaaaaaaattatgagatattaaggtcgataataatgttcgtttttatataatcgttttgcactaatattttgttaatttttttgtataccgttgcaacgcacgggcacctaactagtatgagactatgagtacatcaagtgcattcccttagaactcttgttgtgtaaaaaaatgtgtaacatgtcttggtacagagattaatttggtttgtgttttttagactgcaattatatctgggttctcagccttgccatggttagtcaagcccctctatgattttatcaggtttcaccaaaatactgaatagccttcctatcatccctttctttctgtatatgatatatgcatttaattgcaatgatgtactgttgctatttccgtacacagttgattcaggtggttgattatatggtggttcagagagctcgaggtgaatcacagagtacatatagatctctccactccagtcactatgttgggaatcctcagcctttggaggaatcatgagtgcatacttcagtggttctccagtcacttatggcgtaagatttgtctttggtgttacagcacttttgccactgttccgagtagcagagaaggacaactctggcaaactgtgaagaaaataaaagattttcacaagcggaatcttcagaatctgaataaaggagttcgtgggaatcagttgtaccaaaaactggttcagttttcgtattccaagcatactactggaagttcacactgatcggcgacaaactctcgcccaaggagaagttgaaggaggatcagcgtgaacacccactgaaagagagatggagttgaatgagaaatctgaaaagaatacgcaagaggtagatgagaagttccaaaacacaaacttgtatctcaagaacttagagatggagcttcgggagttacaagtgcttcataagcaatcagatagatctgaaagttttactgtgccaacacatgcacacactggtggtgcctgcatctagctattcagatcaaagcctgacaggtaccatagggcaaagtgaagaagaaacagaagagttgagcaagatcacgctagagaataaggatattcagcttgatatcaatataagagaagaatcttggagctcttcacaacaagtgaacttttacacagaaagtaccagctccagtgaggcttgtttgatggagccgaccctatggagctgcatgtttatgattttaaaggacctggtgtaaccttatcaatgtacaatagcgatgagtttattaggccttttgctaagtcctccatggatatggctctttcaaaaaagtcgtctcttcatctcagcaccaagaatacaatcatcaagaagtatgacgacaggcatggatcatctatgtttctacaagctcgcggtcacatttattaggccttttgctaagttcatggatatggctctttcaaaaaagtcgtctcttcatctcagcaccaagaatacaatcatcaagaagtatgacgacatgcatggatcatctatgtttctacaagctcgcggtgatcaacttgctattgggaaagaaactgcacgtcgtttgggaatgggtactaatatgtacccttcctctgctttactcagacagaataaggatgagtcaattgcttccttgccaattgatgaattgatcgagaaggctgatggctttgctggtgtctttccagaacacaagtatgagatcgtgaaaggcttgcaagcaagaaaacatatatgtggcatgactggggatggtgtaaatgatgccccagctttgaagaaggctgatattggtattgcagtagcagactctactgatgcaactcgtagtgcttctgacattgtcctaactgaacctggccttagtgtgattattagtgctgtgctgacgagtcgggcaattttccaaaggatgaagaattacacgatctatgctgtatcgattaccatccgtattgtgcttggttttatgcttcttgcgctgatatggaagtttgacttcccaccatttatggtcctgatcattgccatcctcaatgacggtaccattatgactatctcgaaggacagagtaaaaccatctccacaaccagacagttggaagttagctgagatttttgcaactggagtagttcttggtggttatttggccatgatgactgtcattttcttctgggctgcatacaagactgactttttcccgcggctgttccacgtcgaaagcctcgagaagaccgcccaggatgactttcagaagttcgcctctgccgtgtaccttcaagtcagcacggtcagtcaggcccttatcttcgtgacacggtcgcgcagctggtcgtttgtggagcgtcctgggttcttgctggtcttcgctttcttggtggctaagctgattgccactctgatcgctgtatatgccaactgggcgttcactgcgatcaagggcattggatggggctgggccggtgtcatctggctctataacatcgtcttctacttcccgctggacatcatcaagttcctcatccgctatgcgctgagtgggagggcatggaacctcgtccttgagcagaggattgcgttcacgagcaagaagaatttcggcacggaagaaagggagcgcaagtgggcgcatgcgcagaggactctccatgggctccagccgccagaagcatccatcttcgagaacaagacgacattcaatgagctgaaccagctcgcggaagaggcccgcaggagagccgagatggcgaggttgcgagaagtgagcaccctgaaggggaggatggagtcagtggtgaagcagaagggtctggacatctagaccatccagcagtcctacactgtgtgactgactgactgacgacgacggggtttatagaggtttcttcttatactatacaatctgtactaggtagcaataaggatcaaggaaggaacccctatatattggctgcggttcgcaggaaatgaatgatggtaatatttatgatgtcggtgtggtgcttctgtcgccaactctcgaccatactaccctcaactcacccccggcaccaccggcaggcattgatattcagagatgaggttttgaatgagacgttcattatttgtacgtatttggaaagtcgtagaacaacatgatcaatactttgttcagaaaaggaacgcagctggcactctagccctttctagtctgcaaaaaattactgcagcatttcgaatgttatcttatggggtagttgctgatgctactattgattcacccctagaagtattcacaaacatgaaatgcagttctcttcttcaagtttgatgatgaagatgtttagtactacatcctgatgaagatgttctgcatgcacatgtact

SEQ ID NO: 30021 - DNA, 2595 bp, Zea Mays
tccctcccgtctcccgaaacctcgtccgccggttcccgtcgccatggtggtggtagtgtccacctccctatgctccttcctgcccgcgcacccgttcagcctcgcgcgccctcgccgtccccacccaacgaacccgaccgccaaacccctctcccgtaccctctccatccgctgcatcgccacaaccgcggcgggacccccgccgctcccaccgccgaagctggtccgctgcccagctctcgaccgccaggcggcgcgcgcaagccgactccgctttgcgcgcaagctcctcaccctcctcctctccaagccgcgccatttcctcccgctccgcgtgctcaaccgctgccgccgcttcctcggcctcccgcgccgcggccgcccgctcatccccatggtcctccgctacccgaccctcttccgcctcttccaggcccacacctccctcccgctctccccgtccctctccaccctcgcggtcgcgctcactcccgccgccgaggcgctcgccgccgatcttgcggcgctccgcgccaccggcacaggcgcaggcgcgctcgccgccaagatccaccgccttctcctcatgaccccgcgccgaaacattccggtgaacaggctcgtccacctcgcccccgacctcggcttttccatggacttccgcgcgacgctttgcccccgccacccggacctcttcagactcgtgaacacctcccgcggccacgcactccagctcgctgatcccccgccaacgccccctccgccgcccctctctcttcgccccgccgcgccgcccgaccgcctcatggaccggccgcggaggtttccgcacctcccgctccgccgcgggcttaacctccgccgggtgcaccgggactacctcctgcggttccatagccttcccgaggtgtccccgttcgagccactggatgagggcgctagtctggagatgttggagcggcgggcgtgtgctgtggtgcgggaggtgctggccatgacggtggagaagcggacgctggtggatcacctcacgcacttcaggaaagaccttggcttgccaaaccggctgcgcgccatgctggtgcgacatccagagctgttttatgtcagtgtgaagggggtgcgtcactcagtgttccttgtggaggcgtttgatgatgatgggaggctcctagtggaggatgagatgctggttgggagggataggctggaggagcttgttcgggagggaaagcggatgaggcgtgctcggaagaaaggtgttctcacgttcgatggtgacagtgatgaggatgaagatgatgatgcagcagaagaggaaggttcattaaaggtggatgatgaatttggggacttgtttgaggatggtgtcattggggaggactgggaggaggtaggcgatggaggtggaagtgatgcatatgaagagtacgatgctgaatcaggtgacatggaggagttttgggtcaagaaggctgtggctcaaggactggttggcaatggtaatgagcaggatgtttggtgagtgcatcagcttgtgggactgctcaggaagttaacgaagattgagaattcctcaagtgtgcttttctcagcaatgcacataaaccagtaagcatcagtacatatccgggtatcttggacctcttggtcccatttgccgcctgtctgttggtacttgcaaggaggcatgctctcttacttcccaagatctcttgcacggaaacacatcacaaacctaatgtgtcacttcttatgctaaagtgtgcagagtgcgatagcttctctgctacagaaaactttgaaaaagatggcgtttcatctcttaaggaggcagccactgtatccgtgttagagttgaatgtgccctcctgtcagaagcgtttatgtattataggaggtactgctctaaggtgaaagagcaatgctcagcagatatgatacatgctgaggatgcattcaaaagctcttggatttatcatgctgaggtgatgatggctgagttttgtactgtctgcattgaaaagaatttaattgataaaatgattgatctgccctgggattccgaggaagacaaacatcttcacaagttcctcttcaactctgctcgagaagtgcgcatgaaaccaaatgatagtctgcttgttgtctactaccttgggatacaggtctctggatatgctgagaaacctttcatcttaaatggaactggtgtagcccaaaatggccctgctaaaaggtctgtctctggatatgctggctaccagccaaggataacatcttgattctgcacgctggtttgtggcgatatgtttcgtcgtggtcctggttttaatttgggagttcaaaatgtaatatcagtggaatgaaattcgtgcgttttgagtagctcggggtatagaatttgaatctgactacgtttcaaatactagagttagatgactgcagtggctggcttccagcttctttattatttttgtctattattctcctatctgtcaatgtggccggtttacagtcaattagcgctaacagaggctacatcattcagtgacaaaaaaaaatagtgaatggtgaaggtatacaaactgagct

SEQ ID NO: 30022 - DNA, 599 bp, Zea Mays
cccctcgccctcgcccgcctgtttaaacctgactgtctataacttaccgccggtccgcacccgcccaccgtccctgtccccttccccgtctaagcactcggatcctctgccgccgcgatgagctactacggccagcagcagccgcccgtcagcgcgccgccggcgcaagcttggccgccctttgttgctgctgcctattggaagcctgcttctgagatctaagctgcgcacaacttgttctacaaacaccacttcaatttgcacggttgatataactggggattggcttgttagcgaagaaccgaagataccatgggttcttatgcaaatcacagttctcctagttctttctatcgttctgattgtccgttgcgatgtttggtgtacctagtagtatcttaattatataccttacactgtttacctttccaatggaattcttggtctagctaacattgtgagattatgtcacttttctcgttctctgtagtcattgcattttgctcctggtgttgtcttctttgtgggatgtccaatcttttgtggcctatacaagagcttgtttggttgatgccaaagctacctacacctaatcttag

SEQ ID NO: 30023 - DNA, 2078 bp, Zea Mays
ggcagcccggcccagcacagcagacactccgccacgtcaccgtcgccatggcgctgcaccacctccgcctcgcgccgctcgcgctccttcgcgccgcaagcctcccgcccctcgcctcctcccgtatcgccgcgcgcggccaccgccgcgttctcctctttgcgccgccgtcgtggccgtggcgccttctgtcgcccggtgcgaggccgcgcgcgcttgccaccgctgcggcagaggccgacgatgctacctcgggctcgggcaacgaattcttcgcagagagcacgtcgtgggcttcactcggcgtatccgaacgcctcgcgtccgccctttgcagtgccgggctctcgaggccttcccttgtccaggcaacctgtataccacatgttctcatggcaaatgatgtaattgtcgcagcagagactggtagtggcaaaacccatggttaccttgtacctttgattgaaaagctgtgctcaaaatcttctaccaccaaagatgacaattgtcaggacaccaccccaggagcacatgacatggtgttggtcctttgtcccaatgtcatgctctgcgagcaagttgttcgcatggctaattcattacttgacgagtctggcaaaccacttaaaagagctgctgctgtttgtgggccaaatggctggccagctgttcatccagatattcttgtagccaccccagctgctctattaaactatctatttgactatgacccggaaaagaggcgaagagagagattcatgcgtaatgtaaaatttgtagtgtttgatgaagcagacatgctactctgtggaagttttgagaaccaggtcattcgtctcatcaatatgttgagatttgatgaaaagctactttctagagcacaggattctggaaaggatatatcacttgggagtgatgatgaatatcatgaggattcaaagtttgagactgctgaatttggtagttctgacaaggaaattgaagacaatattgtggaagatagacttgtcaagttggagaatagtcacgttggagcacacaaggactggaggagagttagaaaaatatacagacgcagcaagcagtatgtctttgttgctgccacccttcctcagagtgggaaaaaaactgctggtggtgtgctacaacgtatgtttccggatgctgtatgggttagtggcacttatctgcaccgtcacaaccccagattagaacgaagatggatagaggttactgctgatacacaagttgatgctcttctgaatgcagttaaatatggcctgaagagtgaagttcatgatgctaaagatgttccaagacgcactatggtctttacaaacaccgttgatgctgctaattcagtctctgatatattgcatcgagttggtattccatgtattttgtaccatcgtgagagttccttgaaggagcgggctaacaatttacagtcttttcgggaaaatggtggtgtgcttgtatgcactgatgctgctgcccgtgggcttgatgttccaaatgtttctcatgtcattcaggcagaatttgctgcctgtgctgttgattttttgcacagggtgggccgcacagccagagctggtcaatctggtatagttactagcctatacacagaggcaaatcgtgatcttgtaagagcagttcgtcaagcagaggagttggctcagccagtggtaggattccgttttcatcaccctctggaaggagggagcattcagcaggaaaagaagctttcgcaacaaactaaagaagcaagcattacaaaaacgcgaagcactgctatcttgatagcgtgactcactatatttgtagtaaggagaaaatatatgttttttttctctattactgggtgatgaatgtttttgtagtactatatagaaagctgctacatattaaatagaagttgtattcagaccgagtgcgttgaagtaatctgaccaacatgtagtctcttggataattatatccttatggcgttttcgtggtatttttaccgcattattgcaagtgattacaagtatttttgagaaaattaactatatggccaaaaaaagtctgcctta

SEQ ID NO: 30024 - DNA, 4459 bp, Zea Mays
gttggttgctccaggtggtgtccggaagggcttagcatgcacttgaagaccaggcagctgttctctactcaaggaagagatggcccatgtttcgttcaaaagcaaagatgtggacagcggcatgtcccggtggtctgaatacctaagtgttgaagagccaattccttccgcaatggcaacctggaggaacatgagcgctgatgcgccgcaaggctcttctgctggtagccacaaacatcttcagatggagccggtggttcagctgtccaaggttgcggaaggcttgctggccaaaatgtaccggctgaacagcatcctggactatccagatccaaacacgcacacattctcggatgcattttggaaagctggtgtctttccaaatttccccaaaatttgcatcacgatgtcaaaaaaatttccggaacatcctaacaagctgcagctagaaagggtagataagtttggtcttgatgctttaaacgagaatgctgaaggttacatgcacaatcttgagcagtggatcctgttgcttcttgatttgctggcatttcgtgaacaagctttgcgacttattttggatttgagcagcacggtcataacattgctgccacaccaaaactctttaattcttcatgcttttatggatctgttttgttcatttgtccgagtgaatcttttctctgacaagatgccaagaaagatgatcctccaggtttataacatcttgcacataatgctaaagggtggtcgtgattgtgagttttatcaccgactggttcagtttgtggactcttatgatccacctatcaaggggttgcatgaagatcttaattttgtgagcccaagaattggagaggtcctggaagctgttggcccaattatatttctttcaactgatacaaaaaagttaaggaacgaaggtttcctcagtccatttcatccacgttatccagacatcctaacaaattctgcccatccaatgggcccaagacttggctaatgtcacatcataccgtgagtgggttcttctaggatatcttgtttgtcctgatgaactacttagggtgaccagtatagatgttgccatggttgttctgaaagagaacttaatacttcctctgttcagagatgagtacatcttacttcatgaaaattatcaactttatgttcttccaaaagttctagaatcgaagagaatggctaaatctggccgaactaagcaaaaggaagctgatctggagtacaatgttgcaaagcaggttgagagaatgttaacggaagtgcatgagcaagcactggtgtcatgtgatgctatgcatcgtgagaggagaattcttcttaagcaggaaattggaaggatggttttatttttcactgatcaacctagcctcctagcacctaatattcagatggttttttctgctcttgctttgtctcaatgcgaggtgatttggtacttccaacatgtggggattgcatcatcaaaatctactcggttgaaaactgttgacattgatgcgacagacccaactattggtttcttactagatggaataggcaaactttgttgcctgcaataaaaggttatgccttatcatatttgttatccagtgctggaagaatacggttcttacttggtactccaggaatggttgctcttgacctagatgcgacactgaaaggcctttttcagcaagtcctccattgtctggagaacattccaaaacctcagggggaaagtgttcctgacattaccgctgacttggctgatttgcgtaagcactggctgtcaatcttgatgatagtcacatcttcacgatcctcgataaacattaagcacttggagaaggctactgtgtctactgggaaggagggtttggtgtcagaaggcaatgctgcatataattggtcaagatgtgttgatgaacttgagagccaactctccaaacatggaagccttaaaaaactctacttttatcatcagcatcttaccacggtcttcagaaatacaatgtttggcccagaaggtcgtccacagcattgttgtgcttggcttggagccgcttgcagttttccagaatgtgcttctgcaattattcctgaagaggttaacaaaattggcagagattctatctcttatgtggagtcccttatcgagtctatcatgggtgggttggaaggtttgataaatattctagattcagaaggtggatttggctcattagagatgcagctttccccagagcaagcagctcttcgcttaaataacacaagagcaaagggtgtttcaagcttgttaactccaggatatgagagctatcctgataacagttcatcaattaagatgctggaagctgctatgcaaaggctgacaagtttgtgttctgttctaaatgacatggagcctattggtgttctcaaccatgtttttgttctacgcgagtacatgagagactgcatcataggaaatttcaggagaagatttcatagtatgattagaactgagaactgcattcagcgaccatcaatcatagaatctcttctaagaagacatctgggcatcatccatctagcagagcagcatattagtatggaccttactgaaggcatacgtgaagtgctgctagctgagagttatactggtccatttcccaatcttcaaatgtttgagactccagtggggacacaaggaggggggtctgccgttgagatgatatgcaactggtatattgagaatgtagtaaaggacgcttctcgcattggagttgcttttgatgcaatccaaaattgcttcaggagctcacagcctattggtggtggatgtttggctgaatcatttacagataaaagagaaatgaaatcacttgttcgtctttttggtggctatggaatagataaaatggataagatgctaagggagcatacgtctgcgcttttaaactgtatcgattcagcattgaggtcaaatcgtgatgccttagagggcctagctggaactgtaaattccggcgataggattgaaagggatgtgaacctgaaacaaattattgacctcgaaacactggctgacctctgtattcaagcagggcaggcaataactttccgtcggctgttggttgaggccgtcggagcagtccttgaagagaaagtgcctctgatatattctctgctcaaaggattagccttgcagttgccagacgaggtacctgataaaaatgagataattagattgagaaaggttgcgagcagtgttggtgttggcgacaaacatgatgctgagtgggtacactctattctggcagacgctggtgcagctaatgataattcttggatcctacttccatacctttgtgctgcattcatggtgtccaacatttggaacggtgctgtttatgatgtcaatataggtggactcagtaacaatttgcactgcctagcaaggtgtgtaagtgctgtgattgggggaagcgaatacactcgggtcgaaagggagcagcgaataaattctctttcaaatgtgcatacagatgagctgcaagaggccgagttaccgagccgtgtctcagcagaagcaaatatcaaatcttgtatgcagatctacgtcaaactgtctgcagggatcgtcctggattcatggaacgacacaagcaggcagcacatcgtcccgaagctgacattcctggaccagctctgcgagctgtccccgtacgtgccaaggagcaccttagaagctcacatcccatacaccatcctgcgctcgatataccaccagctgtacggaggctctctgctggcctcggaaccggcggagcagtccccaaggcagtcgcctctcatctctctggcacacgcgtccccgtccgcaaggcagatgcagaaccgaccagagacaacacccaggtcccacaccttcgacccaggctactacagctcgtcggggtcccagcacgacgatggctacgacgcggataggaggaccggacggctgctgcggagcttgaggcgctctggaccgctcgacttcggtgcgagcagaaaggcgaagaagttcgtcgagggctccagctccgggagcagccatggagctggctcgctgcagaggttcgcagtgtccagatctggccctctatcgtacagatagggccgcatgtaatgtaaactctagagagcagtagatcttcctatgcgtgctggtttacgtagctagcagtagcaacagcagcagctagttgtgctgtaagtaaaacccattaattgcttaatttgtgttgactgtcgttaggcaagtgatttgaattagctgttgctcgtttggtttgtgtatcaacaatacaattgttcgttgatttttcttgatagcaaagtaaagtaaaccaaccttctcttgaaagaaagaaatagagagaaagattagacggaggccgattaagcagagatgaattggttctgagtgtag

SEQ ID NO: 30025 - DNA, 5631 bp, Zea Mays
ccagaagcttcagtctgatcgggccagagtccgcgacgagggggtgaagctgctggggacatggctgcagggtgaccgcgctgcgtccttctgccgcctcctcggccgcaacaccgtcaggttcaagcccggccacgggaaccttaccggagggcattcactacatttgctctcagttgctaagcaactttttgttcatatttgggaggtcataaaagatggccctagccttcagttagagtacagcataatccttagacagcttctaaatgtgaaggagtaccgctatcagatgaaacctcgaacatatagcaattttgtatcactctacatgaagaaggttgctagtgcttttgatgcaaaattcagcaatcaggcgagctccaaggatgaatccttccgctgtacattgacacttcatgttctacttgaaaacccaccaagtgattaccctgatattatgcgggaggaggttcttaatggatttagtgcaatcttcttacatattagggaggagggaaagctgactcgcaaacttatggaatgcattaacacctttttactgaaggatgggccaaatctgggatacaaatctgtgaagatccataatgcagttcaagagtttatattccgttgttggatgacaactcatgatcaggccttgaagagtttgttcataacctacgtgaaagttcagctgaagattgccaggaatattccagagattttggaaaaacttattgatgtcatcattaaggaactagacaaaaatgttaacactggacctggacttctatggtgtgaggcaccaagagatgagaaagctgtgtccttaaggtgtttccaagaggaatggatggatctctctgctactgttttttatctggcctgcaaatgcacaacaaagacagcaaacagggagaaaaggatgaagaaagaacacattatgaaccttatcgttgatggcctttttagaggatctttgttttggagtggttctgtttgttttctgattcacaagtatggatatcatctagagaaatctttgctaattagttggtttgaagcaagttgcaaagctttgagaagtatcttgatccatgcaaatgccatacgttttcaggattcactactctggcttctcaggacattcaaggagttctccacagtgctcatgcttgacactagggataaagtgcaattttgtttaacaaaaggcgagatgtcaattgttgaagattgttggcaagccatatggaattcccttgttcacgcatttccgttgttaagcagcatagatctagttgctgattcagctctgattttgctgggtggaatgatcatgcgggaccaagttcatacatcatttctatcagaagatacatggaacctgcaaatatttaaaaaatttccatcgccgtctgctctgtattttgttgcctgttacttctcgaggataggctttcagggtgacttatccaattctatctttgttcggaagactctgctaaggtcaactttggagttaattcattcaaaggaattctctcttttgaatgaacaaaatgttgttatcattcctgaagctattttctcgctgtgtgctggcttttcatcaccagtaattaattcatcggatatattgcaactgtttggtcattgtaaaattcattccaagatgtctcttgaggatgataactgggttcttaaagatgaactaccctactctgtggaagctttgtcagaaatcactctggatacttgtaccaaggttatgtctcataaatgccaccttatacatcttccggggactatccagcaaccaatgctcctagagctcatggaattcatgaaaggatttgtggcttcaaatgagcagtttgagaaagtggacttgaataatcttgttcttgtttgttctcttctctgcaatctgattcattgtgcattgttgtcaaggaccatggaagaaaaatcttcacttttgcaagaaacagtagattatgtcaccaatattttaaaacatattgtgtcatttgttgtgaagaagaatgatgaactttctcatggtcttactaacataagttcagcattggatacaatgggctctgctttctcctcaatcaagagcttactgtcttctccaatatttaatctgtcaagagttgataatggagtttgttctgttgttatcaaaagcattactgaattacttgatgaactcttggtggcaatttctcagctgttttgtcagatctctagtttagtgagcaattttgatgcagagagtactggtaaaatgctaccaacatctagtatcaatttagaggacctaaatcctgttttggactgtaaaagtagtgttgctgatatggatcttgatgtgatggactctagtgaagtagattctgtcacagctagtgcgagtggaagtatgggtagcttcttacgacctttggaatggaagctagatctagtttgcattatttcaacttttttctcagtttcatcacttcatacatgggaaattttgtacagcttggtggataaagaaggtgacgtgaaggttcgccaggccatcttgcttaacctttgcagaaacatctccgcgtcatctaaaactgtatctttagtggtccattttatagttgatatgagggacagaggtgcaagttcattacttggacctgcagagtgcttaactcacatacatgctttattaaaagcgttgatagctatccatggtggacagaatgctgatggaaagcaaccaggacgcgaagtatttttcagtgagaaccaggatatcttatttgacttgttaaatagggctacagacataagttctgtagattggttttctcgcatcaagttcattgattgtgtctcctcctttgtttgcctgttccctgatgttgcccaggatttgatcggatgtttgcttgacatgctgcatgatgctgattaccgtgtcaggttgtatttggctaggcaaatcgtcgtgttattccaaacatgggaagggcacaatgaattatttaatgatgtttgctcaagcattggtgccaagatggtgaagttctcaaatatttctccagttacagctagagaagtcttagctgttggtccacaatctgttctcgtaattgaaactgctctcattacactagctcatttggctgtgcatagcgaggatgttgaagttgagtgtttgttcatgatttctgctgcggctgctatagagccttctcagcgagaattagcttttgcgttatttgattccatttcaaggaggcttggttatgcttcaagaagcaagtatctggaccaagtgatgggcccgattctttttcgatgggttgcttgtgagatgaatctaatttcacttgttgaggtgcaagaaatgtttggttatggatctgctgagccaaacaactttgttgaacattgtagttcatggcttctccctttcctcattctcaggggtgatggtgctgatatgaattggatatcgaagattttatctcaacctttgtcaatcattatcaagagatacttcgttccaatctttggaatgtgcattgctgtcagatgtggcacagggccagagaaggacttagctgaaactgtcttatgtgaatcagttttgcagcttggtgaaatttctgaacttgagcgtgatgatctcattaaaaaacacatggttgcgatcgttgcctttttgctctctgtttcttcatctgctcatgggccacaaattccatatttttccaagaagaatgttgcactttcagtcagaatggttgttgatggatttgtggacacaatggatgataacttggctgatacagttgttagtgataaagttaatatatttcgtgctgacagagtttttaagttcctgttgtcgatacatcagcaagttgcagatgccagccattccaggcacatgggtcatcgtctttgtgcaattgaggttttaatagatgtacttgggcacagagtggttcttgagagcacttgcttctatattatttctatagtggggaactatattcagcaaaaaccactgcaaggccagtgctgtaatattttgtctaaattgttggctgcttttgatggaaacacctctgctgaaaccctgcaagtgcttggcagacagcttcaggtagtagttccaaaattaattttttcctgcctaattaatgagaaagaagaaagaagtggtactgaagattcatcaagagttctttctttactccatcaattgacagtggagattgatcctctgctttatgattacataagagagttagaaccacttcctgatcttgattgcttgaaagatgtacaggagtttcatgcttcactttctgcctcacattcttcaaggaatcagttcttaaagtttgttaataaggctccttatttaccaccagaactatttttgttgagtcttcgtgcgtatcacaaaaagttatttttgggagaaatcattcgtagaagtgacctatctgcggctgatacaaacatggttagctgctggcatagtgacccagatgtcatttctgctgtatgggctcttgttgacatttgtagctcatcatctgtagcaaatgaagcttcttgggtgcttgctgattttatctctagggctggtatatctgatgcacatcaagtaatattccgtctgccaactaccaccgaaaattattctttacaactacatactggttctgcttccaaggaggataaattatccacaaactatggtatttctgatgatgttctggttgggcttttgaaactcttgaagacttatttatctgatgaatctgttgaaataatagatgctgcttcacaaacactgaggggtattctgtcaacagcacgggggctcaatgctctgcagtttcttgattctcccgataggtctttactcatggttcattcgagaggggtaaacattcagatagttgaacagactatatcacaaatggaacagtgtgctggtgtttcacttgatgatgcagatgtgtgggacactgatggtcgaacttgcaagcaatggctgtgcacccttgtcagctcacttatttgccactgtgaagataccatcttgagactctgtaggagtattgtttttgtcaaagttaaggctgctgagcttttgctttctagtactctagtgaacattgctggcaatgttgattctaatactgccatctgcaaattaatttcaacaaaggttgagaaaataattttttccgactccaatcattcattgaagtcaatccatctgtttctggatgcactgaatgtcattagatctttttatgttgctgaaaaagccagaactttcccttctaatactctcaaggatggtagatctgctagatcaaaaagtcgatcaccagtgacaaccccatcatcatcatggaagaaggcgatccctccatcagtgtctacttccgcaagatgaagggcatggtcgatgccctagtggatcttggtgaagccgtgtccgatcgtctgctcgtcctcaacctccttcgcggtctcgacaagtggtttgagcgcatgaagaccttcatcaggcacaccatgtcgtttttgtcaaagacacatcca

SEQ ID NO: 30026 - DNA, 1312 bp, Zea Mays
cacacacaaacacacacgcggttatactaggccaccataatttcggccccagccgacaagctaaaaaatgaccaaactctaacaacatttagaatctctgtaatttgggtaacaaatcacagcattagctaaatcatcctaaagacagaagttgattcatccggcgactcagatctatgtgaagcacatatttcagatatgagcaaattttgacaaaaaaaaaacaaattggtagcattatgacactacttgcagagtatattgaagtatgcaatctataaattggcagaaccatgtccaaatcaaatcaggacatgtttggatacacatggctagttgatagtttggctaaaaattagctatcatcctaaagacagaagatgattcatccttgagaatcggatctatgtgaagcacatatttcagatatcagcaaattttgacaaaaaaaaattggtagcattacgacactattgcatagtgtattcaagtatgcaaactatgaattggcagaaccatgtccaaatcaaatcaggacatgtttggatacacatggctagtttggctaaaaactagctccagtcaggcatgcctgcttaacaactggttggagacttggctaaaaagttagccgacctattagacccagctaaaattagctagctaacaactaacccaacatagcctccgattatgtccagaatttgtttgtacccacacacacatggttataccaggcgagcataacttcggccccacatcaggcgatctgaaaaatgaccaaactctaacaagaggtttagaatctctgtattctaagcaacaaatcacagcattagctaaatcatcctaaagatggaagttaatccatccttgtgaatcgggtctatgtgaagcacatggcatctcaggataggcacagtcacatgaaatgggataacttacgtagcctcttcaaatcagaagcaacaccatggctatggctcaagtgctccaatcctccaactgaccaccccgccctgccgctgagcacactgcccgtcggctgaccacgccgcatgcccttgccgccgccgggctgcagggcccacgacgccctgccgcgcgctcgacggcccgcgtcacgctcaggcctgcccctggcgcccagcccgcgctggcagctgcgtgccctcctatccacccgggccgccgcgccgcgccgcgcctgccacccccacccacatcgcatctggcgcagccgacgccgagatggcctaggcgcgcctgctgctgtgcggtggtcgtcgtactggcacgccgccatgccgag

SEQ ID NO: 30027 - DNA, 1388 bp, Zea Mays
cgcaacgcgcgcctattgatctagtatatatacaatgcaaaatcaacaaccaccaacccagagccagaaaagaaccaagaaagaaccgagtggctggatcagcctgagacgagctttgagcaaccaagacccttccatttattttccataaataggatgctgcaagcgaaggccaccaggattcaccaccatggccaaccacctgtgcggcgccggggagagcatgagcatggcgccttcctgcctgcatcgatcgacgagggctgcacgaacgatggggtccgcctccgcctcagtgatgacgaccagcctgctggcgctggcgctggcagcgctggctttcgtctccagggccgcggcgcagggcaacggctgttccagcgtgatgatgaccctggccccgtgcatggacttcatctccagcaaggcgtcggagccggggatctcctgctgctcggtgctggctggagtcgtgcagaccgacccccgctgcctctgcatggtcctggacggcaccgccacgtccttcggcatcgccatcaaccagaccagggcactggagctccccggcgtctgcaaggtcaaggcgccgccgctcagccagtgcacaggcgtccctgcggcacctgcaccgacgcctcccgacgaaccagcagcggcagcggaggaagaagccgacacagctgcagatgccccttcagcaaatggagcctcaagctccacaaactcaaagaatgcagcgagcttactgcttctcatctgcgcattgctgtatgccttctaataagtggtgatacaacttcgctggccatgtcaccgtgcaggaattaggacaaaatctactgtatcattttgatagactacgaagaccaacgacgagatgtaaagccatatcattctctttcactaaaggatagatgaagcctcaagaccaatgaagcctccgtgatgaagactatccccctcggagatcaagcgaagccactaggtatctgtctccctgatgaagactcttcgctcttcccctcagagatcaagcgaagccactaggtgaactttgctgagaagcaaagtcaaaaaagaaataaggagaaattggctcattcacaagacatggagctctgtctacgatgactgtgtaaacactagacagaaccatatagcatgaaatggaaagcaaataactgaaccaccttttattggaagggggagaataccccaaccctaacaaggattggggaatgtatattcggaatagttgggcctaggcccattacagaacacagttctaacactccccgcagtcacaactctatcctatacagatgttgagactggaacgaaagtctaggaatacactcgtcggtaaccccttggtgaagatgtcg

SEQ ID NO: 30028 - DNA, 1586 bp, Zea Mays
aaccaaacagcgagcgcaaggaagaaaggtcgaagcgtcgtctctctcggcacggagcctagtgcccggcctcgtgagatccgaaattcagaagcgaggatggcgacgaccgcgactaggcggtggtggaggcggcacgacggcggcgacgatgacccagacgacctcgtccccatggacacccaagagcaagaagagctggtccggtctctggaggctaagcaggcgcagcaaggccgccgttggaggcgcgtcttcgcggggttcctcctaggttacgtggccttccttgtctactccagtttccatcatgcttggtctccctgggagctgcggtaccatgcttacttcatggaagatttgcctgcaccaatggtcataattgcagattggatagctgctctagcatgcctatttgctgtgaaaggattactacagaattcaggcccatcaaagaagtggatgtggtattcttgctatgttggcattttggtagccatcttttggacatactacatcttgaggttgccaagaattcgatgggatgttgcatggctcccactcggtcctttgatggctggtgcattgagcctgtatgtggaccatgtgctgctggagtcaatgcaagatatcagcacattgagaagttacatgcagaatttgatctgggcacaaggtacaatatgtcctaccttagagattttactacaaagtttatgtttattcctgttctttcgttgaaacatgttgaagaggacctcagatcgttagagacttcgctaacgagagcttgccggattgtttaattctctttaggggtacccatacgcacgcgcttgcgccaatcgtgccttattcaatggagaatagtgttgcagatgcaatgtacaacaaaattattgtttttgttttcgaccaagttgtggataccacaccctggaagagttggtggtagattcttcatcaagtatggaatgtctgcgatgcctagctaggtgcttgatggcaacaggtgcatatcaaaactattaattattttcatgtgttcctgcttcaagaacacatgcaatagtaataggtttccattagtttaaatgtcacatgcaaagaagcaaacaccacccagactttcttcttagtttgccattatcacatctgtactcatcatgcacatgaaacttttggttatgtacaactcaaaggtagaaggaagaccttaaggtatgttgtcatagtaattgtgaaatggatttggcactggtatttgatattttctgacttctagcatcactctgaaggcacatgataaagctcgagctttatcgatggtcggacgatgataacgcgctggaagaagtaatgagtagagagtatgttctttatttcttatttatgtacaaattaagatctcacggacgaatttaacaccgtgcgcagggcgcgcggcaatacactagtacagattaaattttgttgattgtgtgcctcttgaacatgcagttaactgtttcctgagcaatgaatgtaagaaaggttaccagacgttccaatgcagtcaaaagctttttaatatactagcagcattt

SEQ ID NO: 30029 - DNA, 2056 bp, Zea Mays
cagtgagcatggtgcgtgtcccgcgggcgacgagcttcaactctacggcggtagggaaggcactcccctcgtcatagacaagggcacactatttagcgccaccacattcggctaccggccgccacgagggcgcctccgtgcagaaaattggcgttttgcggcaaagcacttcatcaagaaacaccctgaagacgtggttgttcactgcagtgggtgcaactcagcagctcgaacctttgatggagttgatgtgatggggagaagattggcagacgaggtggcttctattgttgacagtagaccggagctttgcaagatttcctttgttgcgcattcattgggtggactaattgcaagatatgctattgcattattatatgagagcgagacacaaaaagattctcatgaaaagtttgagaaccatgctgttgactattctagtaaccagcacagcaaagggaaaattgttggtttggagcctattaacttcatcacttttgcaacaccacacctcggtacaatatcacacaaacaggttaggttaaaaaatttcaagcacttataatttggaagttggtgttgaattattttcttttgtaacctgcgtattgtggtatagttgtgatataatccatgttgaatttgtaggattttgtatagtattgttgatcatatttatacaggggagtgggtactaattataaactgagttctataaagaaggtaatcagttagatgcttcattttcctcaataaatttgttcctattggtgctacaacataaggtgtccttgttttcttttatttgactcacatgacatgattgttctggtgtactaaatgcatgtacttgtttcctcatatcaatactagtaccccgtgttacttcttcataaatgtcacgtatttacaatcccaaatgctatagttcaaccatggccttttatatcactgagctagtaaagataatggcgtttattctctgtgacttcagaaaaaaatctaagataacccgtatggtaacggatcaaagagtataagtttataatgctacaggtctcatggctgcatagccatgaagaatccacatatttgactgattcggtttctgttatgcactggcagataccacttcttcgtggttccaacaaattagaaaagatggcgtatcgtttgtcttggattgctgggagaagtggaaaacatctcttcctgaaagatatggaagatgagaaaccaccacttcttctacagatggttactgattatggtggtctccatttcatgtcagctctccgctctttcaagcggcgtgttgcttactccaatgtttgtaatgactttatcgttggctggaggacatcatcaattcgtcgtcaacacgagcttcctgaggtagtatattcactataactcattttggtatttaagctgggctcctgaatctgaaaattcatgtgcatcagccccgaagttttataaacaacaatagatatccacacattgtatatgtggaagggccaaaagttgaggatgttgattttttggatgcgatgatttacgaggcaaaaacgactagtgaaatggaagaggtgatgctcaaaggtctgaatagagtttcatgggaaagggtagatgttagcttcaaaaaaagtagacaaaggattttcgctcatagcactattcaggtcaagacctatttcttgaactccgatggagctgacgtgatcaaccacatgatcgaccattttgtttattaagatgggtgtactaagttggtaccaagttctctttgtcgatcgattctcggccaaagaggaacatgtgggaaatgttcttgttttgaagacaggattagagttatactgaaggagtagaacccactgtaaagtgtaaaggggtatcttatctctacccttcttgataattttgggccgtttaggttcttttcttcccttttcagaattcagaatctcagttgttttgtacccatatactggaccagaatttgttctccaaatacaaagatatttgctgcgtatttgcttctccgaac

SEQ ID NO: 30030 - DNA, 2591 bp, Zea Mays
agagaaagcgaagagcaacaagagcaaagcgaaaggcgggcgcagctgtccgctgccttgccttgccttgccttgcctgtgctgtgcgaacctgctcccagttagtagtattcagtttccttatcggctgctgcccatttccgccccctcccgtcttttcccttccgcgtcggtctcctcccccactcttctacttcttgctgtcgtcgtcttctctcgactccccgtcccctccctctgcctctcccacccgccgcttccggattccgccgcccgtgccctcgccaccaggaattccactcggaccgctgcgtggattcctcggctcgccgtccggatctggcctcgctgagctgcagctgccgcgaatcccgactcgattcggccgcgctcggatctcgccggactagcggggaccgaggcctctcgattcgcctcggggccgagatggatcatgtggtcggaggcaagttcaagctcggcaagaagatcgggagcgggtcgttcggggagctcttcctagctgtgaacgtgcagaccggagaggaggtcgccgtcaagctggaaaatgtcaagacgaagcacccgcagcttcactacgagtccaagctatacatgcttctccaaggaggaactggcattccgcacctgaagtggttcggcgttgagggggagtataacgtgatggtgatcgatcttctcggccctagccttgaggacttgttcaactattgcagtagaaagttttctctcaagaccgtgctcatgcttgctgaccaaatgattaatcgggtcgagtacatgcatcaaaaggggtttctgcaccgtgatataaagcctgataattttcttatggggcttggtaggaaagccaatcaggtctgatcctatatacatgcttcactcttgctggccaactcattacatttgagccgaatgttttttacgtgcattttgctgcacttgagaagcccaaaagatcctgcactagtgacttggctggcttggggttagtgtgtgttatgtgatgtatttgattacgacgacgatttccttagcgtgcttgtattttacagtctgctatatatagtttatttctttaccttcggtgaatgctggatggtttccttgtctatatagctgccaatatgttatattctggaaaacaccttttctctctctctctctgggattgaggtctctcggtgtaatgattgttgaacttattggcttttgtggcaggtatatataatagactatggactcgcaaagaaatatagggatcttcaaactcataagcacatcccatacagagagaacaagaacctcactggaactgcacgatatgcgagtgtcaatacccaccttggcgttgaacaaagcaggagagatgatttagaatctcttggttacgttcttatgtacttccttaggggcagcctaccatggcaggggctgaaagcagggaccaagaagcagaaatatgacaaaatcagcgagaaaaagatgctcactcccgtggaggtactctgcaaatcgtatccatcagaatttatctcctatttccactactgccgttcattgcggtttgaagacaagcctgattactcttacctgaagagactattccgcgatctctttattcgggaaggataccagtttgactatgtgttcgactggaccattctgaagtatcctcagataggctccaacccgcggatgagggcaggtgaaaggactagtggagctgctggaccctcgatggacaagattgagaaggccacaggagaagcaggcggtagaaggaatcttagtggtcctgtgaaccagactgacagttatgcacaacgaccgcgtgagaccgtatctatgtcattaaaggaaattatgcatagcactgaccggtctggggaaaggaccatggagagaccacgtacatcctcgcgcacaggcagtgcatcccgtagagctgttgcatcaagcagcaggcaggcctcatctgtggaaccaagtgagcagcagtatagccgggcaagcagattgttctctagcaacagtggcagtcgcccatctagcacccagagggtgaacccatcgccaggcgaggcaagggctacctccctctcacgggcggcagtcgcgagaggcgctcgcgacgagccactccatcgcagcctggagcttctgtccctcggtggcggcgggaaaaggaagtagtggcaaggaaagcgagcatctgagagcgggcggaagggaagaacgcttgtttgcgactctgtaaatgacaggattcgtcaacagtttccctggggcttcccatagtttccttggtgctccggtctgttgtaccattgcttcatagatagcaacgattccttgttaaacgtgtgctgtgttgcaggttgcgttagggccaagtcctagcctttgtgatggtgattacatttaggggtggtcaagattcacttatttatgtttcttcaccctttcctggactcggcgacttttttcatgtcgaactctgaattttcttattcaacagaagttgataaaaaaggacttcctgtgtaaaccaaataaaaaaacttctc

SEQ ID NO: 30031 - DNA, 2876 bp, Zea Mays
caatcttggcagggttatgcgaataggttgaggtggagattgactcacacaagcaagaccaggagcacgtcccaactttgtctattgaagcaacactcattgataactctggactatctaacagtatagatgctgatctttcatccgctaatgcagtcaatttgaaaccgaagccaaaacgaactcgaagcccttgtcttggttttcatggttatgtacttggtggaaaaatagaaaatccaaaactttggtctagtgagcatcctaacttatacacgcttgttgttctccttaaagatgccaatgggaagcttattgactgtgaatcatgccaagtgggcattcgtaatgtggtcatggcacacaagcaaatgctcgtcaatggatgtcctgttgtgctaagaggtgtcaacagacatgagcaccatccacgccttggaaagacaaatttagaagcatgcatgatcaaggacctgattttgatgaggcaaaacaatatcaatgctgttagaaatagccattacccacagcacccaaggtggtatgagttatgtgacatttttggtctttatgtcatagatgaagccaacattgagacacatggttttgatgaatctaacactttcaaacatcctacacttgaacctatttgggcaaatgcaatgcttgatcgtgttgttagcatggtggagagagataagaatcatgcatgcattattgtttggtctctaggaaatgaatcttcatatggacctaatcatgcttccatgtctggtaaaatattcttacctgtcagtttaatttctgtacttctcatctaatggtaacattcttctaggttggattcgtgaaagggatccaacaagactcctccattatgagggaggtggttccagaacatcatccacagatattgtgtgccccatgtatatgcgtgtctgggatgttgttaagatagcaaaagatccatctgaaacaaggcctctaattctttgcgaatattcacatgctatgggaaacagtaatgggaatattgatgcgtattggatggccatagacaacacttttggactccaaggaggttttatatgggactgggctgatcagggtttactgaaggaggactcagatgggtctaaattttgggcatatggcggcgactttggagatactccaaatgactccaatttttgcctcaatggcattgtgtggcctgatcggacgattcacccagctcttcatgaagtaaaataccttcaccagcctatcaaaatatcatcagcagataatatgcttaagaagctttggacttcagttgggttcttcatggagatggttgtgtcttgggctctggtccattgaatattccaactttggcaccacaaactagtcagctcatcaacatggaatcatcaccttggtttgccctttggagtgcctgtgcagcaaaagaagtatttttgtctgtgaatgtgaaacaaaggcatgaaacacgatgggctaaagctggtcatctcttggcttcagcacaactgtgtttgcctcagaaaaatggctttgtccccagcgtgatagcattgtccagtagccctttggtctgtgaacgcattggtgataatgtaaccatctgcaagaataatgcctggaaaattaaagtaaacagtcagttgggaacaatcgacagctggaaggtcaacgacgttgagcttatgagcaaggggatactcccatgcttttggcgcgcaccaactgacaacgacaaaggaggtttcttcaccaagccatatgactcgcgatggagagaagccttcctcgacaatgtctcgttccacagcagccagttctctgtcaaggagttgccggacaacaccgtggagttctccaccctctactacggtgttcccgggcacctacccaagcctgacgacgaagcctccgagtccattctcttccgggtgaagatggtatgccggatccacgggtcaggcgacgtggttctcgactacgaggtaaaccccaggagcgacctccctccccttccccgggtgggcgtcgtgttcagcgccgggaggtccctgagccacgtcacgtggtacgggcgcgggcccttcgagtgctacccggaccgcaaggcggcggcgcacgtcggcgtgtacgagagcagcgtggaggagctgcacgtgccgtacattgcccccgtggagtgcggcgggcgggcggacgtcaggtgggtggcactccgcgacgccggcgggctcggcctgtacgcgtcggcgcacggcggctccccgccgatgcagatgagcgcgagctactacggcgccgcggagctggacagggcaacgcacgtccacaggctggtgaagggggacgacatcgaggtgcatcttgaccacaggcacatggggctgggcggcgacgacagctggtcgccgtgcgtgcacgagcagtacctgctgccgccgacgcggtacgccttctccctgcggctctgccccctgctgccgtcgtcgtcgtgccatgacatctacaggtctcagctccccagctgatggtgccgtgtgccggagacccgtcgacgtcgagccttgggaaacaacaatgaacgcaatggcctggccagtgaatgaaagtatataatattgtaataaagcagagacgtattagctcctgcaacggcctcgcgatcgcctggatatgtctatgctgagggggtgtttagttaactaataacctaactacatatggcgccaagttactaaaacttaataaataactattactaactaataaatagtaactgaattcctaacttaataaatacttcctccgtttataaatatatgacaccgttgattttttaaaaacaacttaga

SEQ ID NO: 30032 - DNA, 1931 bp, Zea Mays
ctgactggcgttcgtgttccgtgttcgactcgacgcgctcgtgcgtggcatacagacgaacacctcacaaggacaaccagtcccctcactcaggaagcttcccggggaaagaatgtgcgggtgtgcggccctcgtcgccggagcccggccgccacggcccgtcctcccccgcaggctccgtcgccgtcgagggagctccgtccgagcagaggtctcaccaggcggtgagtcccagccgaagaaggtcaccgtcgcaggcgccggctgggccggctttgccgccgcgcaccacctcattaaacaggggtacgatgtcacgcttcttgctgcggagagtggcccaacggaggaggttggcctcagaggattctggcaaccgtatcgcaacatcttcgctttagtcgacgagctggggatctcgcctttcacgggctggaataaagcagcatactattctacggagggccttgctgtcgaatttcccatatttcataaccagccccgattaccagctccctttggagtctttgcatatccagaattccctaatcttcctttgagtgataggctgacatcaattcctgtcatagctgcagtcattgacttcgacaacactgacactgcttggaggaaatatgatgcaagtaaggaagttccattgtctatccagttagttcagattagtgtacgtgtcacatgtactacatgtcttcataatgggttatctttatcaaattattgttggtatcttcatctgtagtgactgcaaaagagctttttaagatgtatggttgctctcaaaggctctacagggaaatttttgagctagttattcaggctgccctgtttgctcctggtgagcaatgtagtgcagctgcaacactggggatgctgtactattatgtgttgtctcatcaggaaaattctgacttcttgctgtgccgtggtgaagtagaagaaaaaattttctctccttggctgcaatcattggagcttaaaggcttaaaatttgtagaaaataaagttccaacaagtttgactacagatgtggatagcggatgcatctcttctattgtttgtggtgatgatgtgtacgaggcagatgcatttgttttagccatgggactctcttctctacaatccatcgtcaaaaacagtccattcctacggtctgatcgagaattcaggaatcttcttcacctatctacagtcgatgtgatctctgtaaaattatggtttgataaaaagatcataattccaaaggttgccaatgtgtgttctggttttgatgattcatctggctgggcattctttgaccttacctcagtatatgatgattattgtgaagaatcaataaccattgtggaggctgaatttcttcatcacatcttatcaaatgcatacaagattttgagggcgcaattgtgataagatattcaatcagaagatctcctaattctgtaatcaactttcttccagttgaaggagatgagccccatatagagacattgcgaagtctcaatagaagagccaatgaactgaagtcacaaattccattctcagaattctttctccaataattttgttgggatttttctgtgtttgttgagcattgccattgttgtaggcattgttattaagtcggtaaggtaaagcgtggcgacctagccctttgagtcgactagacgcttaaggcgcgcagcgaggtgtcgccatacagatgtcctaacctacaggagagcaatagaaacataccttgttgatgccaattttggagctccagtttcgcttgttccatgtagcgtgtatcccccttacagattgcaacatgaacatgttgtgaattataattaatgtaagaaacaatttataatgcaatgattgaatgaatcatctgtgtaaaatatagattggcttgaaggggatttaac

SEQ ID NO: 30033 - DNA, 1322 bp, Zea Mays
attaatctgcttctggttcttcggttttgtctaccggccgctctgcttcatgaggagtgtgccgtgagacaactctgcgagtcaagaacaactgcgaagaaagccgagaggggagaccaaatggcaactgattcctcagctctgcaggcttcctctgagtcgattgcgcaaaagatggggttcttcagagtccctgaccttcttgtaaaactgagcgccaaatgtttgagcgatctggatgtggttcgcagcccaacatcgcccttggacctcaagtttttcactggccttggcaacaaatcacccggtgacgccagccagaaccagaagatcttgcttggtgacagggttgggcttggacttgtggattccctcactgatgacaaccccgcaccactaggtggtagaaaggttctttttcttggatctgagatgaggattattgataacctgtctcgcaagaacagctccaccgctcctgatcaagctggggaagttgaacagaaggatgataatatgtctgacggactgatgggcagtgccatgtcccttggtgacatcatcaactcagaggattacactcgtgttgtctcccgtggccctaatcctaggactacccacttttttggagatcgtgtttttgagcttcaagctgagcagctgatgcctgttgagagtaaggtcgatcagagtacgtctcctgtggaagacggtctgatgagcttctgttatttttgcagtgagaagctcaaagaagcggaagacatctacatctatcagggtgacaaatccttttgcagcgtggagtgcagggaaaatttcatggtagattatgagatggaagaagcatatcatcctgcgtctcctaggagcccaccctctgacggtggtcggattttccaactgatccgttgagtcagcatcagtaacaactcgatatggtcatatctgaagtgctgtctgaggttaataagttgcagccatggatgtgatcatgtttgcagtagttgttgcccggagattttgtttgtcgcggcactgatgaatttacctcacctattgatttcttttgttttgcgtacttggatcctcgaatttttggaggagtccaaaaaatgactacctccggtcataatattatcttgatcggagatgagtgtgtgtgtgtgtcctcgcgtctcaacttgagttgtttgcttcgaccgcattttcagtggctcactcatatgtggacgcctcttattaatatcatgtatctgaacctatgttttgatattttctgaaatgaaatggtaaagaataaagttttatgttacttgttg

SEQ ID NO: 30034 - DNA, 4989 bp, Zea Mays
aaaaaaagttgtacttgcaagctagagactattcacttatagcagccggctgtagctgaattagccacagccacagggagctctgcagcacaggcagccgaacaccggcaagtcaactcttctgcgcgtcccattcacgacttgctgatatctttttgctttgcctgcatccggatctccttctccaactggtctctcattcagcccagcttcgcctttgacccgaggaacaagacagatcctcaggagaagatcgcagttctcacaattctaatcaggaatattcttgattccatggctggcacaacaactgttgtaggatgggttgtttcacctattcttaggaaaatgctttctctggtgcagtcctatgtatcaagtcagtacaactggaagtctaatatggtgtccgacctcaagaatttggaggctacattaatggaggtactcctggtagttgatgaagctgaaaggcgacatttaaaggacaggaatcaggtagcattgttgtgccaaatgagagaagcagtttgtgacacagaagatgtgttagataagtttgactataaacttataagagaaaaagttgagcaccaaagcatggctaggagcatagttgcctcttcgctttctcttggtaagcgtttagttggccttgacaagttgagatcagaactacatatggttatcaaaagcatggccagagttaaatcttgtgcagagatgtttgcaagtgttatggcagttgagagcactaactccattaagccttctgattgtgttggaactagagtcactgggtcttttccacgtgaaggaaccatttttggacgaaaggaggaggttgatgaactagtcagttggttgctgcacagaaggaatataaatccatcaaatgatgaaggatcattcactatacaactgcattctatacattcaaaaaaaaatatagagttgcattctattgttggtattggaggcatcggcaagactacagtagctcaaagcatctataacgatcagagaatagtaaacgcttttgataagaggatgtgggtttctgtttcacataactttgacaagattaatctaattaaggagataattgcgcatgcatctgatgataagaacatcaaattgatacatttcaatttcaatatgctccaagaagaacttcaaagaataatttctaacaagaaatttctattagtgttggatgatgtgtggtatgacgagagttatggggaacacattaacagagagaagtggtgggaactgatagctcccatggaaaatgcagtggcaggaagcaagatactagtaacaacaaggatggaattagtagcaaaagtgctggacagcagcagatcattcttacatggccttggacaggatgatagctgggcactcttcagacattgccacaattctattttaagttcttcaacactagagagcattggaatgcaaattgttcggaaacttaatggttcacctctagctctgaatgtcataggaaggcatttatacggcagacacaaagtggcagagtggaatgaagttcttcatagcaatatcctcaattcagacgacatgttaacgatattgcggccaagctatgaaggtttaccagtacatctccagcgctgcttttcttattgcagtttattcccaaaaggttatcacattgatccggaaaagctgatatatatgtggatagctcaggattttattgacactaaaggaagcacaaacaagtctttgaaagattctggaagaagctacttcgatgaattgctgtctagatcattttttcaaatgcttaaacctggcagcgaaacattttacgttatgcatgatataatgagtgacctggcacttcatgtttctcagggtgaatgccttagggttgagtgtgagtctatggagccaatgcctctttatactcaacatttgtccatttatagtgaaaacctggaaaatcttgtgaattgtgatctgccaaaattgcgttcattgatagttttgaacaaatcctggttttgctccaaaatctgtctgaatcatgctatacttggcaagcttaagagtgtccgggtgttggatataaccggttgttgtttagaacaattacccgatgctgtcaatcggttgattcaccttcgttacctaggtatacgctgaactttgcacccgttaccaagaaagatgttaatgtatcatttacaggcattgtttgtgcagtatcactcatgttattcccaaaggggatataacagttcttcaatgcaaattgcaaagacttttagaggccatttccatcttccagaaagcatcaataaacttgtcaatctggtccatgttgacgtagagaaggcatatgttcttatgttatccagcactctcaagcttccatttgttgagtgtgctggagaattccatgtcaatgatgagggaagtctactaggtctgaaggaccttaacatgatccgaggacatctcacacttctgtccctagataaggtgcaaaacaaagaggaagcttctaaggctcatctacaccataaggagcacataatgaagttggagctacaatggggatcgcttaattttgctagttctaccaaacagggtgttgaggtgctcgatgtcctgaaaccacactctgatcttgaggagctaactataagtggatatcctggtgctaggtctccttcttggctggagtctggttggctgagcagactacaatttatttgcctacgtgattgcaacagatgggaggtacttccacctttaggggatctgccattactgaaaactgtcgaaatacggcgaatgcaagggcttagaacacttggtcagaaattctttggccgtgctggatttccatctttggagagattgctactagagcggttaccagaattggaatggtgttgtgtcgataacgaccaagtgtttcagaatctaagacatctatcagttgctggatgtccgaagttaagagaatatcctacatatccttggacacttgaacatatagctattctggacgaggaacgaattcaagttaagacttttattcctagtgctagagtatcaagaactttttgtatcttggtatcaagcttcttccatgtcttacgtgcacatcacctagaatttgtcgaagatatggagatctatgttaaccatgtggtatgcatgtccagagaagtgctagaaaatctgaaatctctccagaatttgaaaatatatggcatacatagggccaacacttgctctgtgattgcaaaattgtgggatgagaatgggtcagctgtgtttccttcatcacttaggagccttcagttagtgcagtgctacctgaaaccatcctatttctccaagcagttgaataacctctcatcacttgagactttgcgcctaataaattgtgacaccattgagatgccctgtccaccagtaaacatgtggcacttgaggatactaaaacagttggtcctttataaatgtgattggatcacctttttggaggggtcagaagcattggtttccctggaagaaatggccataagtgactgttatgacttgaaatatgtaccagatttaaacaatatgccatctcttgagaaattgcatttgagacgttgccctcaagttatgcgtttgtccagtgctgattaccagacaagattgaaggaactggtcatagaatcttgtgatgcactatcatcacttagagagttgcaaggccttgtctcccttactaagcttatcgttgcaaactgctctaagttggaattgctgcctggtatggattccttctgtgcacttgggattctgattattgaggattgccgtcttctgaggtcactaccagagagaggtcttcctgtatcgcttagaacttttgtattggatggatgccatcaagcattagacgagcaatttcagaagggggaaggtccagactggaacaaggttgctgcacttccaggatgcatgcgctatgaacatatggcagatgtcgaagatgagtctgtctggcattcattctataacctttattacttctagtatagcagctctcagctgtgcttattttcaattgttgtggcatacctatacgtcaagtttttttcaaacactggactgaattagatgtaaattacttcttttctgtaccttgtatttgtatattgaggcaaattccagtttagaaactaaccaagatttttctgtaaattcagaaacttttcaagcatttctgaagttttgaaatatagagacatctcatgaatttccaaacaaaacataaagttggcatagcaagtgtaaaaccacaaactctgacacaccaacatagttcattttatttatgcggtatattctagaagatttggagttggtttgttgttttctaaaaaataatctacatacctctgaattctttaaaattttgcaaataagtgaacttttcttgaatgaatgaatattcctctcacacctaccaattatatgtgccctcattttctgccccctctaccattttgttagggctagtttgggagccataaaaccggatgtgattggaggggctaaaatcgccttctgaaaactagcccttagtgatcaattacaatttggagttggagatatttggtgacacctacctcgctgaagatattcatgctcctcaatatttaagtttaatctgagtaaggcaagaaaatttgtgatcatgttgaggccacaaagatacattgactgtgttatttggttccccctattacacaagctattcttgattaaacaagcagttgaaatgtttgatgttcagttgtttcccatccatcaagtgttttgaaactctcttgttgttgaatgcctactccacttcggtttggacaagccattttgctgattacagtactgttagttgccttgtttaccttgaacatgcctagcaacacttaaggggtg

SEQ ID NO: 30035 - DNA, 2553 bp, Zea Mays
ccgtgaacgtgtcctctcccccgcgcttcccttcaacgccgcctccctaaagatccaccgcttctctgccctctgctcgtcgattcggcgcctcctctccttcacgcgcccacgctgtcgtcgcctcctcctcactgttgtccatgccgctgtagccgcctacggccatggccgctggagccagcgactatttgacggtggagtaccactccagagactcccctctttcccctccgacgacgagagagccaccggcggcagcggcgtcctcgtacaccacggtgggcacggtgggcgatcttctcatgaagtggtggtagtgcctcgtggacgtcgacggagacgcggcgtgcctgcccctcgtcctcctgctccttgtcttctccgccgccccgtctccggctgacggctgcgatcgctgcgtgcgccggtccaaggccacctattaccaggcctcctcgctcgccctcaacgccgggtcgtgcggggtacggctccttggccgcgtccttcaacggcggcctgctcgccgcagccagccccgagctgtacaggggcgccgtcggctgcggcgcctgcttccaggtgcggtgcagggacagcgagctgtgcatgtgacggaccaggcgcggacgtcaaaccgcacgaccctggtgctgagcgccgcggcgtacgcggccatggccagcgccggcaaggccgcacgcctcagggaccggcgcgttgtcgatgtcgagtacaagagggtaccttgcgggtacatgaaggaccgcaacctatcgatacgcgtggaggagaagagccggccgccaagcaacctatccatcaggttcctgtaccagggcggccagaccgacaccgtcgccgtcgacatcgccactgtggggtcgtccaactggcggttcatggcgcgggaccatgggccggcgtggagcacgacgcaggcgccgccggggccgctgcagttccggctggtggtgacaggttgctatgacggcaagtgggtgtgggcggagttggaggtgctgccgcgccggtgggaggccggccgcgtctacgacgccggggtgcaggtctccgacgtctcgcgggaagggtgctacctctgcgacacgcacaagtggcagtgacgcgcgcacgagctggattgtacagttttttgttttggtcgggaatgggacgaaagatatgaaatgatgatgagcggagccggagagccgaatcaaatctattaatcggtggcgctggaagggtgctgccgtcgattcctctaccggtggcactggaacacaagtaaccggcagttgccgaccattaccaagatctctaaagggcttagattaattagataatccagcataagcacaaaacgttaatctcaaatctattagcagatataatattgtttgtgtgacattgtactgttttgtttcttaaacaaacgtcattctacaaattttgcatctgtccctgtagggcgcccgtaagggcgccgcctgttctagtatgactaatggtcgatcccgtagtaaaaagctgtctccaatcccaggctacctgaacctacgaagagccgactcaaccgctagtacagtccacacatgacacaacgacaccaactgtcctcaatccagcagccctcgagtctcgtccccgcacatcagcagagagacgccactaccaccaccgcaagcgacgacggggagatgtttctgcgacggatcctgaccggcggaggtggcctggcggcgctgagggcggcgcgcgccgtgaaggagacgacggggatcgtcggccttgaggtggcgcccaacgcgcgggaggttctcatcgggctctacacgcgtacgctcaaggagatcgaggccgtccccaaagacgagggctaccgcaaggccgttgagtccttcaccaatcaccgcctccagatctgccaggaggaggacgactggaagcgcatcgaggaccgaatcggatgcgggcaagtcgaggagctcatcgaggaggccgaggacgagctcaagctcatcgccaaaatgattgaatgggatccgtggggtgtccctgatgactacgaatgtgaggtgattgaagacgacaccccaattcctaagcatgttcctcagcaccggcccgttgctcttcctgaggagttcttcaagacactagatgccgtcaaatcagatcccgccctccaaggcgatgctcctcctcaagtgaaggcgtaaagatgagtcttcccggttatgtcttatgtcatttcacactttgctgcgctgggtagggactagtttcttgtgccatttgccagcaatgtgcttgttccgagcagaataaatttctggcgagtaccatcgaagagtgactttgaacgaagtgattcgacacagtaaatttgttgttgtccatgaatacttgctctgaacatcgcttgccgatgaaatattgaatgctaggtagagttcattgcctggtgctgccggcaccggagacgcaacggccatgggagccgtggctagcgtaacctggctcgccataaaatatcgttatgct

SEQ ID NO: 30036 - DNA, 1312 bp, Zea Mays
agatagatggctccataaaaggagggccacgttgttgcatggcatgccccccctgaatacgcttgttctcctcctcctctgtaattctccctgttgcaacgactctaattttcatttcaaggaagacaactgtgtaattaagagaaggaacgggacaagatgttctttcagaggaagaaatcaaagaaagccaaagactccagaggatcgcagaagaaggggaaagatgggcgtgggaagaatgatcttttcgatcgtgccaagggagggcttgatgccctcgcaggaagcctgcaggaagccaagaaggacgccgaaacggcgactgagaagcttcaaggggatgtgaagtcgggcatggaaacgatccggcacaagggctcaggcctccttgagaaagccaaagaagaactcgggagtcactccgacgccagccgttcctcaaaggaactagagcgaggaagcgaggaacaggggaacaacaaggacatggacgctttcagtgcagtgatggacaaggtgaagggccacccagaagcgatggagaaggtcagcgctgtgatggacaaggtgaagagccacccggaagtggtggacaaggtcaaggacgaggtgatgagcctcgctggcgctctccgtctgcggagacatggatccgaagataaagaagctgagtccgaagagaaggcagaaggagcgcagagcgccgacgagggtgcctctgatggcatggctggagaacctagtgtgttggagcaggccgtgcaagagattcaggctgtcgccgcagctttgcagcagacagctgaacccgaagctgaaattccagctgagaccgctgctgctgctgctgcagaaacttctgctggaggagacaagcctgaagaaacgaacggggaggtggagcaagatgacccgaagaagcggctcgacttcgctgggttcttcgccatgctgctcgagaggttctgctccccggccagcaagaagaaagattaagttggttgcaggtccggcttgtggatttctcgttctgtcttctgtgatcttcgacttggacattacatggagtgcgtgggattgtgggtggtgtacagtctgcagttgtgttatcttaaaacaacaaatcagctattggttttttactaccttactttgatgacggggcaatggctacgttttacttgatgtaattatcatcgccattgtggatttaatttattttatctctactatatttaaagcacaagtttcaacggtcgtgcttcgtcaccttttttttaaaaaagtccccacatttcttctaaatcaa

SEQ ID NO: 30037 - DNA, 3451 bp, Zea Mays
gggcgaccgaccgtcggaaggtggctgcgatcgacctgccaaccgcccccacgccgcgcacgcactgctgccccagcacacgcctctagaaattccaaaacgagcacggcccggcacgaggccgcccgccagtgccagtgccagtgccggtccctccctctcttggctggtgctggcctggatcctccacgcgacgccgccgcggctcccttctcgtctcgtcgtccagtggtgggtggtggcggtggtggtggagtgcagatccgcgcatccgtacgtggattgccttccgtctttgcccattgctgttggccagtcggcgtggatttgagagctgcgtgtgtgtgtgtgcatccgtggtttggttacttctccggcactcaagatcgaagtcgcaggacttgtttgggttcaactgaactcccgtgtcctgcgccaggaccgccactgatgagacactcagatttaggatggctttcatccgccgccattgctgagcttctccagtaaagactggaatttttcgccgcgccaacctttaactgtatttcatgatacaaaaaaatgtcatcagactccagtctaaccgaatccctacatgagagaacaattgtctttggccttaaactttgggttgtgattgggatcgctgttggagcgtccctcttgggtattcttctcattcttctcatatgccttaccattcaaagttgtatcaagaggtcacgcaagccactcaatgaccgtcgactgcaccagatccctccagcgtacaaagatatcaaggaagtggggatggtagaccaatttcctgccaaagattttgttgtacatgatgggcttctactcactattcagaatgggcctgagcctgttgaaccagttgatagagatgcgattcagttggctcaggaggaaaagttgaaacaaagagaagagaccaatgtctctgcttcttttcccattatggatggctgcgagggaactcagattgtttctgtcgatgaacagtcttccacgcacgctactgttgactctgcaccattggcaggtttacctgaattttcttatcttggttggggccattggttcactctcagagatctagaccttgcaactgaccattttgcaaaggataatgtaattggtgagggtgggtatggtgttgtatatcgtggcagattatcaaatggcaccccagttgctgtcaagaaaatccttaacaatttaggacaggctgagagagaattcagagtggaagtcgaggcaattggccatgttcgtcacaagaatttggtccgccttttgggttactgtgttgagggtactcaaaggatgcttgtgtatgagtatgtgaataatggaaatcttgaaagttggctccatggggaattgtcccagtacagttctctcacttggttggctcgcatgaaaatccttctgggaactgcaaaggcactttggtttggccaagatgcttggtgctggtaaaagccatattgctacacgagttatgggtacctttggctatgttgcacctgaatatgctaacagtggacttctaaatgaaaagagtgatgtctatagctttggggttgttctgttggaagctattacaggtagagatccaattgattatgatcgccctacaaatgaggtaaacctggttgactggcttaaaatgatggttgccaacagacgttctgaacaagtggtggacccaaaccttgagagaaggccttcgacaaaggagctgaaacgtgcccttttgactgctctgaggtgtatcgatttgaatgctgagaagaggcctagcatggaccaggtggtccggatgttggattctaatgaactcataccgcaagaggaaaggagacaccgacaaatccgaatccctgagagttcagaaaccgagccactgcggggcaagaataacagtggcaggagtgatgctcctgagcatgaagcgaggccaccacgacctaagagccgaactttttcgtccaaatgaaagaaaaagggcatattaggaggtatatggtagacgctgagacgcgcaatgtgggaagcaggaaatctcagcttcgatacatgacgacacagattgatggattttttttcgttcttggatgtgatgcttgacaatacatttttgtgttccttgacacatgtacagtggcgtgtggtagttgaagggtgtatagttgtattacttagttcctagttcgtaaaaaaaaacttcaaaagaagaatgcattcctaccaaaaaagggaaagggaaaaaagatgggcgtctgtggtggtcggttgcagcaactgttgtctggttgctatgaactccaaagtgcatgaagagatcaatgtaaccttggatgatgtttgtgtttgtttcgtttactcgtagaatataaaggggagatagaagaattggcttcactttctgggctcagtgttgatgatgatgactgtcacgttgatgaatatgggagggcatgttgatgagccaacattgctccaccccatgccaagagcccagtttcagtggcatcttaaacctctctgattcctacaggcttctgggcctgctgctcattaggcaaggttagttccttgctatcctggaaagagctttggaactcaagccacctgcaaacaagttttcctcagttctcctttaccgggaaacacaaactgctgcttagtaagaaactatcttggacagccctcctataaggtcgtgttcggttgcatacggatcggagaggattgaaggcagattaaatccctttctattcatttttgactagctagtgatttaatctcctccaatctacatctaaccgaacaagtcctgaaaagaaacttccatttgcatccctcctcttaaaactctgaaacatctagctgaggttcaagccctatttcatgacagggaacaggatccctcctcagaagacaagtgggaaaatatggggttatggcactttcagttccaagaaactacacacacatgcagttgcacacagctaacatgctctttgctggcatcatgtctcttcaagtggctttggaattcttgtgttttttgggaacataggctcttgtagcttctaaccagagatagattatacaccaggagcttgcttagaggaaagaataaacgcctggatgactataattgtgttctctggagctccaggtgtggagagaccagctgttcttgaatgttcagtcagctgtcctgggcctccgtccacattgtctggaaattaaaatcttcaatcccttgatatgattatggaagccagaaatagctttggaagccgtatcttcagagaactggttataactacctgcttggccatttgggagctccgaaatagcactgttttttttacaatggtctactcttcatgtttggaaacattatttcagagaggatttgtcatgg

SEQ ID NO: 30038 - DNA, 839 bp, Zea Mays
aaccttttcactgatccagcgaaggcatactgccgccgccgtttctgcatctcccatcttcgcaacgccggcgctccatcttgcgctccctccctcactcgctctcggtacgcaggcggcggcggcggcggcggtggcggctctcagattcgggctctcagcgacggcgtcagcagcttccactcccgcctctcgccagttgcctcgcgccctcgcctccggtcctccgcacaccgccggttacccttccttcccatctacttggtagtggctcttggatgctatggcctttttatggttggatttggacttatgttcttcccaacttgtcctcgagaagctgtactactgcaacaggatattgtggaggcaaaggaattcttaggaaagaggggtgttgatgtgggctctgagtgagatcaattttaagtggttgacatacatgtctgttttgaaggatcaccattctgttccttggaataggttgcttttttgggtactgtagataggaaacatataattccactatgttcagctattactaacacggtttttgtgagttggcatgttatagttctgcttttgtcaatgatggggctcacattgacttgccggtgtttttcaagttttaaagactgaactgttctaggaatatttggtttctatcttgatttcccgtcagtggaccatttaccaattctgctgttcagtatgtcaccttatgcgttatgacatcacttgtactcgcaagtcccttcgaggattcagtgtttgaatttctctgcagtacttgcaaagtttctttcattcaatatggcatgttacaaactacagttaac

SEQ ID NO: 30039 - DNA, 1037 bp, Zea Mays
atacctgtgccctaatagaatttttacccgtctggtttcggggtaccgattgccagccagagcgagagggagagcgagcgcgagcgcgcagtcgccgtccacaccgttgagttttttctcaggcttcgcatggcctgattcatcctacagtctccaacaagccaagcaaacgccgcatcgcgctttctccgcttccttctttcccctcacagggtcagaccccaacgccgggagaataggggattaggagccagacctggcggcgccgggcgtccaagaaacgctgcctaataaaatccctccggcgtctgtcgtcttgaccgcggcggcgcaggcttcttcttttcgctctccaccacacttggatgaatgttgtcattgccaagggtgtgctggcaagtatacactactcagagatgaagaaaacccacggtggacaatctttgagaggcggcttccttgctgtggttgtgggataggatggtcttcttttcttttaggtttcttgtgtcctttgatttggtactttgcaaccactctttactgctgcaagtactacaacaaagatcctcgagagcgccctgggctagctgcatcagctgttgcggcactcatcttcacagtcctggcactcatcgctctctctgtggcactgataatctatatataaaacgaggaatgaacttgcgcttgcttgaaatgcgtactcaggcactcatcttcacagtcctggcagccatacatcgctctctgtggcacagatcatctgaaacccaaagcgaggaaaacgcggtagctggacctggcattcagaaggaacttgtaatttcagtgatagtagcatatagttgcaatcatccttcatgtatcaccatatcaagttgttgatttaaatgctgcaaccgtccctgttgtcggttgacctgtcggctgctgttgtctatcaacgaggatgatcattgctctatcgcaaactgtgtgctccgtgatctgcgatgcttctgaactcatgctgtcttggcaacctttagggctca

SEQ ID NO: 30040 - DNA, 186 bp, Zea Mays
gcggaggcaggcaggcaggtggggcgcccccacgaattcggtctagaattaaatgacaaagagcttttgccttcggttatggatgattgcaggtttgtcattacttatagacaaggagaacagagaggaagaagatgatagggaggccggaggggtccgaggggacgagggaccgagagagagatc

SEQ ID NO: 30041 - DNA, 2488 bp, Zea Mays
acacttctcatctcccatcccatcggctctgcttgccagttccgcggtgagagcccaccacttctgcgtctcaaggggcagaggttgtacggatcgctctggccttcgccgccggttggctcatcaaccaccgcgcgggcacgggcgcacgacgcaggtgccattccggtctccggctctctcctccggaagcgctctctcccagaacagaacgcctacctagttacctactctctcggcaacgtttccaaaagttcgttgaggcatcaaagaattgcctgcctgcgccgtgcgacggcgcggccgggatgggcaagatgagctgcttctccggtctgctcagctgcaagaagaaggcattggaggttggtggcagaatgagattcggctttcgccgcccctgaactttggcggagctactcattaattagtgactttggacttgtgcgtcaatggcagggtaagaacaagggcgcttacgccaagaaggctagcggcaatgattgccccaaggtgaagccggtggaattcatggacatggtggtggcggacgctgttgtcgacgacgtcagcaggtgccgagacagcgttccagcgtctgcatgcagcagtaggcttgtcgctcacgcagccgccgagctggcacgccatgccactggcgagaacggcgacaaggccgcagctaagagggactcgtcctccgccgctggctcctcctcctccggttacagcagcgacggaacaggcgacgatgccaagagcgccgagccggacgacggcgaaccctgcagcctcggccgcatgtcgccgacggcggcatcgccaaagctgatgcgctcctgctccaacatcgagacgacgagatctgtcctgacagggtccgacctgccggcgaagtcacgctcctacgacgacctgaagacgctgccctcccacggaagctcgagcgcccgcagcggcggcgcggtgcgcgcgagcccgacgccggcgtcctccaggacctcgtgctccgctgaccgcgtcatgctgaagaagcggtcgtcgaggcaggtgctcccgtcgcggagccggaagctgtggtggcagctgttcctctggagccaccgcaacgtgcaccgtcgtcggggcgcgagcgcgcccacgcccacgacgctgctgtggccatcgccggggagagaaggcggcggcgccgcgcaccggcgcgacgggtacgcgtccgacacgctgggcacggccactgcggacgacgccaaggagaagggcgtcgccgtggaggaggagggcccccgcgtcccgacccagtgggtggcgttctccgccgaggcctcgccgctggaccgggtcagcgcgtgggtgaacagcctcgggaacggctcgttccacgccgtcgacgaggacggtggcgccacggggcacggcggcgacggcgcctcgcgcctgcgcccgcgaccgcgtcgctctgagattgtggagctgccaacgtcggcggccggcggcaggaggcatccgcagccgcaggcgaggcggcgcgcggcggcggcggcggccgaggctggccaggcgagcggcatcatcgtgcagacgctcaacaccttctcctccgtcgcgcacatcgccggcatggggctccaggccgtcccggcgatcgcggccttctcgaccctccgggccgtcaatctgtctggaaacgtgatcgttcgaatcaccgctggatcgttgcctaagggcctgcactcgctggacctgtcgaggaacaagatcgcaatcatcgaggggctgcgggacctgacgaggctgcgggtgctcaacctcagctacaaccggatctcacggatcgggcacggcctgtccagctgcacggcgatcagggagctgtacctggccgggaacaagatcggcgacgtggaggggctgcaccgcctgctcaagctggccgtcctggacgtgagcttcaacaagatcggcacggccaagtccctgggccagctcgtggccaactacggctcgctgcgggcgatcaacctgctgggcaacccggtgcaggccaacgccggcgacgacacgctgcgcagggccgtgtcgggcctgctcccgcggatcgagtacctcaacaagcaggccgtcaagccgcagcgcgcgcgggaggtggccaaggacagcgtcgcgcaggcggcgctcgggaacgccgccggcgccaactcgcgcaggcggccggcgcggcgcctcggccagagccccgccgggtcgtcggccgccaagggccgcaggggcagcaggggcaggtctgtcaccaggccccagagctccagcttgccattgccaaggagatgatgaggcgagcgaaacgtgacgtttcggcctgaagaagaaaaaccccatgcgcttacattgcatgaaaggaaagccctcacgatgcccagcccagcccagctaatacccacgattggtcatgtcatttgtagttgtagattgcagcctagtgcgcatg

SEQ ID NO: 30042 - DNA, 615 bp, Zea Mays
ttctgcctcccctctctatcttcccacgccgtcgccaggaaaccagggtgcgcgcgccgcgcagcatgcacccctggccgtccagctcgacagcagccaagccgccacgcccaggcacgcaccgaccggcgcccaggccgatgccctgcccctgcgcgcccgcacaaccgaccgcctgacccgcgacaccgacgcgccaggagcagctgatgccgctttgtttagtctattctagaaagtgtgagccatggaacaaagctggttgaaaaaagaactacatgcatttaccccgtttttgtttggtttcatcttattctttctttcagacgctttattgtaggtggttcggagttctgtgtatcacaagagacatctaggttgacctcactcttcttagtgttcatgcccactatgcaggacaacaccgcaacactgatggagttggacgatttcatcaggctggactgtatctggatgggatggactctactcgtaagtagagagagtgcttgtcttgtgtaatacccaaaagtgtaaacagtgaaaatagagatgagctcaatattttgtgacctatatttatcatctcatgtgaacacttcatttaaaagtaaa

SEQ ID NO: 30043 - DNA, 2585 bp, Zea Mays
cttgaaatcaaattgtacctggttcactttaccacctgtccaccgcagctagcaaagtgagaaatcatccaaactagacgaaccaaacatacaatagttagttaaaatacgttaaaccaaatttcaggaaaaaaattcataaaactttatgagtttatagtgattaaaaacatggacttattatctatgtgtttgcactaacacctactccctcagtactaaattaaaatttgttttatattattaatagattcatacaatacttagtataaaatgagtttttcattcataataagtatggagatgtgtatgaaagtggatcaaatatgatggagttaggtccggagtgctataactgacatctacacttgagtacagtacaggtgatggcgggttgttttcctacaaatccaaggacctttctgcgaaatgtttttcgtggatcgctctccgagcagcaatcccgtgtaggttttaataagaagaagaaataccccgcgacccacgtcaattcgagttatttgagattgtaacaatctcgtcgcgtggcttcgccactttattactccgcagccgcgcatcgccattttggtattctgaagctcacagccgcgccacattgggacagttattctcccgcgctctgttaccttccattaggtaaggtaaaagtcaaaattgtccctgctgtttacacgaggccggtgaaaacctaactccccctcactcctctcttcttccacggggctctccttctacggcgccgccactactttgtgctcgctcctcctccgagagcacgattcctccaatggctactccggctagagggaaaaaattcaattgaacttgtgtcaaatttctgtccattcaaatttctgttttcagtcaactgttttcagtccatttggacagaagctggtaactgtagaaattggacagcttcattttctgcctgtaaacagcttgatttcgacagcttcattttctacctgaaaacagcttgatttggacaaatgaacctgtgtccaaatgaagctgaagcttggctgtggctgaatcaagaaaacaacatttcagtcgttgtccaaaagaatctgaagctgggttgtgtccaaaggaacaacttgatttggacagcttgattttcagttttcagtccattctataaatcagaatttcagtccattcaaccagagataacagaatttcgctaaacagaaaatcagcttcatttggacagagaaaacagctaactagagataacagggggtggcggcgcggccatctggctgctggcagggggtggcgcggccatctggctggagctgctggcagggggtggcgcggacggctgctgggagatggcagcgctcgcagctggaagcaggcggcgtcgcaggcatatggtggtagccggctgcgcgaccacctggtagcgaggcccctagtggcacacggcggcgcgagttctgttttctggtggcaggaagaacacccgagcgcaagaacaccctggggtagattagtccgaagaattgaaaaacagacgttaacagagcgcgggggaataactgtcccaatctggcgcggctgtgagctccagaataccaaaatggcgatgcgcggctgtggagtaataatgtggcgaagccgcgcgacgagattgaataactccgtcccttccggccttccctctatctttcgctcgctctcggcgacagctgggcgaccgtcgtcgccgccgcccttctctaggtgcccaggtcttcgccggtccctttgccgcctcttcgccgccgatgagcaccagccagaaaagaagttgaaccatggggaagagaaagtcagctgctaagccacctcctaagaagcggatggacaagcttgacactgtcttttcctgcccattctgcaaccacgggagtagtgttgagtgccaaattgacatgaagaatctgattggcgaagcatcttgtagaatctgtcaggaaaacttcagcacaactgttaatgatatagtgaatggattgacgagtgtgagcgtgtcaacactgttgaaggcgacgatgatgcgtgagcttgccccatgcgatgaaactgttacctacaatcgtaatgtaatgtgctggtattctcgaatgccatagcccatagtcagccatggcttggaataacgtagtggctgactgatatgccagtaggcaccttatctagtacttacagaactaaaaaaagtttgtactatacatatatggacaaccttataagtggctatgtgtgtacctatcctaacgcttatcccagatggtgtatcagcgtttttctgtgagattgttttcaagcaaggggttgttcattcattgggtcttctcaggaaaaagagaattatgctgcagttaaccagatggccgctgttgcgtcgacaatatagggtaaaacaaatgcaaccactgcagcgaaagatattcatagatagaattgttttcagttcattcaacgctgaaagcagtttcggtctggaggctgagctttggatcattggatggcagctttgacacctggagtaccgctcattagttttt

SEQ ID NO: 30044 - DNA, 3617 bp, Zea Mays
ccgcgtttcgccttcccctctcgctcgcctgcggttcggttggttagctcggcagctggagcgttttccccgctggtggttcgtctttcggttgctccacctccaaccgaacctccctcctccccaccacaaatatactagtgctagcaaccaccaccacctgcgtcttcccagctccgttccgtcctcgcccgccggccaccaccggtggggcccactgccctacgctccgattgcttgcctggcccttcccaccgcctctgtgcggcgtcgcgcgggaaacacaccaacgtccaaggggaggtagagagagaggaacgggaggcgcctcggatccccggcctccaccgcgcgccgggggacctccggagtgaaatgtgggacccgtgccgccgggaatttctctagaggcttgtccgcaccaccgccgagcgacacgatatggtggagggtaggagctatctccctgcagaggtcaggagcggcctcgagaccctgaagcagaggaggctcgagagaatgcgtttgagtgctcagaatgaagagggcggcaatcctgcgttggctgcgagaagcggtggtgatgccttgcggagccccactaactgcagggtcagattgcatcccgacaacaatacaggaggtttacctggagatgtccagggcaagaatccttttgcaaagcgcaaggtggagaagtttgatatgtccaaccttgagtggataaacaagataccagagtgccctgtgtattgtcccaccaaggtggaattcgaggatcccattgcttatatacaaatgatttcacccgaggctgctaaatacggtatttgtaaaatcgtctctcctgtatgtgcgtctgttcctgccggtgttgtgctgatgaaggaacagcccagctttaagttcatgactagagttcagccccttcgtcttgctgaatgggctgaggatgatacggtcactttcttcatgagtggaagaaagtacaccttccgggactacgagaaaatggcaaacaaagtgttctctaagagatattccagctctagttgtcttccaggtaggtatgtggaggaggagttctggcgtgaaattgcttttggcaaaatggatttcgtagaatatgcttgtgatgttgatgggagtgccttctcttcttctccccatgatcaacttgggaaaagcaactggaacctcaagaatttttcacggctccccggttcagttctaagacttcttcagacaccaattccaggagtgacagatccaatgctttatattgggatgctcttcagcatgtttgcgtggcatgtggaagatcattatttgtacagcatcaattaccatcactgtggggcatctaagacatggtatgggataccaggcgatgcggctcctgggtttgaaagggttgcaagccaatacgtatataacaaggacattttgattggtgatggagaggatgcagcgtttgatgttctactgggcaagacgacaatgttccctccaaatgtcttgctagatcacaatgttcctgtctataaagctgtacaaagacctggagagtttgttataacgtttcctcgttcttaccacgcaggcttcagtcatggcttcaattgtggagaggctgttaattttgctgttggcgattggttccctcttggttctttggctagcaagcgctacgcgcttctgaacagaactccattgcttgcacatgaggagctactttgtcgttctgctatgcttctgtcccaaaagctgttaaactgtgacccaagatccttggacaagttggaacatccatgttcccagtattctgtgaaatcctgctttgtgcggttgataaaattccagcgacgtgcacgtgacctacttgctaaaatgggttctgaaatatgctataagccaaagacatctccaaatctatcctgtagcatttgccggcgtggttgctatatcacacatgtgttgtgtggatgtaactttgatcctgtctgcctacatcatgaacaagaactgcggagctgcccttgtaagtccagtcgtgttgtctatgttagagaagacatactggagctagaggctctatcaagaaaatttgagcatgatgtctacttgtataaggaaagaagttccattagatcatgtaaggaggctgagatctctgatgctaatgttgaacacgtcccaaatcttggtattactctggattttgctaatagtaaagctggtagctctggctttataactgtcgatggaggaaacagttcttctgcagtatcaattttgacatcttctgcgcatcatgaggcactcatgcattcagaagcaagggttcatgcaacacaaactgaccagatttattccactgccaagcaggcaataaatacatcagtgaccaaaggaacttgcactacagatgagagttcatccggcatggattgtgcttgtaatgaacatggttcatgtaatgcttcagtcatggaatgcagtgatgattccggttcagagaatgaaattttccgagtcaagcgcaggtccaccttatttgacaaacctacttctgaaacaaagacatcaaccttgtctgaacagcaggttctgaggcggctgaagaaggtacgtcctggagtacagcaggtcagtaagcgtccagaagaatctggtaatggttcagttcgctctacccatatgagcccgagctcaaatcatgcctcttcggatgatgaaatagacatggctcccctattcttgaggataaagcggcggcagttggaaaaccaagatgttacaagtcgtggcgcgagatcacagtcatacccatcttccagtggttctcgagaagagtttgtggaaagaagtagagatgctgcagcagagctccgtccaaaacgagtgaaaatccggctaccttctagtgccagtaggcagattgagcagcagcgcagttcggggcagcgatttgcaagggaggacaagttgccgcttgcattttagggaatcacagggcctccaatttgaggcctctgggggcacgcttaggagacacacacgtgacaatattctcgttgctcgaggttctgtgtcactgccggtggctctttgatgcctggttatcagtgacagaaattgaggagaacctcgctacttcgatttctctgcaagtgtttagagcatgtagctagcttagctgtatatctctcactgtacctacggtctttcctattttttttgtaatttcctgtaaacaggcatagctgctacagtatggctaactctctattcttttgttggtttagcctggcgctgcttagcattttcaattaaatcgagattcgtttccttttcggatggttggtatatgttctggtgttgctgctctcaattgtgtggaatgttctgttatgttggcatggttagagatgacaatggggaccttatccccaaatccctgcggggaattcttccattagggttagtttgggagataaaattctagaggagattggaggggctaaattctttttaatcaaaattgaataagaaggagatttttagcccattcaatcccctcctattgaggtcttctggctatcggaggcgatgga

SEQ ID NO: 30045 - DNA, 2624 bp, Zea Mays
gggaggggttcctttcttctcccaccgtcgctgccgccagctgcccagctgcgcctcgtcgtcagagggttccctttcctgttcgatgtgacgcagccccccgctgcgccccgacggcggcggcctcaccggctggcgatgggcacgacaaactgagacctccctttccacccaagttctctttcctccttctctctctctctccctctctctgcggaaggtggcggtgctgcactctgttggtacaagagtctggagtgcagtgcagatccacccggccggacctggatcgatatctccgtttgttggttctttccatcgtgcaggttcaataaaaccaataaattctggggttcaactgaacccccaatccgagtataacggccactctgtgctgcaaggtttgtctaagattttcgtgcaataacggccatgtggaggctcaagcagttcatccccaaggagcagcccagccccagcggcctcgagggtcggacggtcgatgttggcaatgtcaaggtgcacgtccgagaggccattgctgagggtgggttctcatctgtctatgctgctcgagacctggtaaacccagcgaagcagtacgccctcaagcgcgtgattgtccaggacgaggagtcgctgaacctggtccagaaggagatcacggtgatgcggtcgctcaaggggcaccctaatgtggtcacactggttgcacacgccatactggacatgggacggatgagggaggcactgctgctcatggagttctgcgggaagtcactggtttctgtgttggagggcagaggagcaggttactttgatgaggagaaggtggcgctgatcttccgggatgtttgcaatgctgtctttgcgatgcattgccagacgccacctcttgctcacaggctcttgggtgtctcttgtatagaatttgctacttcaaatcagcatttgatggagaatcaaagctccaaatacttaacgggaactatcgcatcccagaattgccgaagtacagtgtggttccgtattaatgagttacttccattggagctgcaaaaggatttacctgatggatctccatctggatcagcatttgaatctcacactgccactgatgaagtatcaatgaggccacagcagatgagtggctcttcatcaagagagaatatcaagaatacctctcttagtgattcttccaacataatggtacaaagtcctctgaaagctatagggaacatgggttctatgggtgcattttggtcaactcaacatgctcaggagctatcttttgctgatgacaaggagccagcttttgataaagagcccattgatcaagtcagatcaaagcaatcacaggctaagaaccagaacacagcagctcgcaattcatctcggaagtctctgtctgcatcagttgatagttcccctggggatttcgaaattaggttttctgcaaatggctcggagtctaggttggaggaaaccaaaacggtaataacagagaataaaacaaagatacaaactactgccttcaactcctgtgcgtcagactttgataatatcaaaatgaactcacgaaacactactgacagtataaacataactagcaaattgaaagagcttcaattggaagcagaagtaactttactcaaggaacaattaaagatagcaaacctggagaaggaagaaatttcgttgaagtttgataagttgtctgccatttgctcctctcagaggcgagagatacaagagcttaagcaagctttggctgcagcttatgttacgccaccagctaaacagttcagagaaaattcaagtgttgaagtcaccccacccagcaaaagcctcgacactccgccgagggagaagattgaaggaacccctccagagctccggcaaggcctgtttacttcaagcccaggaacaccaagccctgacctgaaaacatggtcagctttccttgaagagccaaaatctcaagcagctgtgaagagtgtccaccccaggtcagtccgaactctgcgtgcatcaaacagcaacaaagccagctcgttgggacagtcaaatataagttctagcaccgatccatttgcgtttggtcaagatagttttaaggctgctccttctggaactgtacttcccctgttatcaaacatggggaatacttctcagctcagtaatctgaatatagaagaaaagaaagacggatcctaccaaccagatggatggactgggttttgattgtgctatagtaatttatgtgccaaaagagtcaagagttcatatggtcttggtggtgtggtatactgaaggtgcagagaggaatgcctgaactggtgtaggtatgtgtgacaatgctttttgtacaattgttctggtcctgagctagcatcgtgatgcgttcagttgtaactgtagtgcaaatgtaagttgcaacttgcaattaattgctagatattagatataggaagatgtttttttttcttatgtagacaagcttgtggtgtcatgaattttggaggcatgctatatagatatagccatctattataccatatcatgaataaagggttatcatttagtgacaattggccaatatactcactttaatactattcatg

SEQ ID NO: 30046 - DNA, 2719 bp, Zea Mays
ggcgtccctcgtggcccaccccacctccttccgagctccgaggagcgatcggcagggcgcgcctctggccgctttgtcgcgacgcgcgttcgctccaatcctgtcgcggccattaaaagccttcccggctttcccgctcagctcgtctcttccagaaacgtacctcgtcatctcttcgccttcgctacgcaattccgatccacgctgcgggccacttgtgacgactggcggaacccgcgagaaacagaggcgggcgagcggcgatcggagatggcgccggagaagccccggaaggaacaggaggaggagttgatgctggaggatggaggcatcgaggagagcccgcgccgcagcttcgaggactgcggcgactccgaggaggaccgcggggagggcgatgacgaggaggagcgggacagcgaccgcgacggcgtcggttcgacgcgctccttcctgccccaaaagtggccgcagagctacagggaaacaactgacacctacacaatcgctgcatcaccgagctttggttacttaggttcttctacaagcaaatactcgctcctcgaccttggtcgcagtattctgggctctgacctgaagtcacctctaatatcggccaaggctgattctgtcagaaacttgccgaaaacccttggttcaatgagagatgggagagtctcgtttcaattgcaacacacgggagaaatctacattagtcaagggtgcaatgtgacgcaaacagtcttcaacgggattaatgtgcttgctggtgttggccttctttccactccgtttacaattcatgaagctggatggactggccttgcagttctagcatgctttgcgattgtttgctgttatactggaattcttctaaaacattgttttgagagcaaagatggtatctcaagttatccagacattggagaggctgcatttggaagaattggccgtgtgttgatatctattattttgtataccgagctatattcatactgtgtggaattcatcattttggagggtgataacctcacatcaatttttcctaaagctggttttgattggcttgggattcatgttgatggaaaacattttttcggagtgttaactgctattttagtcttgccaacagtatggctgcgagatcttcgagtactctcgtacctttcagcgggtggtgtgattgcaactcttctcgtattcctgtccgttggtttagtcggtgttaccgatggtataggcttccattcaactgggaaggcagtaaactggagtggcatgccttttgccattggtatttatggattttgctactccgggcattcggtatttccaaatatctaccagtcaatgtccgatagatctaagttccctaaggcactgttcatatgtttcgcaatttgcacagcaatatatggctcttttgctgtcattggctttctcatgtttggaaagaacactttatcacaaatcactttaaaccttccaaagcattcgtttgcctcagaagttgcactatggaccacggtgatcaaccctttcaccaaatttgccttgttgttaaacccattagctcggagtttagaagagttgcgtcctgaaggttttatgaacgaaacatcatgcgctattatactgaggactgcccttcttgcatcaactgtatgcattgcctttcttctgccgttctttggtcttgtgatgtctctcattggatctcttcttagtatacttgtgttcacagccgcgtacagagctatatgacaggactttctgatatgcaatgcgttgttatttcgtttgtggcctaagaaagaggaagcatggatgatagattaatcgtattttattatgcaatgcgattaattaacgaatgtatacttcccataatcacaggcagtcataatgccacccttgtgtttcctgaagatcgcgcagaacaaagcaacttgtgcacaggtaatcgcaagcatttgtatcgtaatgttgggcgtcatcagtgctgccctggggacatactcctccgtgaaaaagattgtagaaaactactaagctcttcgacaataattgcctgcctgcaccagactccacgtatggaactcgaaatgttgaggcatctatatatacggcgacgactactgtacaatcagagtacaccttatgtacagtcaggatcagctagcactatattcttagaacttggtcgagtgcagcgaggatgcatgttcgttggccttttatggtgccaccatggtcgaagccatagcctgagcatgataatggcgccatgcactgttgtcttgtatcatatgcgctgttctatctcaagttctttttgaaggaagcaggcttgatttgtttgtagtgtgacgttctgtgtgtcaatgcaaaagaataatctggtgaaaaacaccgtgtcctagatgtttcatctcttttttttctttgctcaatttgctagtcaattaaccatatcatcgaactgaacatgtattggcttcggattggaacgcatacatacattctcctaatgttgcacgcaggacagaatgttacacagttacaagtagtgcaaatgtcagcacttcgctgagctgattgtatgtacactatcctaatgatgcacgcaagacaaactggcttggctttaggcatgccagggagcaatttccctgcaatgtacatttaagagggcgtcgatcttggcatctccaccgac

SEQ ID NO: 30047 - DNA, 589 bp, Zea Mays
tcaggttcttgccacttttgttacaaccatgttcttggacagagctgggcggcaaattctccttgttaattcttctactaggatgactgtaagtcttcttgtagttgctattgtattttacatcaaggataatatttcacatgactctgacttgtatgacatcttaagtatggtgtccttggttggtgtcatggcttatgtcattgccttatccttcggtatgggtgccattccttggatcataatgtctaagtttaaaaaggtcctcccgccttcatgcagtgttgtaacatcaatcaactctactaactgtctccactctttgtttttgttgaggaatgtattatatgacattaatcatttttcagttgaaccatataagctttctttcaggctcgactatgttgcttacatgatccatttaactgtctttggatttttttggggtaactccaatatctcacatgaggttctttctgatagctgttacttaatctgtgttgatctatgtaaatgtggcaacacttggcagtttcatgcttttactaatggagaaatccagatgttggaggaagtggctgaggagtga

SEQ ID NO: 30048 - DNA, 7369 bp, Zea Mays
atgggggagcgagacgcgctcccgccgctgccgctcgccctcggtccgccgcatctaatcccgccggcgcccacccgcgacccgcgcgccatcgccttcctccctgacctcgtgggcttccactgggtcgcctacgctgccggctccttccttgtcgtatcccacctcccctccccttgccgggacgacaacaacaacgacagttgctccccgttcttccgccaggtcatcgacctccgcgcccccgtgtccgcagttgcttggtgccgccgcgggagcggagaggtcgccgccgctacagacaattctatacacatattccagcctgcgcccgcctcttctccaggttcgtttggatggctcctgagatggtctatcaccgagacgttcgccatcgttgctgtatcctggaccggctgcggcaatggcattgtggcagttggcgcaggtgtttccatgtgggcaagattggagtcctcctggcagctcgcttggaggtctacaccgcaggtgccgcaagcccttgtctccactacctgttccatgcaaggtcctgtcgcgacagtggcagctcttgctccagccgagggcagtgtgcctgttcttgtgtttctgaacgatgccaggagggggctggagcaagctgagcttgtgcatcctcagcctgtttgtatgatccagtggagatcctgttcgttatacccccatgatctgtctgagatcaggagagagatcctcatgacttgctgctttgatgggactgtccggctatggagtaaggatgaggtgtctaggtcgaagaagcagcgtggtttgctaatatcattcagtgtcattgcagtaatagaggtgaacaacactctgaatggagtcctcggagttgatattattgtgagatggtccatggaatctggcagcgttgtgtcaagggacgaacaaggtagattcaagttgttttcaggtgatttgagggagagccaggttggtaaatgtgagtggcttgtaagtcttggccccgggccttgcattagcttttgggctatccattgtttggatgatgtatttccgccaaggtacccacggattactttatggaaacagagcaaacttcagggctggggggattcctatgttaaatcaggtcctctaaaatctatggaacagtcaatttttgttgaggctgtcatctcaagaaggctatgctctggtccacctgcaacatgttttttgcttcatttgctggtggatgattcgtttgcttggtcaaccgtatccaccaaactgttagctgattctgggaaccatgctttaagtgattctgctaaaaatatcttgtgttgtttgactaaacctgtcaaacaagatggacataagggtagcatcagacaagtgtctgtccatccatatagctgcgaaatagagttagctgtctccatggattcaaacagaatgatatttttctggtctctgtcaactttctcaactctcataccgacaatgcatgcacctatgtatcctctatggaagctgttgtgcaaatttgatttgcgtaacatttctgaagatttcgagtactcatgtttgtgttgggcaccttctgttactcgtgataatagatttcttgttcttggatgggaaagtggagtcgattgtttcgtagttagaattcagaaagaagaggttctttcatgccagaagattttcacaatccccttccttgcagaaagcaatacagaagggccacctgacagcattcatacgataccattagcttctaaatgcagcaggtgttttgtgaacaacagtttcctagtagtatgtatatggaagaagaccttcaaaggtttctcatggaaagtagtattgcattcagaaaatcaatatgtcaatgggagatgcttgtgtggttttgctcctagctctctttccaccacaaaccaaggggcacatgcatgcttcagcaatgaaatgttttcagcagtggtttatgaaggttcttcagtctttccttctggcctggagggagaatataccacgtgcatttctgtaatgccgctgaataatactgtactgcctatacaacaacatgacccttacagaactgttccaggctatcatattgctactggttgctctgatggcactgtaaaactttggaagatgacttgtgcagaggactctttgcagactaagaaagaaagacacatctgggagctagtaggcatgtttggtgctcatcaaggaccaattgacatagtttcattgtcaggctgtggtagagttattactgttggcagaaatttgaagaaaaatagcacctccattcatatctgggaagcaacaaaaatcaggggagacgggaattttctgctaggagatacactaatgttgcaagaccatattgttggtttagatggactatccttaggtgatggacgatttctacttgcagtttatctagctaatgagttacgtatatattctcataagcacccgtccttccagaatgtactacacactaagaattcaaaagaagagcatctttggagctgtattgtattatcccattctcatcatgatattgttggctttctttggggaccaaaggcaactgttgtgcttgttcatgagaaccatctttcactcttcagttcatggctagtaactggagataatgagtacatgacccagatacattcttgtcctgtagttcatgagatgttgccatgtactaacaattttaacgaagctacttttggtaaactcaagttaccagaaaatttcaacagtggaaacattgatagcaataatgtcctgctaacagaccaacatagccactattctcatggtttatggagcttgctgcacatagctcatagattgagtggaccgttggcatcatatcacccaagagcacttatccagtatctttattcaggtgaatggaaacgtgcggatgctgctctgcaccatcttgttcggtccatgaaagtgagtgaaacttcaaagggcgtgtcaaattacagtacatgccatagtattccagaacttcctttgtctgaatactttgcggcaacagtgtccaacaacatttctaccaaggggtttatgtggggtgagaatagaagtaacacaacttttaatttgttgtcaccttcaacttcatttctttacgaggatggcaatttaggtattaatactacaactagtgcatctgaaaaaccagacattgttgagctccttgacaagagtttcagcaaatatggtataagtgactcagagaaaaatcagatacttgcaatttctgatcttatggctggaatcactgatcagagccattcctctccctacaaaaatcttgacgaagcaggaagaaggttctgggttgctgtgcagttcgaacaattccatgctcttagaagatctgcagattcatccagtaatgaagggtgccgtgttgattctgcttccatagcctgggccttccaatctgattgtcaggatgatctacttaattctgtgcttcctgcagagccaacctggccagagatgcgaaagcttggtataggattatggtatacaaatgtgtcccaactaaggacaaggatggagaagttggcaaggttgcaatatcttaaaagcaaggatcccaaggattgtgctttgctctacatagcattgaacagaataaaagtgttggttggtcttttcaagattagtagagatgaaaaggataaacgtctatatgagtttctgtccagaaacttccaggaagaaaggcacaaggctgctgctctaaaaaatgcttatgtactaatgggaaggcaccaatgggagcttgctatagcttttttcctccttggtgatgatacttcatcagcagtgaatgtttgtgcaaagaaccttcaagatgaacagcttgccattgtaatttgtcggcttattgaaggatctggagggcctctggagcgtaatctcatttctaatgtgctacttccagatgcagttgagagaggagataactggctgtcaagcctgcttgagtggatgttaggaaattattgccagtccgtcaatagaatatttggttgccatccaaagttgcttattgatcaaaatgtgcttgcagacccagaattgggtcattattgtgcaattctctcagcaaaaagtagtttcagaaactctgttggtgaagctgtatctgcaaagttatctaagctttcatttgcagtggctgcatgtgccttgaataagtgcggactacctcttgaagcactagaatgcttgtctactaactcgagcatagatggcaaggatagcataatcgcacatggtgatggagaccacaagattttttatggaatactgagccctgtctctgcttctaagaattggctgtcttcatctgtcattagtggcattgagtccaaccttaaactaactatggcttcaaaatatctatctagccttctgagaaagcactcactctgttcacaattgaacgcaccattatctgaagaaaaggtccttaatgagtacaacaatcatcaaattgaaaaactgacgtgtgatattacaacagtaatctcaatatttgataaaaggttctccctcaaatttgctgatatagctgagaagcgtctaagggaattctttgagaaagagggacttgaacatgaagctggtgttagtggttcagaattcaggggtcttatcacttctgttgctgcaaagtttgttatggattccattcattttgtgtcatcttcattagtaccactgcatgcatcgttcttgaggaagaatttaccgatgaattcaagttcaagtttgctcttctggttagagtccaagttgcctcagcaactcccagtcagtgatagctatgatcacctctcgaggatttcacagctttcaaacagtgagaatatggaggcattgtttaatattttgtgggaaatatctgttaatcctgtggatgtttgtaatgcctttgtgagtgaaggagttaattgtttttccttaagcaacacgaatgtcactagatcttggaaggacataagatgtcctgtggttgagtgtgataaaattattactgaaagaagtggagaggaacatgaacacagacttggctccaagagattgggacagggattcgctgaaaaagcctcttataatggtgaagtgttgtatgaaactaaaaggagggagttgatcatacaaaaagagtttcagagcccaagggaaattctaaggagaagcggggagcttcttgaggcggtatgtcttaactctgtcaatgagaaacaagctgctattgctactaatcgaaagggccttgttttcttcaattggagtgacaagcagcataacaagagtttttcagagtacgtctggtcaggatctgattggccattagatggctgggctggctgtcagtctacacctactccaacttctatctctcctggtgttgatcttggtcggaaaaaagggtcacaacttggttcagttggagcaactacaggtttgagttctttagcaaagccaggaagagatctaactggtggtggagcatttggaattccaggctatgctggtattggggcctctgggtttgggtggggcgaacctgaagaatttgaggatttcattgatcctccagcaacacttgagaacatacattcaagagcattatcccgccatccctcattaccattgtttcttgttggttcaagcaatacacatgtgtatctgtgggagtttggtaaagctagtgctatggctacatatggtgttctacctgctgctaatattccaccgccttatgcactggcctccatatcatctgttcaatttgactgttatggacagcggtttgccactgctgcattagatggtaccatttgtacatggcaagttgaggtgggtggaagaagcaatgtctatcctacagagtcatctatatgctttgacagccacgcctcggatgttgcctatgtgtctgcaagtagatcagttattgcttctgctggatatagttcaaatggttcaaatgttgttatatgggacacactgtctccaccagctacatctcaaacatctatcatgtgtcatgaaggaggagctcggtctatttctgtgtttgatagtgatagaggctatgggtctatctcaccgcttgttgtaactggtgggaaaaatggagatatagctttgcatgattgccgcttcctttctactggaaagtccaagcatcatagagttaccactgagcatggtgtcgaggcatcttccatgcatgacatcaaatctagtacttttggtggtactgacagtgggatggtctggcatataccaaaggctcatctaggtagtgtcacaaaggtaacgaccatcccaaataccagcttgttcttaaccggaagcaaagatggagatgtgaaactttgggatgctaaaaactcccagctagtctttcactggacaaagatgcatgaacggcacaccttttttcaaccaacctccaggggctttggcggtgttgttagagtatgtagtactgtaaagactataaaatgtttaatgacttcgttcataaattttgttcatgttatggctgctgtaacagatctccaggtgttgcctaatggtttcgtttcatgtggaggtgatggttctgtgaagcttgttcagataaaagatgatctcgctgcagcatatcagcgttaaaacaagcaaagagggaagaagacatgctagaaaatgcgatggatgcagttggtcacttgatatcattctattttgctttgctcattatacttttgagatgctttactcctttcaggggtggtatagcaaggaggaagctatgatttaagagcactagagcagacatctaggcaatttgacatcagcatttatacgtcgagtttttatacgagcctggtttgtggctagtcaaactgccctcagtggtttttttgaggcctgaattttcgcactttggacagggcaatgcggaccataattttttgtacatctgtacagtcaaatatcttgttttgttggccaggatgttgatggagggtgtaaagttgtaagctagaagtatggagataccaagctacaatacctttttgttacttaatacaaaagtgctgggtttagggttaatgtacaatggcagagcaaatggaccaaacaaatattgtatttggtacgggagtatgtatgcggtttgtcaaggggaccgcagtagttcatcattcaaaacaatattttgcattattttgtactgtagatttcactgtttctatagtgaagtttgaatatgagaatgtagatgagtaaattgctagagata

SEQ ID NO: 30049 - DNA, 1872 bp, Zea Mays
gttggtgccgatcctgtaatggttgccctaaagacacttgtagtgatccataggcttcttcgtgaaggtgaccctgcattccgcgaagagtttctaacatttacacagagagtgcggattttgcagctgtcaaacttcaaggatgattccagcccagttgcttgggattatgcttcatgggttcgcacatacggtttatttttggaagaaaaactagaatgcttcagggttttgaagtatgacattgaagctgcacgtttatcaaagcaaggtcaaggacctgaaaagggccacagtagaactacggaattgaattctcaggacttgctggagcaattgccagcactgcagcaattgttatatcgacttattggctgtcgagcagaaggagctgcaaaaaacaattatctggtgcaatatgctctagcccaggttcttaaagaaagcttcaaaatttattgtgcaataaatgatggaattatcaaccttattgacaagttctttgagatgccaaagcatgaagcactaaaagcccttgacgtttacaagagggctgtccaccaggctgggaacctatctgacttctatgaaagttgtcagggtttagagcttgcaagaaatttccagtttcccactttgagggagccaccacaaacattcctttcaaccatggaggagtatgtgaaggaggctccgcgtatgatgccagttgtagagccactggagcttcctgagcggcttcttctgacatacaaaccagaagaagaagttcatgataccgttccaattgtagcggagaaactgcaagttgttgaagaaattgctccagttccttcttcccaaatagctttgcctcccaagcctgagattgcagatactggtgatttactggggttaggtgattcaacccctactgtgttggcgatagaggagagcagtgctttggccttggccattcttccgacaggtattgataactcaacaacaactacacagcaagatagtggatttgatccaacaggatgggaacttgctcttgttactacaagcagcaatgcgactccactgtctatggagagtaatttgggtggtggatttgacaagctcacattggacagcctatacgatgatggaacctacaggcagatgcagcaacaacagctatacggatcagcccctcccaatccattcatggcaagcgatcccttcgccgtatcaaatcaagtagctcccccaccatcagttcaaatggcggccatggctccacagccccagcatttgcccatgatgattgaaccaaatcccttcggaccaccacagcagcatcacgcgggcgtcgctcctgcagcaaaccccttcctcgacgccgggttcggtgcgttcccggcagtaaatggaatgcatccacagaccaaccccttcggaggcgccgcacaacttctctagtcatatatactttgcaaagtttgcattacaattacatagaagatgtgcaatctgtagatacccacgcaacgatgcaagacaagcaattgacgtctgtggaatcgcttttctccgtcagaccgttaccaatcagggaatcgccatgttgcaccagcctcttctcgcccttccttaggctttggccgcttggcctttcttgtgtagctttctgttttgctgtgtctggttttccatcttccgtggcgagccattgcacccattgtaaagaaatttgtttcatcaggctttgggctgataaaatcatgagtacgtgccaataaggcaataacccatcagcgtttgcatttgtgtaactcctgatgaccgtgcgaatattttcgcaattggtcccaaaccacttttggcactattaaaaaacaggtagag

SEQ ID NO: 30050 - DNA, 941 bp, Zea Mays
cgaccagtcgaccaccaccaccaccaccgccaccgttattcgctctgcagtctgcaccctcctcctcgctttccgacccccaaaccctagatccccttcgccgtggcggtggcgccgcggtgacccggcgcggcggcggcggcgatggcggccgtgccggaggacctccgctgcaagcgctccgacggcaagcagtggcgctgcagcgcgccctccatgcccgacaagaccgtctgcgagaagcactacgtccaggccaagaagcgctccgcctcctccgcgctccgcgcctcgctccgccgctcctcagcctcctccctcgcgcccgtcttcccattctcctcctccccctcctccgccgctcgcctccgcgccgccgacgaggacccgcccatggcggtcgcgaggcccctctacggcagggtcgccggggaggcggtgtacgtggctgaaccggtgccggcgcccgcgcggagggaggtcgcctacgaagggctgcctcggggcaatgcggctggtggcaggactgcggcggggctggtcggcagaggcccactatggtttcctggtggcggctctgaagggataaggagttgccaccagtgccggaaggctgggggtgtcatctggtgtaccagctgtgacaggagaggctactgtgccagatgcatctccagatggtactctgacattccgatggatgaagttcgaaatgtttgtccagcatgccgtggtatttgtaattgcaaagtttgcttacaaggagacaacttaataaaggctagggtgcaagaaatatcagctgttgataagttgagatatcttcattgccttttggtttatgttcttccagtactgaagggaatttattctgaccaatgctttgaaataggtgttgaaacaagatcttctgatgtcctcagagcaaagataacttctga

SEQ ID NO: 30051 - DNA, 2353 bp, Zea Mays
gtctgacatgttttaaaccatatttgtactaatgatttctttaattacactcctaaaatttaagactaaactttagtctatagaaatcctatttaaaagatctattttagtcttcccgtttagtattttcaaaacaaaaaatgactcactaaaacttagaggttggaaccaaacaccacggagggtacgaatttctacttcgagggtacgaatttctacttcgtgaagtgcgtgaagtgtatttatctacctgtccccaccggagggtacgaatttactctgtcttgttcagctgtcctttttcttcccgtttaaacacccccagatttctctatatcacgacgctacccctccacgtctccgcttctcgtgttcttgttcgtctccgcctcaggcaaactccacacggacacggtcacacctcgctcgctctcgctcccgtatcgcggtttccttttcgaagccttgctaggtttagctggggcctccgtctatcctgtcaatggccccttaggcggctgtacttcagacttcagaggtgacgtgaggcgtggggacgcgcgtagctgattggttcgaggaggcggggatggacccggacttctcgccggcgagtgggggcccgagctttgagttcgccttcaactcggtcaacttctctgaccgggtgttgcggatcgagatcgtcgctggggatgacgccctcggggccaagggcgccaccggcgaggggtgctcatctcttgccgactgggcgtgccaccgcaagcgacgacgggaggagctccgacgcgacaaagaatctagaaaatacatgccagatccagcaaactgcaaagttgaagctgaagaatgtgatgcctacgaggaaggcaatgagcctgtagctatgatagaagaatctccgcctgatattgaggcagatggtgaggatggaaaaagcagcgactcatactgtagtatggagtgtactcaggttttgagagttaagtctatgtacatcagctctgcaattctagctgcaaagagccctttcttttacaagcttttctcaaatggaatgaaagaatccgaccagaggcatgcaactcttaggataactgcttcagaggaaaatgcgcttatggagcttctaagctttatgtatagcggcaagttgacgacaaaccagccaactgtcctgctggatatattgatgatcgctgacaaatttgagttcagccattgacggacaccgccaaggaattccttgccaacaaatacaaggatttgactaagttccaagatgaagcaatgaacattcctcttgctggaattgaagccatcctatggagcaatgaccttcaggtcgcgtcggaggatgctatctacgacttcatgataaagtgggcacgtgctcaatacccaaaattggaggaaagacgtgagatcttgggcacacgcttgctgccccttgttcggttctgccatatgacctgcaggaagttgcggaaggttattgcctgcagtgatctggatcacgagcaggcgacgaaatgtgtcacagaggcacttctctacaaagctgatgcaccacataggcagcgtgcccttgcagcagacgtgatgacatgtaggaagtatgctgagcgagcttacaaatatcgcccgcttaaggttgtagagtttgataggccgtaccggcagtgcatagcatacttggacctgaagcgagaggagtgcagccgacttttcccatctgggcggatatactcgcaagctttccatctagctggacagggcttcttcctctcagcacactgtaacgtggaccagcaaagtgcgttctattgttttggtctcttcctagggatgcaagagaaagggtcgacaagtgttaccgtggattatgagttcgctgcaaggacaaggccgtcaggcgagtttgtcagcaaatataagggctactatactttcactggcggtaaggctgttgggtaccggaatctctttgcgatcccgtggccgttattcatggctgatgacagtctcttctttatcgacggggtattgcatctcagagctgagctgaccataaaacaaccctagatgaggccgtgtttgtgccgcgcgcgtgtccaaatccatgcaatggtgttctgcagtgtagaatatggaaatcttgtgtgctgttttgttttgaaaacgacaactcaattctctcttgttcagttgtttgtacacctgaggaggatcatgtcatgttttgtactctcactaaactgtgataagtgatttagctaatcaaactttaagttcaccagcaacaaactaccacctcctatccattgcatcacttattggtttgtgcatg

SEQ ID NO: 30052 - DNA, 3423 bp, Zea Mays
cccgtctcacgaacccgtcccctcacatccctcgcgttgccattgcttggtcctctccgcgcccgccgcccctgctcggctgctccccatgtcccgcgccgcggtgacaaggatccgagaacacccctgcggacgcatccgggattcaaggcctcccctcccttcccctgcccccaccccctcggtgatgcccggatccacgactgctaccgtccagcctcgttctccgtccgcgaccgcttcacggtggcgcagacgctggaggtgtccacagggggcgacaccgtgaccctgcctccgttcgacatcagcgcccctccccccaccaccgtcgatttgtagaagctcctcgcccgttcttgcttcaccagcgattcggggaggccatgcccccctcggccgcaccccttctcctcctcgccgcatcccgcctctgggcagccgcgccacccctccctccacctcgccgtctcctacctcctccccctcgaccgcatctgcctccctctgtggcctcgctaccaaggtcaagatcgtcgagatttgttagggtttggggtttttgcggttgactctgaatcccgccgccgctgctcgcgcaggaggcctcgagctcccagtgctcccctcctcaaccaccctgggtaagtggctcccagattgatagggaaagagttcggactgtaggggctattgaatacttgattgatgccacaagatctggaaatgtgtcccgctatatcaatcacagaagttgttccccaaatctcagcacccgattggttttggtagagagcaaagattgccagcttgctcacattagcttgtttgctaatcaaaacattgccgtaggagaagaactcgcctatgattaccgacaaaagcttgtagcaggcgatggctgcttctgccattgtgggggtaccaattgccgaggccgtgtctattgacttcgcaggaagacactaaactgttcaacgcttggttgcagaactcgaggtttctacagctgtgtaggctgctgagcgatttaggtggtacatttacttatcctggatgttcattttcttcttgcacttctgcagtgtttgttaaatagcattacagtaccatgaaagagcagtgacatattcatgcacttgccattatactttccttttcctgaactaactatataatcacttgataaagggacaaatactatgtcataattgttagttaagtatgttatcagctatcttttcttggacactgtacaatacttggatccggtaaaaaaagtttgtacctcttataggtttctatttagtttttttctgccaatctcttcaagctaactcatgtacgtgtatgaatcacattgttatagtagctaacaatgtcagtagtgtaccaatcaataactgtattgcagtcaagaaaatagtaatttccttgactgattttgacatccccatggctttaacagtttaaaaactgaaaattgattctactatatttgtgttttaaggccttagtgtaggcgtacaatctacgtcgacgccaaaattaaatcaccttcctacatccatagttgatatgaactggtgagattcttactgatgcactaaatttcaatcttaggatactctttaattgatgtatgctttgcttcagtcgtataatattagagcaacttatcatcccccatgttttataatccatcctagcatggtacatttttttctgcacaattgtacatggaagcattagtcataggatatcggttgttgaagtacgtcgtcaagtgtacatggaagcattagtgcattgaacggccgaagaatcaccgcaggtacatggctgatgtgttcatcttctagaggatatcttgcaccagagtacaccattcaagggcagctgaacaaaaagagcgacgtctacagctttggtgtgctgctgttggagattgtcagtggcagatgccacactgatcctagattacccgttgacgagcagttcctcctagaaaaggtctggacactctatgagttcgatgatctcgagagcatcattgataggacactaaagcgcgattttgacaccgaggaagcactctggttgcttaaggtaagtcttgtgtgcatcccggatagccctaagatcaagtcctccatgtcaatggttgccaagatgctgcaaggtgagtgtgttgtgggtgataggatcatgaggctggcctgatcacagacgtcatggacctgaaagtcaggatggtagagccggttcagttcagcttgacatcatgctcgagcactatcgcgttgtggcctggggcgcgatgcgcccactccttgttggggatttcccattcagctactacgagtcatgccgtgtaggtacgcggtaggttgttgattcaatcgtgagggtcctcaattaaggtcgaatggatgcaatcaaaactagaagggtgtgcgccatcgaggatcactgcagctaaggcaatcgtgaaggctggaatcgttgttatggcaccgcaagctattagtgtgctaggtggatttaggcctcaagggaaaacgattgacaatgttgtaaaggttgtggagacaacacttgccatgcaggaggctggatgcttctctgttgtgtattagttgttggcagatgatttataagatattgagatcaaaatcaggatgtttccaaactgtctataatcaggatggctattgtagcttttacagtaggtcttcttcccatgggcggtgccctggagcgcctgattgtctcacgtatttgaccagcaacaagggacgaagattggagctgtgtggattgtgtggaggcgacacgggtcaggagcatttcatctgatttacagagaagtaaagagaagttgtttacatttagtcatcctctgtatctgaaacaagactatgtttctaccttgtctttctcatggttcttagcctatggccgaagcttccatgcttgattcttcaaacatccaatgcagatcccttttctctgatggatatgctgatattcaaggctgtggaagagcaggtcaagaagagagtagagaataaggcaatgatcttcgagcagaatgccactgatagtcaacggcaagataaaccaattgcgttgtatgagttttagatcataactcaagttttttgtagatcttggtgctatttcatatgatgtgtcatgtttcagtgattgctttatagtgaacccgtaagatgtaaaatgacctttatgacagaaccatatgtaataacagagtattctgaggaacctttgttgaagtaaatgtaatcgagtttcctagcaatcttgttcctgcagacgagcattggaaaataacagagtattctgaggaaccttagtcgtattaagtttgtgtagaaagaaactgatcataatataatg

SEQ ID NO: 30053 - DNA, 1166 bp, Zea Mays
ctcccaactcgctccctcctcggcccctgcagccctgctccgtggcgcgcatcactgggcggctcgccgtacaatcagcgagcgggtggcggctacctccatactagcaagactcaatcggcgaaaagaggaagcatctggatccagcgaactcgttgaaagacagcgaacaagtagtcgcctcagatttcataagaggagacgatcttgatgacctattatcgaagcttatcaggagtgtggagattgccaaggcttcaaggggaggcttaccagaaaagatatggatgaagcaacaatttgctatcggcgtcaatgatgtcacaagggttcttgagcgaatgccgcattctgtcactgctcatcctgctcaaatgtctaatgaagcaccaactgtctcaggccgacgtcaagctcctttggtgccattgcaggctgtccttgtagctgccgactgcaatcccaaatggttaacaaaacacataccaacactagcgtctacaaggcaggtaccggtattgtgcgtgaaggacaacaagggaggctcagtaaggttaggccatgtggtgaatgtcagaacagcccttgccattggagtaaaggccaaagatagcgttctcaacaagaccattgatgagttcctgaaagacagtaaactggttgccaatgaaccataaagtaaccccaagtctagtgacacgtttgtactaaaaagcctgtacttccgggcatgcaacatcccaggatcatctcataaatgggtttaagtttgagaagggggtcaagtatcttgagcagattgtggcaatatcaatttggagggacttcttgagagaacagtcatgggaaataggacagactatttgtttggtccgtgcaatattgtttgactggtgaacctagttatccattgtgatctagaacttgtatcaaactccaatgtaacgagatgttaggatccttgtttattgggtacagttttttcttcttctcgaggctcgacaccggtacattaatttttcttgttttttatattctatagtatatataataatgtgaaaaggcttatattgtgatggttaagtctttcgagtagcatcgacgaatttttagcttgattaaaaaatcatctcgttatgccttgccagctcccggattatgtcctg

SEQ ID NO: 30054 - DNA, 423 bp, Zea Mays
tggccttataggaatacttttatgctataaggtacaacggctgatatttctttgagaaaagataagcctgaaacattcgataacagagatgccataaaggaggccattccaagttatgatgatccatatatcaaagtgccaagagtgctgaacaaagaatgatctgtagcatgtatatcagaattgttagaatattaatactctacaatgcagcatggttaaacataatgataaaatttgcagaaagattgaacgagtcaccagcaagcttaattgattttgtgcatttcaatttgataatgctgtgattgaacagagcaatcagcaaccttgcattgggacaggataacaggaaagatttgggagatctgcttcaggggaaaccttgttttttaatgcaattattttttgctctctcacaag

SEQ ID NO: 30055 - DNA, 2331 bp, Zea Mays
cactgagcaaagcggaaaaaagcgaggaaaaatatcctgctcggctgctccaacgaagcaccggaggccgcaacagagaagagcggacgccaccgccgccaatcaatagattaggcgcggataatggtgctggccggaccgcgacgggcggaggagggcgccgcggcccccgcgcgccgccgctgacagagtatacctgcttaaccagccgtctgcaggcacggcgcacgcgcggtggtacctcgcgaggggctcgggttgactgggcgctactcgcggccgcggggatggaggaggaggcgtctgcagatccaccgaccgcttcgtccttcgcctgcgtctctggttccgggcgctgctgaatccgacgcttcggttcgcgtccccagtccccttggcggaggcgtggatcgtgtgtttggggggtctgggtatggtgggcggaggcgagggggatcgcgtgggcggcggcgtaggggttgggggaggccagcagttcgtggaccggagcaaggtgaggattcttctctgcgacggcgacgccagcagctcccgggaggtgctgcggctcctctgcaactgctcgtaccatgtaacttgcgccaagtctccgcggcaggtgatcaatattctcaactacgagggcggcgagatcgacatcatcctggctgaggttgatctgccggtctccaagtgcttcaagatgctcaagtacattgccaggaacaaggacctgcgccacatccccatcatcatgatgtccaacagagacgaggtgtctgttgttgtcaagtgcttgaggcttggtgcggccgagtacctggtgaagccgctgcgcacgaatgagctgctgaacctttggacccatgtgtggcggcggagacggatgcttggtttgcccgagaaaaacttcttcaatgacaacttcgagttggtgctctcagaacctagtgatgcaaataccaatagcgccaccctcctctcagatgagacagacgacaggcctaaagaaaacacaaatcaagaaacgggcacctcaaatcagcttgaatacgagtctaatccttccgttgctgagcgcgaccagagagacaagatcggtgctccaggctctgccctagatgccagtcaatcatcgactccgggaagaatgttttcacgtcctataaaaactaacctgaaggttgctgagtcgtctgcatttctagcatatgttaagtcaagcaccccagccaccagctcatttgatagcggactacaaagaggtgacagccggttagattctttggataaccatggtaattgctctagtgcaacagatagaagtgacaccggtgctgatgtaaatattcggaataaagaagcttttgagatgcctgtgcagtatcctatggtatgcttttcttcctctagcatgcatatggagcgaagcaatgaaggccataatgacacttcaggaactccacctgcataccatttcccattttattatccagggatggtagaacacaacatggcactttcatcagtgcaaaattttcaagcaaacataaacagtgctcaagcacatacaccaccagcgatgcttcatcagtacaatgttttctcccaatgccatagtttacccatgatatcaccatttcagtttaatacttctggcatgagtatgcactcaagtcatttaccgacgcaaaatgtgtggtcatcggcatcgagcacaccaacgcctgacgaaacatgcaatcgctccgagagaagggctgcagcacttgctaaattcaggcagaaaaggaaagagcgctgttttgacaagaaggtgaggtatgtgaacaggaagaaacttgctgagacgaggctaagggtgcgaggtcaatttgttaggcatgcaagcaatatggatatcataagcaccggagatgatatatctgaagacgaagatgacgatccaacctccagggaggtagatatgatttcttctccagagtagtggagaggtcctcttgtgtgaaaaattagagtgcagatggttactgctcactttgttacaactcagtaggactagacaatacattattctactggcaacaaggcaatacaccctttttgctcacacagtataaacttttgtccccaaatatctggctgttactccggttgctttaatcgagaaatcatctttttgataaggctgttactccggttactttgatcgagaaataatctttttgataagtgtagttatagttttgctaagtttttgatgcaaagaccagtcaaatcagtttgatcttattgcagggtaatatttgcaattttgaggttaacagtgtt

SEQ ID NO: 30056 - DNA, 2203 bp, Zea Mays
tacacgctgtacaccacccaaaagaaaagatcagaccattcttctagacattgcacagacgacatgtaccaagaaaaaaaatgtttcggtcccatctgtaggttgcaagctttccatcctttctgtgtctgtgtgtgtttttttttctgcctgcttgaggagtccactaggcctagtagttttagcttaaagatgcaaacttttccacgacaaataaaaacagaaaaggcgtcgtcaaaaccgggcagaaaacaccagctttatactaaatgtttttatatcggcttcgctgtgcgttcggtccaataaccaagcgccacgtcgcacgggcactcctctatttaaccgcctagcagctgctatgcgaggccgcacagcacatcccattcccctcgtctcatctcaagagcgactagagagaggaagagaacaagcgataagctcatctcgcacgcaagatgcgggctccaaggggcggaggcggctgccgcggcggccaggagcatgtggagctgatccctggcatccccgacgacgtggccgtggactgcctggcgcgcgtcccccacgcctcccaccgcgcgatgcgccgggtctgccgcggctggcgccaacgaggacctcgtgtacctgatgcagttcgggaacccgtccggcgacgacgggcccaaggacggcgacgacgggcccggcagcaccccggcgtacggcgtggcggtgtacaacgtgacgacgggcgagtggcggcgggagcgcggcgcgccccccgtggtgccggtgttcgcgcagtgcgcggcggtggggacccgcgtggccgtgctgggcggctgggacccgcgcaccttcgagcccgtggcggacgtgcacgtgctggacgccgccacggggcggtggcgccgcgccgcgcccatgcggtcggcgcgctccttcttcgcctgcgccgaggccggcggcaagatctacgtggcgggcggccacgacaagcacaagaacgcgctcaagaccgccgaggcgtacgacgccggggccgacgcctgggacccgctgcccgacatgtcggaggagcgcgacgagtgcgacggcatggccaccgtggccggcgaccgcttcctggccgtcagcggctaccgcacggcgcgccagggtgggttcgagcgcgacgccgagtggttcgacccggcggcgcgcgcgtggcgcaggctcgaccgcgtgcgcgcgccgccctccgccgcgcacgtcgtcgtccgcggccgcgtctggtgcatcgagggcaacgccgtcatggagtggatgggcacccgccgcggctggcgcgaggtcggcccgtacccgccgggcctcaaggccggcaccgcgcgcgccgtctgcgtcggcggcggggagaaggtcgtggtcaccggcgcgctcgacggcgagggcggccgccacgcgctctgggtgttcgacgtcaagaccaagagctggaccgtggtccgcccgccgccggagtttgccggattcgtcttctccgtcgcgtccgtccggatctgaggatctccattttctactagtacgtacgtgcaccgttttcgtcgttgctggatccgatgaagactcatcccctccaagatctacgtttgcaatggatggatctgcgcatccgctgacttactagtccgccttgccaacaatgagagatatacatggaggagcgggagccatgggcggttgtaaaatctgaaaaaaaagtggtgagagtgtgaatttggatctggtggtgagtgaatttggatgagtgtggtgtttttgtcccgaggtgaaggacacagactgttgtttgttgctcttgccctacagccatgcttttgctatcgctagcctactagtaataaaaaccactgtacataccggactgtgccatgcgtgtgatctggagcttgaggaattgcgccggatctcatgtcaatggcagcgttgaacagctgccgtgcgccccatctcgaaggcataatctccaattgtttatcgtttctctgactactcaacggctgagcttgattgcaatccaagctttgcgtcggcccatgaatgaatccaacgatgatggaatgggagcagagagttgacactgccccgcgatatttttctttaattccagtcggagggtggggtgaagcttcgccttcaccaggagccgtatagtcccacccatccatttgatatc

SEQ ID NO: 30057 - DNA, 1506 bp, Zea Mays
aatagagttttaaaaagagagtaatatagggagtgatatagaagtttgctatcaatttttcttctctcgtggctccgacgctcctttctttctcggaggcgacagctcgaactcgaatccctcatccagcctggcgctggcgtcgccggtcgccgccgctcgattgcctccgcctgaatatcccttgccccataaggcctgaccttgaaagcctcgcctcttgatcccggcggcggcggaggggagggcgatgccgaagcggacgacacacacctactcgagcgaggacgcactgccggagggccccgagtccgaccttttcgtatactactgcaagcactgcgcctcacatgtcctcatcaccgatacccaattgcagaaaatgcccaagcgaaagactgacagagcacatgttttagacaaggctaagcatctttcaaggctaaatgttaaggaggcaggaaaagtaatgttgaaacgtggtgaaggaaagcttgaaaagcagtttcgcatgagctgtgtgggatgtgacctttttgtttgttaccgatcagaagaggatctggaggttgcccctttcatatacgttattgacggagcactgagttcagttgctgctgagacaaatccacatgatgctcctgtacctccttgcatcacacaactggaaggtggacttgtccaagtagccattgaagtggaagaccgggcacaacgttcagcaataacaagagtgaatgctgatgacgttcgagtaacggtagctgcccttgctgctcgaggggaagctaacagtgagttgctagaatttatgggcaaggtgattttcttcaatgacactctaatcttattgtggtgtggtattgtgcactttgagccttgtaaaaagtgatattctgattgctccagcgtgccatcacatgcaataagtgtaggttaaaatgtctttgaatctatgctcaaattatacaaagaagtatgcccttggttataaatttatacaaatttagttggtagtctaaattctgaggcagccattttccagtagggggcttatttataactgggaaggttttagcctttgacaataaccagtttcgattttcaaccttgttatgtgaagatgtccatgttgatggcttgtgaaagcaggttcttggcctaagactgactcagatgacccttcaaagaggatggaataacaaatctaagcttctaattgttgaggatttgtctgcacggcaagtgtatgagaagctcctagaagctgtacaaccttaggcacccgagcgatggagcaatgtggtatgcagtatgcgtctggatattctctttcgagggcataggagaaggtttccatctatattgtgcaacaagtggagcagaacgtgtcgagacgaggtcgaaacatggctcaaatgtataactagaccatagcagtatccggttcattgtttctgtcggtgctgccgtcgattcctctaccggtggcgctggaacacaagt

SEQ ID NO: 30058 - DNA, 196 bp, Zea Mays
atattgctggccaaaacaattgtcgctaattaggtgtcatagggtttcctaatggtagtttcgactcccgacgctgccacggcagcagtagaaaatgattgtgatttgcagactaatgtagtaagattagccttttctatctatccttttacaattgaggccctcgtatgaactgagtggtgggacttcttcgaag

SEQ ID NO: 30059 - DNA, 1387 bp, Zea Mays
gcacattctgccgcattatggtcaaggtggtgctgagagattgattgtcgatgcggcttgtcagcttgctgcccacgatcatgatgttcatgtcttcacatcacatcatgataaaaaacgttgctttgaggagactctttctggtttgtttccggttactgtacatggggatttcctgcctcgccatgtgttctaccgctttcatgctgtttgtgcttatcttcgctgcatttttgttgcgctctgtgtgctactcagatggcccttctttgatgtcatattggtagaccaggtttctgttgtgattccactacttaaactaatggcatcatcgaagataatattttactgtcatttccctgatctgttacttgcacaacatactactatgcttcggaggttatatcgcaagccaattgacatgattgaggaaagcactactggttgaatttcctatcaatcaaccggtttgagaggaaaaagaatcttgatcttgccatttcagcatttgctttgctccgttctgctgcttggactctacctggtgatgctctacaagaagcaacattaacagtggcaggtggctatgataagcgtctcaaggaaaatgttgaataccttgaggaactcaaaagactcgcattgacggaaggggtttctggacaggttaattttgttacatcttgctcaacatctgaaagaaacgagcttctctccaactgcctctgcgttttatacactccaaaggatgaacatttcggtattgtacctcttgaagccatggccgcccataagccggtaattgcctgcaatagtggtggcccagtggaaacagttgtgaatgaagtaacagggtttctgtgtgatccctctcccgcagaattctccaaagccatgctgaaacttgtgaatgatcatgatcttgctgtcagattgggtgaacaagcacgtgaccatgtggtgcaaaaattctcgaccaagacatttggtgatctcctcaacagctacgtcttgaacatctaccatgagaggatggaatgatctataatattgggtcagccatgccatatgaaaacaatttgttcaatacaaggttttttttgcacctttacgtctaatctgattttgatggacacacataatgacaatgacattccattgaatccctttggcatactgtagtcactctatgatctgtatattgttttcaattataacatcaaatttggcttggtccatcctagaatctgaatggagctggagtagagatggcaatggggacccgatttcctgcggggaattcttctgttagagcaacttcaaaagaacgtgtaaactaaccccaaaacagatattagtcaagaatagtgatttttttactccaaca

SEQ ID NO: 30060 - DNA, 3019 bp, Zea Mays
gacacggcatcagcttagttacacacataaaggtataaataattcactgcaaagtaaaatcatacaagaacaaaaataatgtcagaaaaactagacagtgaaggtgcgcgtctgttcaaatacgcgaacatacctttgtcatgctttctgaatttttacaactgtgctccagcgtgctcgaatctatctcctgtcacagaattcgagcaaatgcgaagctcttttatacgacataattataaaaacattgattttgctagattgctagaaacatttcagtcacgttcacaattaaaaaggtacagccagtaccgaagactcccacatgactggatctcgagaactaataaactaagccttgtttgtttgcaccaatccagatctagattaacatggattaaaattaaatctatttcacaatccatgccccaaaataatccaagcctactcagattttttttattcagttaaacccatcatggattataacccaagggtttggtaattttttaaattatgtaacacatggattatatccatagctcattagatatgaaacaaatctatgaaaataatgtacaaatttatattagaatccatgattcaaaagaataactagctttgagtgatacatggattaaatgatgaatttaatcccaccatgggattaggtataaggtatgaatccactcaatccagacccagattaaatctatggtggggtttaatcccttgcaaccgagtaagacctaaggtaagtttttccccacatatgcagagacttttttgaacccacgataagtaactcaataaaccgaggtaagtttttccccacatgcagaaagacttttttgaacccacgataagtaactcaataaaccaactgactcaataagacagctctcaccactacagaaaacctatccttcttcagtcatattcataataatgaatatattatagtacagaatattctgaataaaagaacaatggtgataataaccttactgactacacaacctagcactcacatacattttgcaattacgctgtttcaaacccacacgacttcaggatacaagtggagactctagagtgcaccaggccttcccttcagtctaagaattggcaatgccacacacacaaaaagcaacttaaaacattttagcattgccaaatccttgtacgacaatggcatcaactgccactctaatggaatgcttggtttggtgaatcaaaccattttcgattgggtgatgtatcataaacttgtttactattttttctcaaatacgtaggagagctatgtatcattacgtgagctacgtatcattacgttaacaaggaagaagagctaaaactcccaaaggagcctagacgccacaagaaataactggaatgaaaagggaagagcaaaaatgacgacaacaatgacccagctaaacacaagccaccatattatctagtagcggcctctaagtaagctaacccactagcaccagctacacaccagagattagcctcttcagaaatctgcttaagaataagctgcacattgagaacagctacattgaacactcactatggtgagttccacagggaccaggcgaccaaaataattactgaattcagccctattttagttgctaaggcaacaaatctggaatgcccatccaccagactggggggaccttgtcatcagagtggagagtagaaaggctttcatgctttctgccaataagccaattggaggttatgtcgctccaagctacaagttgaggacaactcttcttgtgcaagagaggacacgtgtggagagaatgttgcagcccatgaaggaaactttgagctctaaagaagatagcccaatgtttcttagagcgatcaccactgaaggaatatccaagaccgagcatatttcagagaagatgttagcagtaattgatgatgttggggcacaaaatgttgtgcaagtgatcactgacaacgctgccaattgcagagctgctggcatcaaagttgagcagaagcaccctcattttttggatcccttgtgttgtgcatactttgaatcttgctttaaggaacatatgtgctcctagggaaattgaagatgtgctttatactgaattctagtggattcacgaagtcattggagatgccagcatgattaaaaatttcatcatgaatcactccatgaggttgtctatgttcaatgaggaaaggaaagtgaaattcattgccattgctgacacaaaatttgcctctgctattgtgatgttgaagagatttattgctataaaagatgctctttcagtgatggtagtgagtgaaaagtgcagtgcgccagtgcctataggaaagataatcctcgtcaagctcgatttgtcaaggagaagattgaatgatctgtggtggtataaaaatgagctattttcttagtttcattgagcctatctatgctatgatacgggaagatgatactgacaagccatgcctctatttgatatgagatgtgggacacaatgatagagaaggtgaagagcgtgatctatcgtcatgaaatgaaagaaccacatgaataatctatcttctactcagctgtgcatgacatcttggtgagtcgatggacaaaaagcaacacgcccttgcattgcttggcacactcactaagcctagtggtgtgatgattttagacatcattgaaatttaattctgtatcaggcttagtttctttgttatgctttctccggtaaactggtgatccgagatactgttgctttcttaaaggcagaggttttcctcttttcaaaataaaaaaagaacacatgcctgccagagaggaatcagagatattgatccaaccaaaacaaacaagactgacaaactacaaacagaagaacaagaaactaaagtgtgggataacctgtccggtcctctcaaaatagtcgttgagcgcccactggtacttggactggtccagcccgaaccatctcgagatgtgcttgtccaacctcga

SEQ ID NO: 30061 - DNA, 2146 bp, Zea Mays
atagcccctcacgccagccgccaatgccccaatcccgtaatcgcagcctcgccccgctcgcatcttcctctccctctcagcactggtgctcaatctacaggttgtcccgctccctacacacccgccctccggtgtgaacctccatgacgtccacaaccactctccggtatgaatcccgcgtgcgcttacacgaagattgatctgctgtcgtgacctcatccagccgtgctgtggcagtggatcgaagttcgctccagctctgattgggggaaaatgactagggtatcaagtggaaaaacataatggtccaggttctactgcggcacctctttcaggctaagcatctaaacaacaatatgtaaattatccttttccaataaaatacatgcttaaatcgtggctgctaggcgaatggtcctactttggtcatcaaatgcaggaattccactactatatgtgccacttgaagttgttatgtcaaaataatatggtgaaaacgagcgtctattgggatctattttttatcttgcaaatgatcttcctgaaggagactgccttcgtccccttcatcactgctaatgaccgtgacttggagacccgacagcggccctcgacgttgtcgccgccgagcccatgctggttccaccagtggtccaccacccggatgtggtccgccaagacgagcagtaacggtggcagcgaggcgaggtggtagatccagcaccgcttctgcacgaccatccattcctccacccagagcatgtacccaggcttgcctctcctcggggaacatgccgaggtcgtccgactggagcagaaggcgacatcgctcaacaagctggtcgaggagcagtgcgagagcataaacgatctcaagtccaaggctagtgctgatctccttccctgatttatgaactgcattgagtcgcgtgcgagtttattttatttatgattttttcgtggtggtaactagtgttggtaaacaaaagtttacccccacctttctgctgcttttttctacctcagggaggtttttgatgctcgtaaatattttaacttcgtatgttatttatttaatttttttatcttaactgttgggagaaaagatgaggaaaagcgagagatgggcgtgaatgttggtgctccttgctctgtgctattaactcttcaggtttccgtaggcaaaaaatatacctggacaaatatgcataagggtgtcatttttaattctgttactgttatatgcattccatatttctcgtatatataattaatgatcgtgcctctgttttccctgtgcctcatggcttcgatttgttcattcgacagagccatccgattctgggcccagaacactttgccaaacaaaaagttatcgctcttcatccttgataggctacagaaagggaagctgaaccttgttcttctgccatcatctagcatgcggcttacctttgtttgtgatgatggttatccagagcaactagctctcttgagcaacgactttgaattttcggaagttatgattgaagaaatatcagctgataattctggacgctctttcctaatcagaatttcagaatctaaagtgttttactactggtgtgctgagaagtcgaaggaagattgaatggaacttcttgcaaaggtcttcaagggagaagcggcttaaaatgtgtgagcaggtattttcggactcgtaccagaaagggaaaagctacaaaggttgacacagcgccgaagctgtgaagcaggaaagcttcggcatgttcgcagaaaagggaaccgacttaaagatgaaaaggccatttagacctcgatagagtgctatagaattatcaccaaatgtaaagggcatgtatgtaattttgtatgggttgtaccccgtgcctataaataggtgaacagtacccccgtactgttcacgttgacttggcatttgcttttgcgtcacacttgtattttcatctccttccaaaccgaaggtacatttataatttgatattgtctctatttctctataatgatataataaagttaaatgaatgatgttatatgattattcgtgctatcttttatgtttcatatgcttcgtctttcattaatgtatactgtgatgatgaaggttcgtccttcatgaccttcg

SEQ ID NO: 30062 - DNA, 3221 bp, Zea Mays
cgagtgtttgtttctccagcccaacgaaacccagcagtaaacctcgaagctcctcgtctgatcgtctcgcccggcgcccgccaccaccgccagtccaccagagcagagcggagcggcagcaccccagccggcgccgtctgaccgacccccgctccacccattccaacactgcccacatccttccccgtgtccgaccgtcggctttctcctccccctcccagccgccccagtctttgcccgtggccaagcgtcgacttcctcttcctttcgtcctccagttcgattctagtgaatctgctgttgcttctccgtcgcgcgagactaagacactggagttgaaatccgaggcacgtgggaagcctctctctcaatttttttggggattcaaaagagttcccgatgcccggagctaaggtggcccaagctcctggcggccaggccaggtgttcgacgaaactcccctgagagggatctgtcatgttcttggccaaacgaccgccttggtcgtctcagattagcaggttctgcatccttcccttccacgctgttccctggatcgttttgtggacaaggcgggtgcgatacagtggcggcagcggcgataatgccactccagtggcctctgggcggctgtccaagctgttttggccggctcggatgcacgtggctgacgttattgggcgagttctggaacgggggcagtcgttggattcggtggagctggagctggagaggctccatgtcgacctggacccctttgttgtcaaccgggtgctccggagcatctcggactcggagatggcagtgcggttctactggtgggcagagtccaggcctgggtttgatcacacccagttcgcgatagcgtatgttgtcagcctgctctttgtagacagcaactttttcctgctgtcggagttcctcgagagagtgaggagtcagggggttgcattgcatcgctctctctatcggatcctcttgtcgggctatgtaagggcaggcaagttcgattctgtcatccatacatttgatgagatggttacatctggatgccgtgagtttggtgtggactacaacaggttcattggtgttctagttaagaattgctgctttgatttggtcgagaagtattatagtgtggcacttgataaaggtttttgcttgacttcattcacttattcgaggtggatatctgcactgtgccaatcagaaaggattgagctcgtagagagactccttgccgatatggataagtttggctgttttccagatatttgggcatgtaacatatatgtggactgtttgtgtaaacataacaggttgcatgatgccttgaagacgcttgagaatatgtggatcagaggaaccaatccagatgttgtcacttacacaacagttgttggatgtttatgtgataacaagcagtttgcagaagcggtcgagctttgggaagaaatggtgaggaggggcctcaaacctgatatcgttgcctgtggcgtattgatatttgggctgtgcaagagtgacaaggttgatgaggcttttgagctggcattgaggatgctgagtcttaatttagaactcaatgtctgtatttacaatgccctgataagtggcttcttgagatccggaagcattaataaagcattcaaaatcatatccgtcatgcggacaaatggttgtgagccagacgttgtcacatataatatccgtttgaaccattactgcaacacaggtatgataaaggaagctgaaaagttgatcgaggagatggaaatgagtgggattgtaaatcctgatcggtacagctataatcaaatgttaaagggattgtgcaaagctcatcaattggacagggcatttggttttgtttcagatcatatggaggttggtgggttctgtgatattgtatcttgtaacatactgattgatgcattctgtaaggcaaagaaagtaagttctgctttgaagctgttcaaagaaatgggttataagggaatacaagcagatgctgtgacatatggaactctaattaatggtctttacggtgtaggatactactacctagctgaggaaatttttgagcagatgctgaaagctcgggttgttccaaatgttaatctgtacaatattatgctccataacctgtgcaaagctggtcagtttgaacaggctcagaaaattttcttgcagatgattcagaaggaagtgtcgccagatattattacttttaacacgctcatatattggcttggtaaatgctcaagggcaattgaagctattgatctgttcagggatatgacagctagagggatagaacctgatagcttgacatttaggtatctgatcagtggcctcctagaggaggggaaagctacacaggcttatgaggtatgggaatatatgttggagaatggcataattctcgacagagatgtttctgacaggctgataagtatgtttaaatcaaacaacaagtaacaactgactgggtttcttgagagtttcagcctctaggacattttaatcatgtcactagaactcaaaggtccgagcttgtttagttgcttctaagctcatcgctgtgccggtgccgcggaacacatctttgctgattaactcgatttgatggatgcattataactggaccagacccaaaagcagacacaccagagaaacagtggacaagggtgccgggagctgaataaaggtacgcatccaagattcttggttgacaaatttgatgttgctaagaaagcatgtctcaattttctcgataagtttaaggcgtcagtcgttactggtgaacaactcttaggacaaagttgtataaaggattggctgatcagatgatggatattgttgtgaatgcaatgactcagttgatctttttatgtccaacggagacctccagaagcaccaatgcgttgtggggtcctatggcgcagtagcaatgggaagagaggcaggagaaggccaaatttgatatggggagaggtagtaaaaggagacttgaaacttgaaaggatggaatatattcaaatatttagccttaaataggactataggagtgcatacaccataggaaacagttatacatgtgcctgaatcttgacttgtgatttatgttgggtttcaactctaacctacctgaactttcttgtgactaaaagacactgttgttgatggtggtggataatgcacatgtgccatttatggtg

SEQ ID NO: 30063 - DNA, 503 bp, Zea Mays
tatgggacagggtaagcttgaacccggctattccatacgtgaaaagacaaccgtgcactgggcgtgggagatggtgggagtagcatgtaccctcctggctagaggctggacggaggagtattgtgctcccgggtagcgcggactggttcacgttgtggaggatctgtgggaacggttgacatatgcaaggattgagtgctacatatgtcttgtggttagggatccctagctgggtataatcggttcgaatcgtcgttgctcctcggtcatggagactctaccctccgaccactcatcgtaagtcatggatggaataacaatgagtaaaaatatggttgtattgattaatggaatgatgaatttagactagatgcaaacaaggtcaattaatacccaatttggcattaaaatgttgaaagtaaggactcacttttagaaagcttttctgcaaaatgtccaagttgattcttgctaaaagcctttctttgattcctaaatccagc

SEQ ID NO: 30064 - DNA, 996 bp, Zea Mays
cgcgctttctgtgttctgtcacggcccaactcctccccgcgccagggatcgtctgcctgactcgtaggccccgcctgtaagttcacgacgcgccgtcatctcgtcttctctttcaacttcgttcgcaagaagctcagaagtcagatcagaagccgccgaggggaggcgccgacgccgagtttttgctccatcccgcatccaccgccagaatgtttctcacgaggacggagtacgaccgcggggttaacaccttctcgccggaggggcggctgttccaggtcgagtacgccatcgaggccatcaagttgggatccactgcgatcgggttgaaaacaaaggatggtgttgtccttgctgttgagaaacgtgtgacctcgccactgctggaaccaagcagtgtggaaaaaatcatggaaattgatgagcacataggctgtgccatgagtgggcttattgctgatgctagaacactagtcgagcatgctcgtgttgaaactcagaatcataggttctcatacggggagccaatgaccgtagaatcttcaacacaagctatttgtgacttagctctgcgctttggcgaaggtgacgaagagtcaatgtcacggccatttggagtctctcttctaattgctggacatgatgagaatggacctagcctgtactacaccgacccatctggtactttttggcaatgcaacgcgaaggcaattggatctggctctgaaggagctgatagctccttgcaggagcagtacaacaaggagctggcccttgaggaggcggagaccatagccctttctattctgaagcaggttatggaggagaaggtgaccccaaacaacgtcgatattgccaaggttgctcccaagtaccacctctacacccctgccgaggtcgaagccgtgatcgcgaggctgtgaaacgctttcggagctcgtgttattcatgtcatcaatcgtggcagcggtggtgctggctatttcctgtgctttt

SEQ ID NO: 30065 - DNA, 4883 bp, Zea Mays
caaagatgtgctccattaaacttcatgcatccatgtttctcaaatcctccaagatgatgtcgccagtaataggcgcacccaaattaagcaccagtaataagtagtaccttagggtatgtataacactgagaaggtggaacaattttttaagtataagagacaataaaaaaattgtatgatataaacatgagcctctaaatcataaatgcagttaagagacaatgcgtatgcagaatcatgtagagatgggctcttcacgattttgtattttttaattaaccccttagatacaagaactcttatgaaatgaggttgtacacggcgccctagtctctcttctcttctcatctcactatctcagcgtgtgaatgtgtgaaatatgtgatcaaaaccagggtggcctctccctctcgctcgctcgctcctcactccccctataaaagccgccgcggcctcctcctcctccctccgcaagaatccagcgagccaacaaggcaacaacaaacacctccctccttcttcacttccctgccgttgttgcaggaagcaagcgagggcacacaaaccgacaaggccgcccacgcgcgcgtcggccgccgccgttgccgaccagcaggcaggcagcatggtcgtgaacaacaaggtggacagcctgtcgtacgacgtcgaggcgccgccgccctctgccgccggcgccgccgcggggcaagcgccaccgccggcgtcgccagctccggcgccggcaccggcaacccacgcgcccgtgacgcgggaaggcggcgcggcgtcggtgctggagctgcacaaggtgtcgctgccggagcggcggacgacggcgaaggcgctgcggcagcgcctggccgaggtgttcttcccggacgacccgctgcaccagttcaagaaccagtcgtcggcgcggcgcctcgtgctggcgctgcactacttcttccccatcttccagtgggggtccgcctacagcccgcgcctcctgcgctccgacctcgtcgccggcctcaccattgccagcctcgccatcccgcagggaatcagctacgccaagctcgccaacctgccgccaatcgttggcctatattccagcttcgtgccgccgctcatctacgcgctgctggggagctcgcgggacctggcggtggggccggtgtccatcgcgtcgctggtgatggggtccatgctccgggacgccgtgtcgccggacgagcagccgctcctctacctgcagctggccttcaccgccaccttcttcgccggcgtcttccaggcgtccctgggattcctcaggctgggcttcatcgtggacttcctgtccaaggcgacgctgacgggcttcatgggcggcgccgccgtcatcgtgtcgctgcagcagctcaagggcctgctcggcatctcccacttcacctcccacatgggattcctcgacgtcatgcgctccgtcgtcaaccgccacgacgaggtacgtgcgtgcccgtgctgctctgtgctctgtcgtcgcccgccggtgccggcaatgacagagcagcaatcctgtctgcgtctgcaatagaatttcccgtgacgctgacgccgacgatcgatgcatgcagtggaagtggcagacgatcgtcatgggctccgccttcctcgccatcctcctcctcacgcgccaaatcgtaagctcaacctcttcaccatgcaccggattccatttccatctgattattatcaccatccccatcaaagaacaaaggccatttttttataaaaaatttctgttgagattaaacaactacgaattactattagtcgtatcataagcaggagagaagttaaataaagctgaagaaaaacaatggccgcacatacaaaatgtggcgcggaccgtttgtgaaaccggggagaatctcacctctgtcactttttctcgttctcccatcagaaaagaattgccaaagcgcagatgcagcttgacagacccggttactcactcactcaccagtcggcaaaattctttacgacttctctgaccacggttggttggctagcttagcttctaggaaagaaagatggggctgcaaaacaaaaaaaaaaagtagaaggagatggcgattcaaaccctggggcgtgttcatcatggagggccccaaagtgtgcctgccactaacgaggaatttttgactccacagcttcatgggggggtgtttaagaaacgcctaacaattcatgggggtggttaagacttaagagccagctcctgcttcttgggacctagtaaaaagaaatgttttctataaccaaaaacaaaaaagcgtggctttggttcagagctacttgaatcgactaaacagttggtgtgcccaggaaagctgtcctcgcccaacagcaggtgcctaatcttcttccaaagctagtagctatcaatggactgaaacacatggcggcagaacagaaagtggtccctctttaaggttttgttgtttataaaaactgggagcggtttaaaagcaccattagtttcccttttgctttaatcctccaactgtcttcttcaagtgagtagtaagaactaagaaccaagcatatattgctgaagcacacatatattttgagacaaggcaacgctctgtttgagcagttgtagtcgtcttgtgtgagcttggcaagtagcaactgcatgtgtaggtagaatgttagagagcattcacatgactgaacgacatgggtcagatcagatggagtaagacgatgtgttcgtggctttagaatctgttctgacaagtggctatagcttcatcgctctttagctagcggcagataaaaatcgcttgagaacgacgccgctcctgctcacttggtatgatatggttaaaagcgtcagtctgagagattccactctgctggggcctgggcctggccggggccacgccggagaaatcttcagagatcaggagcgccaaaatctacatctcctttgttttttacacgattcttctgcaaagaaattccgggatctctagtttgacaagcgccaggaatccaaagcttttctgggtatcagcaggtgctcccctggcgtcggtgatcatctccaccatcctctccttcatctggaaatcccccagcatcagtgttatcggcatcctccccaggggagtgaaccctccttcggcgaacatgctcagcttcagcggctcctacgtggcgctgacgatcaaaaccgggatcatgacaggcatcctgtccttaacagaagggatcgcagtgggcaggacctttgcgtccatcaacaactaccaggtggacgggaacaaggagatgatggcgatcgggctgatgaacatggcgggctcctgcgcctcctgctacgtgacgacggggtccttctcccggtcggcggtgaactacagcgcgggctgcaggacggcgttgtccaacgtcgtgatggcggcggcggtgctggtgacgctgctgttcctcatgccgctgttccactacaccccgaacgtgatcctggcggcgatcatcatcacggcggtggtggggctggtggacgtgcgcggcgccgccaggctgtggaaggtggacaagctggacttcctggcgtgcgtggcggcgttcctcggcgtgctgctggtgtccgtgcagacgggcctgggcgtcgccgtcggcatctcgctcttcaaggtcctgctgcaggtcacccgccccaacgtcgtggtggagggcctcgtcccggggacgcagagctaccgcagcgtggcgcagtaccgcgaggccgtccgcgtgccgggcttcctcgtcgtcggcgtcgagtccgccgtctacttcgccaactccatgtacctggtggagcgggtcatgcgctacctccgcgacgaggaggagcgcgcgctcaagtccaaccacccctccatccgatgcgtcgtcctcgacatgggcgccgtcgcggcgatcgacaccagcggtctagacgcgctgtccgagctcaagaaagtcctggacaaaagaaacatcgaggtacagctgccgccgctggcgttggtgttgctgcaactcctgttcattcgtaacatgcatgcatgagctttggtgaatttttgcagctggtgcttgccaacccggtggggtcggtggcggagaggatgttcaactcggcggtgggcgagagcttcgggtcgggccgcctcttcttcagcgtagcggaggccgtcgcggcgggggcgtgcaaagcggcgcagccctgacgacgacgacaggctgatccctgaggtgccgcacgggagcatgcataggaataggatgggtcagagacagactaccggtgctgctagtggtagtagggcaggacgacgtacgaataacatggtgatggcctctcttcctccactccgatgcgatgcgagtgtgcgacgcaggggaggggagaagagtttttgaaggatgtgaccagttgctgttgtagttgttgtcaagtacgtagtaatgaaacgagaattgctgcgtggcaattcaggcctgttttttctttttgcatcaaggaaaaataagtgctggtacagatgagattattttaactagaaccaagttacttgccagtaaaataagaagcttccatataaacttgaaacaaaagaaaaaggagacacgattctcagttcaacctttatggattctggtttcttgtcgtcttcttttcttaatgcaaacttgtaacaagtatgttttgttagaaactattttgtgaatggggtttctagctgagttgcttaattagatggtctgagtagtattcctaagatcataaagatgctttaactgatttcaaaaaaaaaaatctcatttaacccacgacacaattacaagtctaagacttactgactaagtttgac

SEQ ID NO: 30066 - DNA, 1742 bp, Zea Mays
ccgagccggcccaggcctgctcgccgaggacgagatgctccgcgcttccttatcaacacgggccgctcgctctccttctaccagcctgctccggtcctcttggagttgggcctgcccacctcccggccggtccgccgcgcggttccagtttcgcctctcgtcgccggtcctggcgagccccgcctccttgatctccgaccagcagcttccccactgcccactccccagccccggacgtgcccttcgccggtgctgtcatggcgttcggccgacggagccccggatcctcgcggcaccctcccgcgctcaccatcgtcacggcgctactcctcgcctccctctacttcgccgccgcggcggcggctctatcgcccaccgacgcgatgcacaacaacaactgggccgtgctcgtgtgtacctcccgcttctggtttaattatcgacacatggcgaatacattgtccctatacaggactgttaagagattaggaatacctgatgagcgaatcatacttatgttggcggacgatatggcctgtaacccaaggaacagctatcctgcccaagttttcaataatgagaaccaccagctaaatctctatggtgacaatgttgaggtcgattatcgagggtatgaggtgacagttgaaaatttcttgagagttttgactggccgacatgaaagtgctgtaccaagatcgaagcgtcttcttagtgatgaaggaagtcatatacttttgtacatgactggacatggtggtgatgaatttttgaagttccaagattctgaagagcttcagagccatgacttagcagatgctgtgaagcaaatgaaggagaagcatagatttaaagagctgctgataatggtagatacctgccaagctgctactctcttttcacagcttcagtcacctggtgttttggcgattggtagtagcatgaagggtgaaaactcttattctcaccatcttgattcagatgtaggtgtttctgttgtggataggtttacctattatacacttgctttctttgagaaactgaacatgtatagcaatgcctcactgaacagccttttcacctcatacaatccttccatgctgttgtctactgcatattatcgaatggatctttatgaacgtcccttaaatgaggtgcctgtgacaaatttttttggatcagtcatgaagactctccacactgattcagcctacacaggtttcttggctgcgcatgacaatgaaactccaatgtccacgggagataaccttgatgatcatttcatgttaaagggcagggctatcgcacgaagatcaaccatagaaaaggaggcacaattaacaccgcatggatggactgaagttctggctgaacagctggagggaaagaatactgatactgttgtgatgtatggtctgggagctatgggtatactgttggcactttcaacctggttatcaatgtaggcaccaaaaaagtgtggttcgtagtctcttacgctatccatctctggtccgcgtgcgagagagagaaaagagataatatgtttgggaggtcttttagattttttctcttggtttttaaattcattaacgatgattagagttctttagaaaatgctgtatgtagttctttagggattactgtgttatcgttttatttatttaacatgatcttttgggaaagacttgtgcatatggaagtttggttatcttgatagccatttgagtatcttgtctccg

SEQ ID NO: 30067 - DNA, 1345 bp, Zea Mays
tcctttaactcctacacgttagagattatgaatgccagccaacccaatgggcttgtcgttcctgatgcaacggtgcatcctgttaattcaacatccgatgttattgagttaatgagaataggacatgcaaacagagcagtgggttcgacaatgttgaatgaaagaagcagcagatctcacaggtttattttcattattgttaccatacacattcgaggtgtagatttgaaaacaggagctactctgtgtggtgcactacatcttgttgatcttgctgggagtgagagagtggaccgatcttctgttacaggcaatagacttaaagaagcacaacacataaacaaatctttgtccgctcttggagacgtcatattttctctaccgcagaagaatgctcatgtaccctaccggaacagcaaacttacacaagtcctacagagttctttgggcggccatgcaaaaaccttgatgtttgtgcagatcaacccagatgtctcatcttattcggagactttaagtactttgaagtttgctgaaagggtttctggagtggagctaggtgcctcaaaggcgaataaagaaggcaaagatattagagaatttatggaacagctctcactgctcaaacataaaatggcaaagaaagatgacgaaattaacagattacaacaactcaagacgcaaactccaagggtcaggactgcaaaacgtgcagattccccattgaaacattcgtcgtcgtccccaggcatatctaatttaggaagcaaaatccaacatagaaggacagtatcaagtggaaaggcaatgagcattgccagtagagctgggtctgataccttctctgacaccagtgacaggcactctgaatctggttctatgcagtctgttgatgatatcctaccacgtagggggattatgggtcttccgaagctctctattggtgaaatgggtcagaattctgctgaccctgagcttgtttgctttgactatgctgattcagaagagagattaagtgatatatcagatagtggtctttccatgggtacagagacggatgtttcagtaagcagtatagttgagttgacacgttttcaggagcaggaaaacatacctagcactctgaaagaacaagagagtgcacgaaaaattccaaatgatcagttgtccaaggtggccacccgagttcagaagacaacagtacccaaactagctcaaacttccttgtggcctaaactaagagatcctccagcccttagatccccagctacaaagctggtcgatgcttcgagggtgacgattggtgctgcaacgaaagactcaactatctcatagtcgtccacgt

SEQ ID NO: 30068 - DNA, 1540 bp, Zea Mays
atagaccccgcgcatggacggcctccatccactccgcccagcacccgcacctcgtcagtcgtcaccgagaagcagaagcagcagctgctgcctgctggtcgttcgttcgcctcgttctctccgcctccccccaccccccgcctcgcttcctcctccgcgcttccttcgccgaggcgtcagcgtcagcgagggcgtataaagcgctccccctccgcgcgcgtccgcacaatcgccaccgcctctccgctcctcgacaagaccaatggcggctgctgcgtcctccgctctgcacgccgttggcgccgtcgcctccgccaagcctagatccgtcgcccccgcggtggcgacgaggaggagcgtgcgcgtggcgcccgcggccaagcgaggaccaggctcgggaggaggcaggctcgtggctcgcagcgccgttgcagccaaggcggatgaggcggccgcggcggcgggatccaagtcaggcggccatgagttgctgatgtttgaggcccttcgtgaagccttgatagaagagatgaatttggatccaacagtgtgcgtcatgggtgaagatgttggtcattatggaggttcatacaaggtgaccaaagggttggctgagatgttcggagatctccgggtccttgatacccctatcgccgagaactccttcactggcatgggagttggagcagcaatgaaggggctgaggcctgttgtggaaggcatgaacatgggtttccttctccttgcctacaaccagatctcgaacaaccaggtgagcacgtgaccatcctcacgtactcccgcatgaggtaccacgtgatgcaggctgccaagacgctggtgaacaaggggtacgaccccgaggtcatcgacatcaggtcgctgaagccgttcgacctgcacacgatcgggaactcgatcaagaagacccaccgcgtgctgatcgtggaggagtgcatgcggacgggcggcatcggcgccagcctgcggtcggccatcatcgacaacttctgggactacctggacgcccccatcatgtgcctgtcgtcgcaggacgtgccgaccccgtacgccgcgacgctggaggacgccaccgtggtgcagcccgcgcagatcgtggccgccgtcgagcagatctgccaatgatcagtgatatcatggctttgttgagtacctgatctgtggagtcagattaccgtggttttgtttctctgtcgcatcgcgactgtcaccgtgccttagacaagacatgtttttgtattttgcaacgcagaagccatactcgtactggatgccgtttgtgggtggcctatttgttcattgtgcaaagttggatgccatactcgtacactattattatcaggtttcagcattcgtttgtactttgtagcagcgccgtgttgcgctgtcggcatgacgttgaattcactcctgcacctgaattttgttggttatattttagattttttaattattcctctatgtactagttctacggagagacaaaaaacccactcgggcattgtattttggtcgtccc

SEQ ID NO: 30069 - DNA, 1242 bp, Zea Mays
tagaaatagaaattatggtaacaccctaatacattccctcgctcgcggccttgtacagcatactgtccttgcggcgctgctggctccgccgggtgttgggtcaacgttctcccgtccccccgagcgcagtctcgcgtggttctcccgtcccccgaggcccgagcgtagtctctctcttttgccgtggttctccagtcctccctcatccgctctctttctttctctcgtggcgagtggtaacgacgtcaggtgctcaggtcttgttcaggcccttcgccggcgacgagcacacagcaaatggatacaggagctcaagctatgttcatcatcagtcttgtgctctggtgtactacaagctttgccttggatgatgctgctgctacaaggattccaattgtgggcacattacctctgtcaatgaaagaaaatccgcaattatgccaactttgtgaggagtttgcatcagaggccctcttctatttaaatgaaaatgagacccagactgaaatcattgatacactacaccaagcttgttcaaagtttggctcttttaagctggagtgcacgaggttggtggattattatgtccctcttttcttcacaaaaattgcttcattaagccctgaagaattttgtgcatcagcaagtttttgtgggggggtaacattcattcgtcttccaagacatgaagatacttgcaccctttgccatgaggttgtcgatgagcttaagataattgagatacttctgaaaggatgcaataatgcagaggattatgtacaaaagtgcaagaggttgataatccaaaatgcacctatcataatggagaatattaagaagttcctcgagaagagagatttttgcaattctatccatgtctgtggaagtaaatccgttcgcgctggatcacaagtcctcagaagcctttcttcagcctgaagccctgaacttgcacggattgttatgatcatgcaacagatattagtgtaaaaacaagtccaggcgccgctatgtgagtcccgtgtgacatcgactgtacagatttggctgtgtacatgttaaaggaaaacacaactgaggcacaaacctcttctgtttacgggtcatgagcagggtgtgtatttgaactgtatatcattataccttggattggatgtcatgttgctctatatttatacgtaaccgagttttgtaactttggagaagtaatgtatatgatgccaaagcttgatcttccatgaa

SEQ ID NO: 30070 - DNA, 1509 bp, Zea Mays
cccgagcccccgaagccaagagcattgcgaatgcgaacccgcgacaagcttattgctcctttcggtccttcccctgcgcgccgcgagtgaattccgctaccccaatcaatccgacgccagagagagagtggcgactggcgacgcggtccggtccccccaattcccaacggccggcggcgcgacaccccgatccggatcccatcgcctgccgggagcctcgattcgggcggcggggacgacgattcgaccgcgtcggtaaccaggcaggggaaaggaggggatgagcttccaggacctggaggcgggccacgtccggggggcgccgcccggcggcggccggaggagcggccgggcggggggcgccggcgccggcgccggcgcgtcgcaggccgtggcgtcgggcgtcttccagatcaacaccgccgtcgccacgttccagcgccttgtcaacacgctcggcacgcccaaggacacccccgacctccgcgacaggatacataaaacacggcaacacataacacagctagtgaaggatacatcagacaagcttaaacaagccagcgaggcggatcatcgcgttgaagtcagcgctaccaagaagattgctgatgcaaagctagctaaagatttccaagcagtcctaaaagaattccagaaagcccaacgattagcagcagagagagaagctgcatatgcaccttttatttctcaagcgggcttgccacagagctacaactcaagtgaagtgaataatggtgctgataggttggcagagcagcgcacacagcttctagaatctagaaggcaggagttggtcttcttggataatgaaatcgtgttcaatgaggccatcattgaggagagggatcagggaatacaagagattcagcaccaaatcactgaagtaaatgaaatcttcaaagatctcgctgtgctagtccatgatcaaggagcaatgatagatgacattgattcccatatagagaacgccgttgtagcgacttcgcaggctaaaggccagctttcaaaggctgctaaaactcagaagtcgaactcttctctgatgcttgttgctcgttattttcggagtggtcctgctcatagtgataatagtacttgcagcctaaaagcttggaaggcagctggggttccgaaatctgatcgagagcttattgcgacaaattccttcataagttatttttgctgtgctgctaggaatgattcctggtacccaggcggtgattggcgctctgcttgtggtgtggcggtatatgtggtgatgatgaaatctgatacataaaagtactctttcctgcaagtgtagtgcctcatgcacgtttttgtttatatattgtgatgtatgagtgcgtgctgtagaacaaggttggattatccgtggcatgaagtttctcgatctcatgagaaacgcttttctatatttcatctcgcactacgcttctctatcagtatccgccaggtctatcattgtcttctgcttgcttattatgt

SEQ ID NO: 30071 - DNA, 717 bp, Zea Mays
cgggtgagcctggcccgtgctcgcctggtaaaagtgctagggttcttctcgcccatcgcagccgccgccgcggctctcgcctcttgactcgctctcgcctctcggagcaaaagctgtgtccgctcctcctggtgatcccggagccagtcctcgccgcaccgcgctgtgtctgctcctcctggtgatcccgcaccgtgctgtgtccgctccatcttcctccgccgccacactcagcgccggtgcgagggcatgtctacctacccgaggacctacgatctcatccatgcggactcggtgttcaccctgtacaggaacagggagaagatcctcctggttgtcaagacgtattggactacccatgaggccatgaccaagatcagtagcaggactgtcaaatctattaatgatatgaaagaacactgcttctggtcccaaattatggagagaaagggtccaacagtcgagacgcctgaatggtgccaggaatgaattggtaatgtacaaacacatttgacaggacagtaggccatgtaaacaggtctctggtctctattaaaatcatagtttctgtttaattacaatcgtagttctgttttttgttatccatattttaagttgctgctatagttcatatgattgtaatcgaaatgattgtaattagttcaatgagagaaattactagcaagaggatcaatttaattcagattattgtaaatc

SEQ ID NO: 30072 - DNA, 1311 bp, Zea Mays
atggcgtatggttcttctcgcttccttatttttttctctctctctaaaatccatatcaaatgggctcaagttgggcccactgacctaggccaggccaggcccaacccaacgtttccagtgtctcaaaaaccaaccggacgacgacccggcggtcctcacccagtcgtcacccccacggacccttctcaagaaccacttccgccattgcctgcttcgtgcttcttcccaatggcgggtatcgccggcgacgatcccttcggtttcgactccgactccgactccggggacgacggcccggtctgctacgacccattcgaagactgtgatggcgacggggacgaggacgaggacgcgggacttgtcggcggccactttgcgctcagctacgggggcggcgggcagtatcgcatctcagatttcgctttccgcggcggcgaaggagacggaggcgacgtcctcgtgggccagcgccagggacccctgtcctcccacgacgaacccattctcgaaaccctaggccgctcattcgactccgacggaggtctcagccaattctacccccacctctttcctgcatcgcaactcgtcgaggacacctccggggaggaggaggaggaggaggagatgatttcccgaaatgctctgggcggcgtagggtccgaattcgagcggggagcggtcgatgaggagactgccgacgacgacgaggacgggatcgtgctcatgctgaacgggtttaccctcgattcggggccgcctgttggtggcttccagggcccggtggacgccgttgaggaggccaccagcgacgacgatgtgggcgaggtgggtgggctcatgctcagcgggttcgacctccgagcgccagcgccacacgccacgcggcccttccgaatggtggtgggcggcgaggacaccgactccgacgacgccgacctcaacctcgtcgacgctctcgcgcgccgcgtcagggaggctacacggcggctgccggcatcccgtgcggtggtggacggcttaccggaggttgcgctcagcgaccaggaggcctcgcacggctgcgctgtgtgcaaggatgccgttgtggcggggcagagtgtccttaggctcccctgcaaccactacttccatggggagtgcatccgcccgtggcttgccatcaggaacacctgtcctgtctgccggttccagctcccaacgggtgacgctgctgagtatgattcgccacggagcacgactggtggtgttgttgtgtctgtgccgcaacaacacagcgcaccagcacagcatcggggtagatctcaagatttt

SEQ ID NO: 30073 - DNA, 2038 bp, Zea Mays
aggcgcgacgccagcacgagccacccaagtcagagacagaaatcaccaagtgtctctctacttctctaccttgcctagccaaaatctactgccgaccaccaccgcggcaggcacacggagcaccctccactccaccgaccaataccagcggcagtaaattccgaggccgagcagccgctgccgagcctcgaggctcccttctcgcttccttcacccgcctactcctcctagggtttcctcccgcctcgctggcgtgccgcctcccctcgccattgccgcggggcgttccgccgctcgtgggacccgcatcgagactcgagagctgttcgtgctgattcccgcggagccttgtggctgcgactctgcggcgtcgggtggagaggttttgacgcccgtgggggtttggatcgagggcccggagctgtgtctccgcaatgccgggctggtctggcggcgattgctagggttttctggtcggatttcggtggaagagctgaggttttgcttcgagtgcgggagctgcctgcaaccccccccccccccccccccccccccctggcccgagctcggtgtttccgcagcaatgcctagccgattttagctcgctctggggttccgaagggcgaaggggctgtcgggcggttcgagattgcaaggagtcggtggctcggcccaatgtccggggcaagcgcgagggggcggctgtcgccagcgtccggcggcgccggggactccgaaccgcggtccgcggggggcaggacgcgctcggtgtccgctacccgcggccggaagccctcgccgaggcccgggagggatgccgccgcggcggcaggggcgacagaggagaggaaacccgccgccgtgcccacattgctgccctcgctcagcgcgcccgcggggatgcgtcggcaggagctgctgctgcgctcgggtctgtctctcgacgcgtcctgctcctcggacgcgtccacggactcgttctgcagccgagcatccacaggccggattgggaggccggcgtttggggctaggaagaagaagaccctctctcagactgattacaagcctgtttccatgctggaaagggagggtggattggcttatcagaccgatgctgctggtgtcaagaggaggtgcgcatgggtgacagcaaatactgatccttgttattctgcatttcacgatgaagagtggggagttcctgttcacgatgacaggaagttatttgagctgctagtactgtcaggggcattagctgaactgacatggccagcaattctgaataagagagacatattcagggaagttttcatggattttgacccagtatcagtctcaaaattaagtgagaagaagattatcgcacctggaagccctagcagttccttgttatccgaacagaaactgcgcggtgttattgaaaacgcacgccaaatactcaaggtactcccgtcaagtgcctgtcaaaacatcgaaagcagacgccataagcaaagacctggtccgaaggggtttccgcagcgtcggcccaacggtcgtttataccttcatgcaagtctctggcatgactaacgaccaccttatctcctgctaccgttttgctgaatgcgtggcctcctctgctggtgccgctaaacttaccgatggaagcctagcagatgcaagtgatagcaaccacgccacggcggagcagaaggtgaacgggacgaatgacattgaactgtccagggctatagacgagctcagcatttcatagcggttaggagggggtgctgaagcgagacggtgttagcttgtgtattttgtgtgctgtagtggagggtgtgatttggtgtcttttttctatagtttttaccactcgtcgatgtagggtagaacaatctttagtctttggcttgccaggaccattgagcgacagcagtgtaatgatgtatattctttgtgatgcgagtgcacctgttttcctgcatttcagttgagctggcttttcgccagtgtcgtcaatgctgtccctcttttccgcatctgagaagtgtcg

SEQ ID NO: 30074 - DNA, 2925 bp, Zea Mays
ccatgagccccatcagttcgctgttcatgcatctccaccccaccacaacctccgccccaccccaccccactgctgcagctttttaaggacaaaccaaatccgctgcccctgccctgcatcgcagttcgctgcaacttttgctcacaggacacaggcacagctttgatgagcagcggccaaaacagaaagagcgattcgatcgtttcctgctccactaccactagctagtctgccgccgcacgccgtgccgcgcgagctacgactgccggcgccggaggcaggagaggaaggtgctgctgctccccctgccgcccgcgtcctgtgactgagatccatccagctcggaggaggaggaagaggaggcgctcctggtcctggcttctagacgttgtaacccagatcttgacgcagctgcccaagtagtttactcatctagaggagaggaggggttggatccttgacccgatttggtgggggctttgccactgggatagggggacagtttggcctgctggatctttatcgccagttgttggtcctgtcctttccgttgggctgggacgcattcacatgccagtggctgccggtttggtacttactcgacggattggttaagctctgtctgtggggttgttgtgctgctccttctttcatcttattttgtggtgattggtgggcggaggaggaagagctaggaagattgtctctcttattcttcttgcgtcatttttcggtgcggcaagatgaagtatatgaagcttggatcaaagcctgatgtctttcagacagagggcagcaatatcaggtttgttgcaacagaactggcaacagacattgttatatccgttggggatgccaagttttatcttcataagttccctcttctatcaaagagttcactcctgcaaaggttagttgcttcaagcaatgatgagaaaaatgatgaagtggatatctctgacatccctggtggaccttcagcatttgaaatatgtgctaagttctgctatggcgtgattgtaacactcaatgcatataacgtcctcgctgcccgctgtgcagctgagtacctagaaatgtttgagagcatcgacaaaggaaacctcatatacaagatcgatgtgtttctgacatcaagcgtatttcgcacctggaaggactcgatcatagttttacagagcacaaagtcactgcaaccttggtgtgaaaatctgaaggaagcaacctatggtccctagtgactggtgggttgaggacctttgtgagctcgaagtggatttgtacaagcgtgtgatcatgaccatcaaggcaaagggaagcacaccagctgctgtcattggagaagcattgagggcctacgcataccgacggctgcttggctcccttgaagatgctgtgagcaatggagtcgattgcacaaaacgccgtgcagctcttgatgccattgtatttctgttgccagctgaggaaggctcggtgtcatgtggttttcttcttaagctgctaggggctgcatgtttgcttgaatctggggagtcccatcgcgttaacttgatcaagagaataggcacgcagttggatggtgcttcagttccagaccttcttataccgctaaatactaatgaagacaatatatccagcatagatctgatcatggcaatagtggaagagttcatgtcacggaatggtgatagtggtacggagaaatttcaagacgatgaaggaatcgtggacatcgagaagtcgacatctgtttccagcgcgtcaaagcttgcagttgcaaagctgatcgatggatatcttgccgagatcgccaaagatcccaaccttcctcttccaaagttgatcgcactcgccgaaatggtgtcttctctaccccggccaacgcatgacgggctctatcgtgccattgacatgtatctgaaggagcaccccagcctatcaaagagcgagaagaagaaactgtgcgggctgatggactgcaagcagctgtcgcaggacgcgtgcatgcacgccgtgcagaacgagcgtctccccctacgcgtggtcgtgcaggttctcttcttcgagcaagtccgggcatcgtcgtcggttgcttctgcaaggagcgacgctaattcgacgtcggggctcccgtctgccgttcgctcgcttcttcccagagagaacggcaactccattggcagctccaggtcagccgcgacgacgatgacgacggaggaagaggagagtggggtcccgacgtcgagcgacatcaactctctgaggtcgatgaggctggccaacaacagcggtgggagcgagaggagcagcggcagcagtgacgtgaacaacaagagcagcgacgacaggagcgccgccgccacggggaaggcgaaggggacgatgctgatgccgaagaagatgctgagcaagctctggtccgggaaaacgaacgccggcgagagcagcagctcggacacgtcggatagccctgggtccgccaacccggaggaggcgaagtccacgcagtcgcggatcacatggcgctcggtatcctagtcgcgcgcgcgcggcgggggttcagcggggtcacaagctcacagccttagttttgttcttggtcttgattttgccttcgcctagcgagtacagcagtagcgatctcataacatatggagttactgctactggtttcacttgtcatgtcgccgatgacgttttctttttggcatgggattgcttgtagctggagtggagtaggtttggtcattggtgatgtttccagcgaagttccatgggatatttattatgtgacctttttttcatggtaggaatacaaagaaagtagtacagtccgttataattgatgtattttttgcaggcaaaaataatcatagtgttttagtttgcttcttactgctatataacatccgttatacctat

SEQ ID NO: 30075 - DNA, 2468 bp, Zea Mays
ccacgactgaaaaaattctggaaatcgaaacccaccctcgagcgacgccaagcggccaagacggagaggagaacaattggggacggggaaagtccagggggaagccacggccaccggcgcgatgaaaccgtcgctttcgaagaagaagggcaagaagaagaagaagtcctcgctgccggccgccgcaccggcccctccgccggcggagggcgctgcggatacggaggcatgtcccccgctgcccggaaccataaccctaaccgctgccaccgctgctgcggcggtggtttcggagacggagtccagcagcagcggcgaggcctcgacgtgcccatccgcctgcttcaccgcaagctcgtctgggaccgcgtcctcgcactccttctctgccttgtcctcgtcggcgtccacagcttcgtcgtcggccgccggcgaggagcggcgggacctcacctggctgctcgacgcattcgccagcgccaccttcgaccagatcgactccgcctaccgcgaggccggaggggaccctttcgtggccgccggtatcctgtcctccacgcaggacactcacccgccgcagcccccgcagccggcgccgcagcccccgccgccaccagacctctcgccgcgcagtggatctggtggaaggaaggctggtcggaggcccaagcgggttgccgtggccgctacgggcatggtcgcggacgtgattggcaaggagtacacgcgacccgcggctaattctgtagtaagcatgccaaatgcttggaagggtcgggacggggagagcgatggcagcgggtctggtggccgcaaggacagtgttgaagaggcagagcagttcctgtgctccatgctcggggataattccgagcttggcatgggtgttgtcagagacgtgctagcgtcaatgtatcaatgggcaaggcaaagatgatggattggtggctatgggcgagaggtcctttagtcatggacatttgcatgattggattttcagttagtcatgtgaaaggacttgcaaggttcagagaaagtaaagtatggccaaggtccagttgcaccagccagtatgggtacgatgttgagaaggctttggatgcattgcttgatatatctggtgtgtcttcagttgaaaacatggaaacaaaccatcaaagtgccagaaggaatgacacatgtcatctagatatgttttctggaaatgggctatcagtggagaatctgactgcagggaatagaagaagtctacgccagttgacagatgagatatccaacactgggctccagtctgaattaggacacgagtttttatggggtgaacctcagatcagctatgcggaggctgttaaggaggcaccacgctcatcaacattgccgtcaagatcaactgtaatgaaagctggtccacaacaagtcctggattcactgtttaaaattcctgaaacacgcacgtatgagccaagttctatggactggaaaaaggtagtaaagaaactgcaaacaatcaattataccgctgcatcaaacaatcacgaaaggcctaaggatgggggtggctatcgtgagctccgtggtgttgctgcaaggcattacgataaaatgaaagaatactatcagaaagctgcctttgcatattcgaagggtgacaggtcatatgcttcttaccttgctgaggaggggaaacattatcgagaactaggtcgcatagaagacgagaaggccagcaggaatatatttgaagccagaaataagcatataacgaacacagtaaccatcgacttgcatggccaacatgtccaacatgctatgaaccttctcaaaattcacatgatgatttgtatttgcattccatctgtcttactgagggtaattaccggttgtggttcagaaggtacagggaagggaaaaataaagcgctcggttatagagcttgcggagaaggaacatattgagtggcgcgaagagaactctggaactgtagcccttcgacttggtgggccaagagagtatcggttccttgagcatgaaagcgattctgacctagtggggaactttaacatagattaacttctgatctaatctatgtattcccgtatttatgtgttatagctatggatgctgcctaggttgcgatgtaggctgtagttctgacacagaagctcggtattgtagttgggtaaattatggtgtaatgttgaccccaggctgctaactgtgcaatcacagaagctctgactgtacaaccgtagcccttctgtgagcaatgcaacacaggaaccgtaatcatcgtgagttgaagaatatcatactatggccgattgccacgggaaccaattttggcctgtaccaactggaacttacgatttgtatgaaaatatattcaacacttaggccacaaatattacttatcatgttcaactgaatacttttgaaatgtactaatattataatgtgttataaagtat

SEQ ID NO: 30076 - DNA, 2059 bp, Zea Mays
aaccaactcagctaaagaccctttcacagtaagttattagttattatgctagctattacattttggcattagacaaaggaaatgaagcttgagaacgtgctcgtagcatggtgttatgccctccaggtgtgaggctgtcaaccagggcccaaaccctgagttctcatacggaaaaaagcccattactttccgttccccatggttgtgtcacagttgctaaagcgatagcctgcaggtagtagccagctttcaggatcttttcttgatgttatgtgcaacgtcatgagaacttctctcccctggggctgagtttcttcaatgaaatggaccttatgttggttgtagtgcaaactttttttccctggcctctgagattccatcaccatctttattccaaatgaaccaacttgtgatagccacttataaattgactgattaacaagcatgacaagatcgaaaggcagagctccactttgttaaaaaaaggcatgacaaacatggtaaccaaggaatccacagtttttttacaaaatgaactacatgaatgtatgtgactcctaaccatgttcttttggagagattcttaaaatgtgtacatagacacgagctgttatttcttagacctttttttgttgctagagcattttacacatgcatgtaggcatgtacagataaaacttgggggatgtaactacattttattttttgttgcagagagtataatgatattacatagtgaattaaagcgccagaggaagctcgtgaaaaatctgaagaagaaatccttgtggtctaggaccttggaagagattgtggagaaacttgtggacatcgtaatatttttgcacaaacaaatccgagattcatttaacgaaactggaactgacttctgcgcttccgagcaaactcagaacaaaaggctaggttcctgtggtctggcgctacattacgctaacattatcaaccaaattgaaaatatagtttcccggcccctctctcttcctcctagtgcaagggacaatctgtaccatggtctcccaataacagtgaagtcagctctgcgatcacgattgcaaacatataaccccgaagaagagcgcacggtagctcaaataaaagccgaaatgcagaaaactcttcgctggcttctgccgatagcagagaatacaataagggcacaccaaggttttggatgggtcggcgagtgggcaaatcttgggagcgacatgagcaagaaatcaggctcccagcacagcgtcacccgcatccagacgctccatcacgccgacaaggcgaaaaccgagcactacatgctggagctggtggcgctcctccaccacctggtgatccaggtgaagaacagaggctacgggaccagcaaatcgtcgaggcacgacgcgtcgtcccggtcccgcaaggcggcggcaacggacctccgaccggagacggagactcggcacaacacgtcgccggtgaacagccgcacggcctcgagcccgctgtcggactgcgagcgcgcggcgctggaccacctgagcttcaggaggacggcctacggcaggagccagagctgcgagcctccgcctggccaccgacggagcaaggcccacaggagctgggacccgtgccggagccacggcagctccccggcgacggagttcggcaggacccccgccgtgcagcagcgcggccggggcagggatcttgacgtaattgatggcctagatagactgccttcctactcgcacccgccctcccctacgttttgctagatgttaatggttaggtattcttttgctgtaactgtaacacgcgtgatatgtccatatgtacatataccatagtcttgttatagcgtgtggtgattgaatcaaagtatatagagcgagatcacaagtggtgttccgatcatctggcctttggagagaaaaaaaatatcgatttgtctgaattctttttttcttcttctgaatttaacgaccaaatgatttgaacattgtaagttttcttcttcttctttctgttcagctttgttaggaagatacttggattgtcgaag

SEQ ID NO: 30077 - DNA, 1347 bp, Zea Mays
ctcatgcattacccaggattgctatgagttaacgagtttcttaactgtctcgtagatgctagaaacgagctgctgcagaggtacgagaatgtacaaagaagcttcaaaataaagaaggcgatgctatcgaaccatcgaaactataggacttcatacgaccgcctctttgaacaggtacgtagattggaaaccgaaagcgatagcctaaagaaagacgccgccatctacaactttgtgcaagagcgtcttcagaagtcagcgccatacaaaatgatcatggagctgagtgcaatggagctggaggctcaagaaatatcgttcgaggagctcctggctcgggagaaggaggacaccgccttctggcagcgcaacgggaagatgagatcagtctcgtccaagtaggacacaatgcccctgctacttgggctcactgacgatagcagacctcaacatcggtagtgtctaggcatgaaacccttgagagcagctgctgtatgcctgcatcgaaccgtttggtgtaacgccgcggccttctgtcaagatcctggcctgattctgggcagattgagttgtgtcgtgatacatgccggccctgagggttctgtaccagcgagtgcgggcatagggctgttttgatcgtgtggccatggacctcctgacccagccgcagcgccagcaattctgtgcaagctgaaagaactgtcgctaatatcaccacgttcggcaaaacccaccgttgctgcatttgtctgaacagctgcagtgctcgctctatgtcccgtgatgacgcgaactcgacaatgatgacgtccagctcacgacactgggcgcatgcctccacactgttccatcactgtttattgagtgaaaatagaaggtgaaataaaagatgagctagaagaggtgctgaagacagactaacagattggttggtcgacggcggaggagacgcagatcagctaaattctacatcaatgacctaatcggctaatcccaacttcgtttttccacatgtttggaaacttctctgtgaaacaaaatttaacacccaaggagggttgatgggattggaaaaaaataggaaagatttcgacttatttggtattgaaactcatccaatccacatggatcgagagtaaaacgaaaatgcctttaagtggacaaataatcggattatcatagaactacagatagaccgtagaccagaacgaacacagcaagatcagcgatgtgagtctcagaccacagctaattgtcgctagtctagaggcacagtaacagaacaagtcatttcacagttggatgtttgtatacaatgcaatctgaccgtccagtttttctgtctac

SEQ ID NO: 30078 - DNA, 2137 bp, Zea Mays
atgcgtggccccacacggccacacaaccgttgggcgcgccggtccttaaaatgcccccgcacctgtccaccgccgtgagcacacatccgtccagccgtccacccactcaccaggaccggtcaacgctacgatacctgtgcactgcgcagcccccgccgctgcactagccgttgcttctcccttccgttcgcgttcccattcccaaggagttgtcctcgccggcggatccggggcgccgtcgcaagacgaggaaggcggaggagaggataccagaatggcgtcgcgaacggcgtccaaggatatcatcgctctgcgaggctccgccgccatcgtcagcgagttcttcggctacgcggcgaacagcatcctctacaaccgcgccgtgtacccgggggagagcttcgccaaggtgaagaagtacgggctcaccatgccgctcacgcaggacgagtgggttaacttcatcactagcgccacctccaagaactcaggaaagctgcaggggatcgtgatggtcataatgagcaaggccaccagcgaggtgatcgagcgctggaacttcaacatcgacacctaccccgaggtcgtcgagaaggggtctatcaaggagaagagcgacaaaaagatcatgagggagattcgggccatcaagcgccagatcgactcttgcatcaccgacctcccctgcctcgacgagccatgcgtgtttgatatgctggcctacacggacacggacgttgacgctccggacacctggatcgaaagcgacaccaagctcatccacaacacgcagatggttaagctgcactcgttcgacacgaaggtccacaaggtcgacacggtggtgtcgtacaagaagaatgaggacgacacctcttcgtcgtcaagctcagtaataagagaagcaagaatagagcttcttgaagctgaacttggaagatttgtgatgcttgctaatgagtcagctgaagagatgtatacaagattgaaaaaaatcatcaagaaaattagaagctatggaagtaagaaatggacagatcatgaagtggtgaaaataatgctaagggcttattttctaagaaactcggtattatgttttatgataagagatagtcctaattatgagaagatgacgccagaagtagtacttggtagatttatccgtcatgaaatgatggaaaatgaagggcttcttgaagctgaacttggaagatttgtgatgcttgctgatgagtcagctgaagagatgtacacaagattgaaaaaaatcatcaacaaacttagaagctatggaagtaagagatggacagatcatgaagtggtgaaaataatgctaagggcttattttctaagaaactcggtattatgttttttgataagacaaagtcctaactatgagaagatgacgccggaagtagtacttagcaaatttatcgatcatgaaacgttgttagaagaagccaaatatgttgatatcatgtccaaaagtgtcactgcatcaaagaatcaagacattgcactcaaggcaaacaagaagcaaaaggggaaatgtgtttttgaagaatcaacaagtgaagataatgaagatagttcaagtcttgatgaagaaaaaatagcactcatcaaaagcttcaaaaagataatgaagagccgcaactacaagagcaacaaaaagaatgacaaagaataaaagaaggaagaaaaaagagctatgtcaagaatagacatagtggtggagctcacattagaaagtaatgacacttgaatggtgagagtttcgactcctccaaaattgaagaacattggccttgtggcaaaatttggtacaaagaaagtaaaatttggtaggacatatcaagttcctctcataaatatacatctagtactgattatgatgcctctagtagtagtagttctagtgatgatgatcagttaacatgtgtcttaccttaataaaaaatactatttctaaatttgaaaagatatgatggaattaaataatatatatgagcttgtggagacgcaagaagatttgcttattcaagaaaagaaaaagaatctaaaacttgaaaagctcttagctcaaaaaagaaaagcgcaatataaataaagagctccttagttcttatcattaatt

SEQ ID NO: 30079 - DNA, 1204 bp, Zea Mays
gccaatcatccctatgttgtcggtcttcacattgtttcccatgtctgggtatctgacagcatagtgaggggcatgtgcagcactaccatctattttgatgccccaatgtgtcttaatttgtttcaaagcatgaaatatatcccaaagttaatcttgtagccactgtttattggtgctataatgggtgcaagagatttaaatatacagacagaacatggacatcttggcatgcccagtaatatttgctgcgttgttgttgagtacctccctggaggtgcactgaaaagttttctgataaagaacaggagaaggaagcttgcctttaaagttgtggtccaaatagctcttgacattgccaggggattatgctatctccactcagagaagatagtgcatcgtgatgtcaagactgaaaatatgcttctggacaaaacgagaactgtaaaaattgctgattttggtgttgcccgagttgaggcttcaaaccctagcgatatgacgggcgaaacagggacacttggttacatggctccagaggttctcaacggccatgcttacaacaggaagtgtgacgtgtacagctttgggatctgcctgtgggaggtatactgctgtgacatgccgtaccccgaccttagcttttctgaagtcacctctgccgtggttcgccagaacctgaggcctgagataccgcgctgctgcccgagctcgctagcgaacgtgatgaagcgatgctgggacgcgaacccggacaagcgtcccgagatggcggaggtggtgtccatgctggaggtgatcgacacgtccaagggtggcggcatgatccccaaggaccagacgcagggctggctctcgtgtttccgccggtaccgaggcccctaacgcagagttgcttttacccggcgaaatgatgatattggtctccacgactcagtgtaatctaatcgcagaactggctataattgagagttttctcgttgtcctgggcgtaaatgcatggatgggccggcagttgacgattgatgtccgttcaaatgcttgctgtaagttaattcaggtgtagagggagttgctgtggccgtttgctcacatcgtttaatttcatggccgtgacgtgaagcaggtcatttttagaaaaaaaatatgtattaatatttcagtctctatcgattgacacatatagttgtccaaagttacatctaac

SEQ ID NO: 30080 - DNA, 1785 bp, Zea Mays
cgcgcatccgcatggctctcggtcctcggggctgagccaaatcaggagctccgaacacctgcgcgcgtctcggcccagccaactcgccgtgtttctccttacccgtcgcccgcgcggacacgacacgatcgcacactcgtacacccgctcgtcccaactcccaaccaagatcaggcaggtgaccgggcgtctcggttgagccaaaatcactggaatcaggggggaggagttttccaggcgcggcgcccgtcatccctgcccctgcgaggctgcgaccgcgagcccgcccacgaccagccctatccgatgaacacccaggccgagatctttcggctataaccaacccgcgctgccacttcggcttctctttctatccctccactccctcttatctgctgcgccatcctccccggcctccaccatggccacagccgccgcggccaccgcctcctcctccctcctcgcgccggcggccagcagcacggcgccggcctcgtcaaacgcgctgctgttcccctcctccgtgccgtcgctgcgtgcgtacccgcggctcctcctcgcgttccgccgccccgccgcggccgccatcgccgacccgcagggggccgtgctcgaagaggaggcggaggtcgaccagcagggccagtacgacgacgacgacgggtatgagggcgggcgcggccccgcgttcacggcccccacgcgcccgcgcaccggcaaggccgcgctactgcttaagcgcgaccgcacgaggtcgaagaggttcctcgagatacagaagctgagggagagcaagaaggactacgacgtgcccaccgccatctcgttgatgaagcagatgtccagtgccaagtttgttgagtcagcggaggcgcacttccgcatgaatctcgaccccaagtacaatgaccagcagctccgggccacggtgaatttgcccaagggaacaggccagtcggtgaagattgcggttctcacacaaggtgagaagatagatgaagctagagctgccggagctgatatcgtaggtggagaagatttgattgaacaaataaaaggaggatttatggagtttgacaaattgattgcatcacctgatatgatgcctaaggttgcgggcttaggtaagattctaggaccaagaggactgatgcctaaccccaaagctggcactgtttcttcaaatattactcaggctatagaagagttcaagaaagggaaggttgaatacagggttgataaatcaggaattgttcatattccatttggcaaggttgactttccagaggaagatctcattgcaaacttcatgtctgttgttcgctctgttgagaggaacaagccatctggtgctaaggggatatactggaaaacggcgtacttgtgctcatccatgggaccttctatcaagctaaacataaaagaaatgcttgactatggtttggaatcatctgactagatgtgaccacaggcaccagtgcttaggtacagttttctcagttttacgggcacatcatcagagcagctaaagtcacccagattgacaaagagatggtttgttggtcatgtatttatgagaaaattatgcacggtttcatagatgtctgtctcagacgtttgttgtaatgtttcatattttgtcaatagtcatccttgagcttaagccaacaatttgttttcacctgtcattaatttaattacctttcatatttacaagggcacgcctgatgcaatggtaagtctcgtttagtcaacaggtcacgagaaggattattttagtttatc

SEQ ID NO: 30081 - DNA, 2970 bp, Zea Mays
ttcatctctccgctcttccgttctgtcctgtgacgcgtgggtaaaacggcgaagggattctggagggaaacgccgaagggcctcactcgattgctactttggtctggtactgtactgctgctgctaccttctctctccccattactcgtgtaatggcgaggacgcaatagcgctagcgctcagtggagcggcggcggcggcggcggcagcagcgcaggccatcgcggaattgctcgctgctgcggcccagtggcgtggcggcccgcgtgtcgcgctccatgcggcactggtgcgcctcgtgagatccatccgcagcagcaggcatgtcgcggccgctgtacaggggcgtgtcggggatcggcggcaagctggcggcggcggacgaggcgtactacgaccccaaggagcccagcgagaacggcattggcgggggcttcggccggggcggcgcgcggaagcggcacctcgcggccgcggcggtgaagatcggggtcctgctgctgctggcggcggcgctcgtgggctcggtcgcgtgggcggggacgctctacgcggggcgcggcgcggcggcgcgcgcggccgcagccgccgcgcaccgcgggtaccggcggctgcaggagcagctggtcacggacctgctcgacatcggcgagctcgcgggcggcggcgtccgcgccaaggaggcggaggtgtgcccgcccgagtacgacaactacgtgccctgctactacaacatcacggacgccgtcgacgtctcggatctgggggccggcgtcgtcataagctacgaccgccagtgcacgcgcgacggcagggtcacttgcctcgtcgcgccgccgcggagctaccgggttcccgtgcgatggcccagcggcaagggcttcatctggaaggacaacgtgcggatcagcgggcaggagttctcgtccggaagcctgttcaagaggatgatggtggaggaggaccagatctcgttcccgtcggacgcgcacatggccgacggtgtggaggattatgcccatcaaatcgctgagatgattgggttgcggaatgaattcaatttcaatgaggctggggttaggacagtccttgacatagaatgtggatttggtacctttggggcgcatctttttgagagagatctcttgaccatgtgcattgctaactatgaagcatcaggtagccaagtccaaattacactggagagaggcattcctgcaatgattggttcatttgcaacgaagcagcttccgtatccctatctttcctttgatatggtgcattgtgctaaatgcaatattgaatggtacaaaaatgatggcattttcttggttgaagtgaacaggcttttgaggcctggtggatattttgtatggacatcgaatttgaatacacatagggccttgcgagacaaagaaaaccaaaagaaatggacagccattcgtgactacgctgagggcctttgttgggagatgctgtcacaacaagatgagacaattgtatggaaaaagacgaataaaagggaatgttacaaatcaagaaaatttgggcctgagctatgtggccatgatccagaatcaccatactaccaaccactaagcccctgcatatcaggcacaagaagtcagcgttggatccccattgaacaccgtaccacctggccatctcaggctaggcaaaactcaacagaactggacatacatggtgtgcattcagaagtcttcgctgatgataattcaagctgggactccatggtgcgaaactactggtctttgctatccccacttatattttcagaccatccaaagagacctggtgatgaagacccacaaccaccatttaacatgctaaggaatgttttagatatgaatgctcattttggtggatttaatgctgctttactgaagtctggaaagtctgtatgggtgatgaatgttgttcctacaaatgccccaaattatctaccactaatatttgaccgtggttttattggggttcaacatgattggtgtgacgcatttgcaacttacccaagaacatatgatatggtgcatgctgatggctttctatcacttgagaagacccacaagcatagatgttctactcttgacatattcttggaagttgatcgcatcctacgaccagagggctgggtcataatccgtgacaccgcccctcttattgaagcggcaagatctgttgttactcaactcagatgggatgcccgtattttagatcttgacatagctagtgatgaaaagctactcgtctgtcagaagccctttctcagaaaataaggagcacaagcacagtagacactgacacaagatatgaacttattctttcaccctatactgttacagttattgtctgagcagaactgagtacaaagcttgggacgaaaacacgggaaggtgccattagattggttagtaagtgcatgctgcagagaacaggcttggtggcaaagctttccaggccaaggttttattgccaagacacagagatgaagccatgaaattactttagtggtgaaaaccatatccaataaagggatgacgctgcggtgtacataatcgcggtcaatgtgccatatagggtttttttttggccatttaacgttagtcggagctactgaggtgagctggtattgctctgtggcttcaacctcccgtgcttttgtggaggattgcgcgtccagttcatgttagctgtagtttggtatctgccacaaccaattgggctgccccattgcgacggtgatgtgccaccttaatccgaagggattagcttgtcattcttccgtggtttggaccatccccttttgcctgcttgtatgtttgactctgctaatactctgggctagcataaaaaaaattaactagaaaatggtaacaacaggttagatcgtgtttaatagtttacccatatgtgttcgcttggctttaaccctaaaggacttttaatgtt

SEQ ID NO: 30082 - DNA, 2256 bp, Zea Mays
aaagatccttctggtaatttggtgctcaaggcgagacgcccatctcccctctcatcgtctctctcatctcatccagcctgtgccaaaacaaaacgagaaaaaaaagtcttgctgctgctggtggtggagcgagaaaggaaaaaaaaaaagaaggggtaatctcaggaaccatctagatacagcggcggtacgtggactggactggagcgagcaagcctgcgccggcgccgccgtcctcccgaaacagaagctgtagttggtcaagaactggggatactgagttgaatatgatctcaaatccggtggactggtatagtttcggacccggatagaattggtagggatgcaagattggagggtgcgtgagttcgaaggtaaattcactgatgagtttgcccacagcagtagcaacgaacataaaggtggagttgaggcttctggtgtcattagtagtaagaagttgaagcatgcagttgctaatgagaaaatccaaggtgtcatccccggtacaaatagctcaggttcactgaaacgtaattcagagaacatccaacatgcgaacggggtattatcccagaatataagctgcgctggtgactacaaaaatggctccattgcctttcctttgagagaagaaaatacaataactgagaccagatgtccagatgataactggaactcctgtcagtttgcactgaacaatggttcgtccattctcaataaccacagtgctccccaggatagcctcacttatggagataatgatctaaactacatcgaatggcctggcattgacaattttgaggatgtcgatacattattcaggagttctgattcaacatatggtcagcagcagctggagaatgcagatgggttatcttggattccgtcttcagatgctgtttactctaccgatgttgctttgcaacaagggcttgattcgtcttattcagattatggtattctggatgatctctccgcattccaatgtgcagaagataaatcactacccttggttgatccttcatcagctttatgtgataatcaattcaatgatacctacctgttcagtgaacaaaagaatgtgaatgcatatggtgaacagatataccaagaggatttgatggagttgttgcccactgaccagatatgcagcggacatgaaaacattgatatggttggaaaccagtatccatctgaaaatgcaattcaaggtaccgaagataagaaattctctatagcgtcaacttcccagctgagttctcagaatttactgaatcaaagacaccacttagattccagttcaccaagcaatattacttcggagtcctatccaggaaagttcggtccatctagctgttcttctgcacaaagaaactcaaaagctggtgtgacacttaagtgcgcaaatgcagtgcagaagaaaactgtcaacatacaaccaagacagccagcaaatgataatgttatgaacacaagcagagcttcttacccttgtgagaactatgaaactgaaagaagaggattagggaaagaactctgggggatcctcaagttacaatgggtagttcaatggtagtggatggctcatttgtatcatctatgtcctctgataactcagtcgaagaaagcagctttcaacaactgcaggatgctgttagtcagctggatgtgcaaaccaaattgtgcatcagggatggtttataccgattggcacgaagtgcgcaacatagacaagtttttccaaatacgatgaacagcaatggtggtagcgaggacggaaaggaactggagaacgcagaaacttcgtgcaagttcatggaccctcggagcatcgagacgcagacaaacccgatcgatcggtctatagctctgctacttttccgcgagtcatctggcggccatgtccatgtggctgtagcagccgacgatgcctcgtcactgaaatcccctgctggtgtatgatttcctgcctgccacatctcagttccagggccctgctgctaacccaggatgtttctaggcatgtatgtaaaaaaaaaaacaagcgtattgtgtagccaatagtctgtactctgtagtcacattaattttgtcatgcttgtatcctattgctagacggccgatgtgctaacctagtgctgttgactcaaattttatgcgtaatctaaaaaaaattatttcttttcgtggatctctagcataccttcaaactgatgcacgggagtggaaggattcgcttcaacaatcgttagg

SEQ ID NO: 30083 - DNA, 1007 bp, Zea Mays
tgactctgtaacaaatcacggcgcaagcagttacgaccctgtgggatcaaagcgcaagtccactacccctgttttggtgctattatgcgatcccatgagacagaaaaaatggatcgtttgggattagttgatttcttgaagggtctccttgaatttgatccaaataagagatggtcaccattgcaggctctataccatccattcataacaggcaaatcgttcaccggtccatatgaacctgtacctgagaccacaagaattcctgttgttcgtgctgcagcaattgatcacaatcctggagggggccactggctacattcaggtctttccccgcagagcagatcaattatttcatgtgtcttctcaaggattgagtgcccattccagtgttcccgtcaactacggtggttacaaccctccaaattatcctccgcaaaatctccgtcctcgtcgtggacaaccaattcttcatcagcgatataaccaggcaacttccagtccgatgcggccaatgggaagccatcacagtgggcagcctgcgtggcctagttttggcatgggcgatggagtgccctggggaggaacaggagggcactcatttacgacaagtgggctatcttcatctcttgcaagaaaggattatgggagcatcttttagtgtgttgtggacaggaggaatggcgttgattcattgcagtcgtaaattatttgtattagcaaaattggagtgcgatgattctggtttattgtttcgatgttgttaccccatccctccaattggtcctttgtgaacaagacagttgatatacaatatatgatcgatgacaatagcattcctttgcagccctttttttatcagtcagaagtttgggtgttcgcctgattgctgactatgttgtagttgccttgtcagctatgtaatatgaaggcgtgatgtgcttaggttcaggtgtgtttggttcagctttctcaactagattggtcaccaaataaaatctggaatcgac

SEQ ID NO: 30084 - DNA, 1386 bp, Zea Mays
cagaacactggtgctgtgaatgtgatgtttgcagattactcctgcatgtaatatgcctctgatgtcaatcaagaatggggggagggtggccattgtaaatcttcaggcaactccaaaggataaaaaggcaagccttgtcatccatggacttgttgataaggtcattgctggagtcatgagcaagttgagtctgcgaattcctccatacatacgtactgactttgttcagctcactctcaggcactcactgaaaaagaaatgtgttagatggactcttcgagtaacaagtattcatggcctccgagcaccattgccatttcttcagtctgtcaaggtttcctttccagaaagacctgatctgaagtctgtagtgcttaaagagcaaccattctctttgcagagggaaacatcgatgaacaaaccatttttcatgctgttgacattaaatttcagtgatggttgcagctgtttgagctcctcaattggatggcctgttgattttcagaagcgaaaagacagcttcgtcagagatagagctctagtcctacgggagttgtactctgctgcacagcgcgagtcttgcattgggcaacaagaaattctggaaagagagaacctaccaagagctgagacgtctattcatggaatcgtgacaaacatcgttaggtatgacactgaagatgaaaagttggctccacccaagaatgatttgatgaatcacagccgcagcaaccctgcaaaacggcacgtggaaggcactgattgccactcgtcattgccaaagaaactgaagtactttttgaaagacaagaagctgaactgctaaaagtgtaaaaccgtagaaggtagatagagaatgctgtaggtttgtttattttggttattagacgagttatacgtagcatagatgcatgggaagttcgcatgctaaggttgaactcttctgctgcataggaaagttggctgacttcttatattatgcgagcctagcttaggtacctcctgtggggagaagcgattgcaatacatggtagcatgttgtagagctcctcaccccagttagtcagtgactgatgatggtatcctcttaccagtcctctggtggtatcatcttttgttcacggaggtcgatgaagtactgcctccgataaaaaaaagacgcttttgacattattgctccccaaattcttattttgacggctatactttgcccagcgagtaatatctaataaatatacgttttaacgcaattacatttttttttgtccaagaaaaatatttttggaagctgttgaaggtcaagtgtcaaaattttggatagacgttgacgtagtaggttgagagcaggtacttgcgtgcttcccctgtgaagttttgtttcataat

SEQ ID NO: 30085 - DNA, 2113 bp, Zea Mays
tttttcttagtcaatcgacctatctatccgcgcgctacagagtcttctgcttttccaacttcatgcctgctgcttgcgatggacgaaaacgtaatcgttgttcatcatttaacggattttgctatgctacttcatcatgcttcaaacggagacctactaggagatcggtccagatacctctcacaattttgcctctatctatttgacttttcaaagagagattaatactatacccctactggctaaagggttacagagtattcctatggacatgatatcatcctgtcccatctgcaatatacaagttcttacggttgagctggaatggcatgccaatagccactttgatgacgatcaactccaaagggacatcgaattagcacatcagatagcagttgctgaatcaagtacagataccatgaatgacccaaaacattatagtggatcattcactagtgactctaatactataggggcctcatcgagtcatagtggatactcacaccattacagtgagctattggatgaacaaatctcttgtatggtcagagcacaaattcgaagcaaagttcaagaagtggaaggcggtattatgagcttgttgaggagctgcttggagtcagaagctggttcctcaaaaagtatgatatcaggctatattgaccatcatcagagtctttcatcagaagataagggatggggctgtggatggagaaatattcagatgctgagctctcatctattgaagcaaagacaagaagctagagaagtattatttggtggttctggatttgttcctgacatcccttcactccagaggtggcttgagattgcttgggataaaaaatttgatacgattggctccagccactttcacaacaaagtttatggtgccaagaagtggatagggactacagaatgtgctaccctcttccgctcttttggcctccgtgcaaagattgtagattttgatagcacagaatcatccgacctccaaagtaagaacagtagccatgcagcaagtcaagtacgaggacttatggataagttcttaataaagagtaattcccctaaatcatcgtctgaattttgtcaagaggatgctgaaagtatgagaggccaacacgcccttgttgactgggtttggaactattttgcatgtgagcgctctgatagattaaccacacagcgtgccactgtcagcaataaaacaccactctattttcaacatcaaggtcattcaaggacaattgttgggattcaaaaggaaatggttcaccgtggatctcaagaacaatacacccttttgattttagatcctggtcatagaactgcagatctagaaaggtccctaagaagcaaaaatggatggcagcgtctggtgaagagaggtgtccacacgctcaggaagccacagtatcagttatgttatgtggatcctggaattgctagttcagaagagatggagcaactgaagactattgatagtatgcttgtcaggttttaggttcctgaaaacaggatgaggattatatgtgttttgcacacagggcactcccctggttgaagaaacaagaacatctaatccattgccgaacggtgcgctgtacgaatgacacagcaaggatgggcctgcagaaaactggatctactgttgtttggaggaccttagaagggtcctgactgctttcgtaactggacctgcccgttgggcttgttcggttatctgaacgactgaacctgtggtgtaggtaaacgaagcagagcttgatgtacagtacagtcgcttgtgttgaagtggagagaataaaagtgtttgtacatataataacatcctgcagttgttaatcttttgttacacatctgatgccgcccgcgcactcagctcagttgactggaatattgactcaaggatcgtattctgcacaagttggaatctggccatatgtttgttgtttgttgggtgtcgagccatcccttctttcgattaaatatagtcgcacgtatgagtacaaaatttgttgatcctatgtgtatttgcagtacggcctgttttaaggggcatttggcagagctcttatagctccgcttcaaacgagaatcactctagcag

SEQ ID NO: 30086 - DNA, 1755 bp, Zea Mays
ttccttcgggaaacaaatagaagtctgaaacatgtaataaagtccgaagcatagaagcagcaagctgacatgcatcgagaatttagagcgtgaaatccagcaaaagaggagacatatgcgagccctggaaaaacaaatcatggaaagtggcgaggcatcagttgctaatgcatccatgatggatatgcagcagactatcacgaaactaacagcgcagtgcagtgagaaggctttcgacttagagttaaagtcagctgataatcgtgtactccaggagcagctacatcagaagaatttggaaatctacgatttacaagaaaaagttcttcgcgttgagcaacaactctcagcaaaagtggatatatcccctgagaaggaaactgattgtgcacagcaggagactattgatttgaaatctaaacttcagtccaaggaagctgaaatcgaaaagctgaaatatgagcatctgaaaatttctgaggaacattgcgatttaatcaaccagaaccataaattaagtgaggaagctgcatatgcaaaagaattggcttcttcggctgccgtcgaactcaagaatttggctgaagaagttacaaagctatctgtgctaaatgcaaagcaggcgaaggagttattagttgctcaggagatggcacattcaagggttcatggtagaaagggtcgtacagctagtaggggtagggatgaggttgggacatggagcctcgatttggaggacatgaaaatggagctacaggccagaagacagagggaggctgctttggaagctgctttggcagagaaggagcttctcgaagaagagtacaagaaaaagtttgacgaggcaaagaaaaaggaactatctctggagaatgatctagcaggcatgtgggttcttgttgctaagttgaaaagaggggctttaggcatatctgatttgaatgttgacgaccgaactgttaacctagctgatataactaacagcacaaaggagaacaaaggtggaaagaattttgctctagttgagaagcaagcatcagaagattctgtgaagtcactgagttcagaagaacatacaagtccggagtttgaaccacttcttgttcgtctgaaggctaaaattcaggagatgaaggaaaaggacattgatcccctgaccgataaagatgggaactcacatgtctgcaaagtttgtttcgaatctgcagccgctgcagtattgcttccttgccggcatttctgcttgtgcaagccttgctcgcttgcctgctcggagtgccctctgtgccgcacaagaatcgcagacaggataatcaccttcacgtgagctgcgttctagcttcaggtcattctgaagcacacatcctcttgtaaaatcttcaatggtatatgtttctctttttccttagcaaagaaggtgccttttatgttccttctgtgttgtatcgccattctttgggttccccttcccctatagcttcacgccttcaccttacgttctttgttgtatcgaggagttacaaatgatgacttctcgctctgcaaatatgtatagatacgcaactcgacgctgtaacacattttgattctctactcctgaagaaaagcagcgaacgacatgatgacgtgtgtatactgtgctcctagtcgtccctgttagcatggaaggctatattctataattgctgagctacgcccctataattatagatgatggccttcacttttattatcatggttgattagttgcctaca

SEQ ID NO: 30087 - DNA, 2789 bp, Zea Mays
gtagctcttccccaaataaattgattgtgccgttgcaacgtatgtaatttgagaaaccgtatcttatcaagtcgtgtcttataaaaagagagagagagagagagtggaaccagtatttataagcaatatgtgatgcatcatatcgtaaacttcagatcggataggaaagcgccaagacgctcacgctgccagctcagctcgtgttcgacccatgctttccacgaagcatgggcaagaccaagacggcaggagcaggggagcagcagctgatgataagctagctagccagagtcccactccactttacctccttgtcagctgctcgcacttgcagcgtcccgttcccgcacttctcttccttctcgtttcgtcctgcacagcgcacgcaactgccaccggccaccgcgcaaactccattgcgcgcagatcaagaccgccacacccaccaccagcgcttcagcgggagacgtgacgactgacgagacgaagcctctccccacggcgcctccccctccacatggcctgggctcgccttgcctcccgctcccgtctgcgccccgcggcctccgccgccggccgatcccgacacgcctcaacaccggctccgcctccgcctccgtccccacctaccacacgcacggtacctgcggccacctccgcgccaccgctccggcgtctcctcctgcttccgcggcaccggtttgctgacgccacgccctcagcatcgaccgcgtggctgctcggtgcccgctggcgccaggggcacggcaggaggtgctttgcgagcgccgcctacccggcgcaggcgacgccgggggaggcgtctgagctggtggatgtgccactggcgcagactggggaaggcatcgccgagtgcgagcttctgcgctggttcgtcgccgagggtgaccaagtagatgaattccagccactctgtgaagtacagagtgacaaagcaactatcgagataacaagtcgtttcaaggggaaagtacataagattcactttgtccctggtgacatagtgaaggttggtgaaactttactgaaaatggttgtgggtgacagccaaattgtttccccagataatatagttccatccgctggtaagtcccttggagtagagtctgcagttttctcaagtgaaggcaatgttcctggtggaaatctctctacaccagctgttaggcatctagcaaagcagtatgggatcagcataaatgaaattgttgggacagggaaagatggtagggttttgaaagaagatgtgttgaattatgctgtcagcaaaggtgtttgcaaacaacaatcgttagcttcggaagggaacattggtcaagttgagttactagaggaagggaaagcattactcgatgaggacttctatgaagataagaaaatccttctcaggggataccagagatcaatggtcaaatcaatgagcctggcagcaaaagttccacattttcattatctagaggagataaattgtgattctcttgtgcaactaaaaaccacatttcaaaatgagaacaaggatcaaactatcaagcacactttccttccgttcctcataaagtcactttctatggcactgagtaaataccctatgttgaacagttctttcattgaggaaactaacgaagttgtgttcaagggtatgcaatctttgagtttttcgtttcgctcttgtttccttttatcccagaaaaggatacagaaaacagtttaactgatggctctggtgcagaacttcagaaatttgatctattttttcccattttcccattcaactgctaatttactctgtaaacatgtacactcctttttctcaatgtttgcccttctcatcttcaaactacgaccaagaaatccacttattgtagcaggaaggtttaaggagtagcttagcatagtcttcttaattgtttcgtgcaacaatttgaacatgaatgacaaggggtcatgttcatatgacaggaatacaataccagtggttctattacaggattgtattttttgcacttatgacaatacatcgtgtgatttaaagttcaactatgaatgatactctgctatttccctttccatgtattacaccattttgactattcaatgcattattttgtggtgaaggtgatgaaaaatagtttattttgttagggcctcacaacattggggtggcgatggctacaacacatggattagtcgtgccaaacatcaagaaagtgcagtcgctatcaatattggagatcacgaaggaattggcgcgattgcatgagatggcatcacaaaacaggctaagcgctgcagatattgaaggtggcactataacacttagtaacataggtgccattggtggcaagtttggctctccacttctgaacctacctgaagttgccatcattgcccttgggcggattcaaaagcttcctcgcttcgatgatgacgaaaacgtttacccttcatccataatcaatgttactgttggagccgatcaccgagttgttgacggggccacggttgcaagattctgtaatgaatggaagagcctcgtggagaagccagagctgctcttgttgcatatgcgatgacccagtaatgtaccggtacatactacgacctgaaacggaggcattttggcataaaaaaataaatccatgtattcaaataaataaccaacgtggcttctctgcctggaaacagtggaaataaattgggagttattttcggagtcctaatcttatgttttcctttgctgaaattcatttttagggctatttgggaac

SEQ ID NO: 30088 - DNA, 1046 bp, Zea Mays
cccaagcccaatagcttcaaccgccagcccatcaaaggtgctagctccggcggccctcctcgcgtcgccccttcgccactccccatcgcaccctcctcactcagcggtccttgtcctccgctcctcctgtcgcggaaatcggaatcccctgctcggccgtcgtcgccgtcgccgcccccgccgcctcctgtcactccaccagatccatagcggctagcgctggacgccggcgcttgcaaatcgagggtcagcgcagcgaatcagtgctagcggcgggcaggcaaatcagcgcggacaggacaggcgacggtctccagctcgagttcggcgccccgggcggctggcagcagcagaagagcagggcctggatgctgaaccaatggtgtcaggctttggctgctcttacgctgtcactggaaggaagcgcgtaaagttgttggcagccgagtcatcggatggtgaacccctcggctgttgcgtgccaatatgtgatgattcactgggggacttgattgagtggtgctccgagtggcatcacatgccttccgattgtggtgatcaaacacaacacactggtgtgtttgctgcaatgcaagaatacacctgttccactggtaacaatggtgtgatttatccacaatctgggattagccattcatctggtcaaaatggggcacagggcacatacttgcaacaccaacattttgaaggctgcatgtatatgagcgggaatggacagatgtgcggaccttacctgcctgaacaactgtatgaggggctatctagtggtttcttgcctcaaagccttgctatctatgctgtttttggtgggaaaacagtcgatcctgtgcaattgatctttctgaaacaattcctttcacaatggaatgtcggtgccgtggcttccaccccaaatgtatcgacagagacagagagagtgacttcccatgctaaaatggtttttccagattctctttcaagtgaagaatcatgctggatgtttgaggatgcagaaggttgccgacaagggccacattctcttgctg

SEQ ID NO: 30089 - DNA, 3429 bp, Zea Mays
atgcccgcgtcccgcatccctttcaagcgctgcaccgccgccgtcccgggcgtggggaagcccggccccgctgccagcatgccgcccgccaagcgccgccgcgaccgcgtcgtcccgtcgcggtccagggactcgatgccgccgcccgcgccgcacgtggaggaaggtgacaacaggcacggggaggtgtacaacgtagagttgctcatggccgagcccaaagtcgactcatttggtcccgtggagaccgcgttgtggacgcaagcgcggacggcgcccacggatgccgacctgtaccgagcgtgtcgtaacataaacaagaggggcagctgtgggggagctgccagcggtagtgtgctcacgtctgtgagcaatgccgcctcggacgcttgtgctggtggcaatggcaccattgtccgagtgagcaatgctgccttggaaggtggtgctggtagcaatggtggtctggaggggagacctgcggtggtggagtgcaagcccaagagggagggcagcgacaagaaagaggatttctactggccggaggattttgtgcttggggatgtcgtgtgggcgaggtccggcaagaaatccccaatgtggcctgcactggtgattgaccccctgcagcatgcgccggaagtcgtgctcaactcctgtgttcctggcgctctctgcgtcatgttcttcggttattccgctaatgggcatggcagggactatggatgggttaagcaaggaatgatctttccctttgtggactacctagacaggtttcaaggacagcctctgtataagctcagaccaaccaaattccgtgcagcaatcgaggaggctttcctagctgaacgtggtttttttgatctcgacatggatggggcatgctcaccgcgaaagtttgtagataagcagtctgatcctaatggctttcaggaagaggccgcttcaaataacgagcaggagtgccaatctgagtctcaggttgttggcaaatcggcactgtgttgtgatagctgtggtaatcgcctaccatccaaggtttcaaagaaaaggaagcaagggggtgagcaggtgctttgtaggcactgtgaaaagcattactctgcagttattgcagtcgaaacaatactgtggcatatgcaagaaaatttggcaccacacagatggtgggaactgggtttgttgtgatgagtgccagatttgggttcacgtagaatgtgacctgacatgcaacaacatggaggatttggaaaatgcagattatttttgtccggattgcaaatcaaaatgcaaaacagttccagcaactgaaaaaatgaatacttcccacagttcagaatgtgctagcacttcaaagggaaaatcaaccccaatgatagctgttttctgcaacggcgaggaggcattgtatgtacctgagaagcacatgatactatgtcaatgtaaggcttgcaaggaaaggatgatgagtctgaatgagtgggagaagcatactggctcaaggaaaaagaattggaagatgagtattagacagaagagcacaggggagccactcattaatttgctggatgatattccttgtgggacatcgaagtcttctaagccaggcattaagaaaggagagctgctacaattgcaagctaatgcttacagtcctgtctgtgctaaatggacaacggaacgctgtgctgtttgtcgatgggttgaggattgggactacaacaaaattataatttgcaacaggtgccaaatagctgttcaccaagagtgctatggagcacgagctgtacaagatcttacaatatggctttgtcgagcatgtgaattctcccaacagaaaagagaatgctgcctatgtcctgtcaaagggggtgctctcaagccaacagatgttgatggactgtgggttcatgttacatgtgcctggtttcagcctaaagtctcttttccggttgaggagaccatggagccagctatgggaataatgagcatccctgcagagtactttaagaagacttgcgtcatatgcaagcaaatgcatggtgcctgcacacaatgctacaagtgctctacgtattatcatgcaatgtgtgcatcaagagctggatatcgcatggagttgcaacactatgaacgaagtggcaggcacattacaaaaatggtttcctactgtgattttcacagtactcctgacccagacaatgtgttgatagtgaagacacctgaaggtgttttctctacgaaattttttgtccaaaatggtgagaaacagacagctgcaagactcgccaggaaggaaaattaccaggagaaagtgcttcctcctatagtttctgactgtctagtcgcaaagtgcctgacctatgaaatgttgaaatacaagaaagaaccaggagaggctattgcccaccggattatgggacctcgacaccactcccaggattttattgatggccttaacgcatacatgggtcataaggacgaccaatccttttcaacgtttaaagagcgacttgggtatttacagaaaactgaaaatttgagggtctcttgtggtcgatctggaattcatggatgggggctctttgctgcaaggaatattcaggaggggcaaatggttattgagtatcgtggtgaacaagttagacagcgtgttgctgatttgagggaagcacggtaccatagagaaaaaaaggattgctatttgttcaagataagtgaagatgttgtcatcgatgctaccggcaaaggaaacatagcgcgcctgattaatcactcgtgtatgccaagctgctatgctaggatcgtgaccgtcagtggtgacaggagccagatcattcttattgcgaagagagacgtctctgccggagaagagctgacgtataactacctgtttgaccctgacgagtccgaagactgcaaggttccatgcctgtgcaaagctcctaactgccgtggatacatgaactagggtgctgctagaagagtaaaaaccaatctaacaaacaaggactgaggctaactccttacagaagccaaaagccggccatttttttttcctggaattctttcggtagtttctcgttttcttatattactcaccagaagcttacaattcgtgggctgcacaaggtttggaccattttgttcagaaattgcgatttagggcagccgtaggcagtcatccatttgtatattcttccattgctgtgataagatggtaagaatgctcaaatttttttttggttaaatgaaaataagaaaaactcagtttgattctatctatttccaatggcatttcattgatcaaattaatgacttcatctcctatccaaggccatgcagctctatagaaagctatatatattgagtccaccaggacccggagctgcatccctttttcattttttagtgtattgaagatttcct

SEQ ID NO: 30090 - DNA, 1788 bp, Zea Mays
gtccaaacagcaccagggaacagggtcccatggggtggtggtctggaggggaactgatttggtcaccagcctgagcccctgactgtgcagtgtccacaaagatcccgggctgctccttcctcccagaggaagcgtacaaacctggaggggaactgcccgtctcctcggctgacccgtccacctccttcttttcccctcgtgtccgccgctacacgcgccgccggaaccctagcctccaccgccacaggcagcagggatggagaaaggagcctcggaggcgtcgcccccttgcgctcgctgcggcaagcccgctcagcttcaatgccccaagtgtgtcgaacttaagttaccgcgtgagaatgcagctttctgcacacaggattgttttagggcagcatggagctctcacaaatctgttcacccaaagcctggtgcaccggcatcccagcagtctccagaaggttggaaatattgtctgagaaaagggcgggaacgtgcattgcaacttcctcgttttgattggacaggtccattgagaccacatccaatatcaaagatgcgtgtggtgccagatgaaattgagaagcctgattgggcgcttgatggaattcccaagatagaaccagatagtgatttgcagaaaagagtagagattaagacccctgatctcatagaaaggatgagagtaacatgtcgaattgcaagagaggttttagatgcagctgctcgtgtaattaaaccaggaattacaacagatgaaattgatagagtcgtccatgaagagacaattgctagaggtggatacccatctccattgaattactatttcttccccaagtcatgttgcacgtctgtcaacgaagtcatttgccatggaattccagatgccaggaaacttgaggatggtgacattgtaaatgttgatgtaactgtatactataaaggtgttcatggtgatttgaatgagacatattttgttggaaatgttgatgaagcttccaaacaccttgtacgttgtacctatgagtgcttggagaaagctattgcgatagttaaacctggagttcggttccgagaggtcggagaagtcataaacagacatgtttcaatgtcaggtttatctgtggtgaaatcttattgtggccatggcataggggaactgtttcactgcgccccaaacattcctcattattcaagcttcacagctggggagatatgctggtgttttttaatgcaggaaacaaggccgttggtatcatgaaagctgggcagacatttacaattgaaccaatggtcaatgcaggggtttggaatgatcgtctgtggcctgacgattggactgcagtgactgcagatggtaaacggagtgctcaatttgaacatacacttttggtgacagaaacaggatgtgaagttttgacggcacggttaccctcatcaccggacgtttttccatggttgaagaagccgtgatggggaacgccaccaacagcaagtgatactgttacactgggtcagcaaaaagttttgttctgctctatcagtcggccaaagctgaaattttcaaatattctagatcagagtgattagcatgctactgctgaacagtcgcagcaattgtctatcgtgcggaactatttctgggagtgtgtattgttaagtcggttttcttcgagttatacgagacgtatggcttcttgagatgtgtcaccaatatgattatgccatcagtttacttttgatttcacagaacacaatttccatcatttcgagtaggttattttttat

SEQ ID NO: 30091 - DNA, 2877 bp, Zea Mays
ctagtggtaccaccacacacagccccctgtgccctcctgccgtccgtgacgtgacgcagccgagccgcgcgcgcgctccgggccggacgcctccgctcgaatcgatggacgccgaggccggcgtcgccggcgccgaccagcttccgcggaggcagtactacctgaatctactgcttttagcttaccagagctttggtgttgtttacggggacctgagcacatcgcctctctacgtgtataaaagtacgttctctggaaagctcagacactaccaagacgaggagacagtgttcggcgtactttcgctcatcttttggaccttcactctgattcctttgcttaagtatgtcatcatcgtcttgagtgctgatgataacggcgaaggtggaccattcgctctctattcgctcctttgcaggcatgcaaaactcagcttgctgccaaatcaacaagcagctgatgaggagctatcttcatactatagaaatgggttcgcgcctcgcaatggatcttcaccttggtcaagaaggtttctggagaagcacaaaaaaatgaggactctgtttcttctcatagttctctgtggcgctagcatggtgattggtgatggtgtccttaccccagcaatctcagtactctcgtctatgtctggattacacgttcgagctactggtctacatcatagttctgtagttctcctttcatgcattgtgttggttggtctatttgcattgcaacaccgaggtactcagaaggttgcattcatgtttgcaccaattgtcatcatctggctgctttccattggaggaattggtttatacaacattcttcattggaacccaaatgtatatcaagctctctctccatattatatggttaagttctttagaaagacaggtaaagatggatggattgctttaggagggatccttctttctatgacaggcagtgaggcaatgtttgctgaccttggtcactttacgagtgcatctgtcagggtggcttttattaccgtcatatacccatgccttatgctacaatatatgggtcatgctgcatttctgtcgaagaacacatttcacatgccgacaggtttttatgatactatcccagaaccagtgttttggcctgtctttgtggtggccacacttgctgctgttgttggtagccaagctgttatttcagcaacattctccattgtgaaacaatgccatgctttgggatgtttcccgcgagtgaaggttgtccacacatcgaggtggatctatgggcagatatatattccagaaataaattggattcttatggttctttgcgtcgctgtcactattgcatttcgtgatactactcttattggcaatgcctacggttcctcagggaggatgggtgcctcttgtgcttgcattcatattcatgtcagtcatgtacatctggcactatgggtcaaggaggaagtaccagtttgacctacagaacaaagtatcaatgagatccatcctatctctcggtccaagccttggcatagttcgggttcctggtgttggattgatttacacagagctggtcactggtgtaccctccatcttctcccattttgtcacgaatctccctgccttccatgaagttctagtctttctctgtgtgaagtcagtgccagtgccatatgtttcaccagatgagcgataccttgtgggtaggattggacctaaagaatatcggatgtaccgttgcattgttagatatggttacaaagatgtgcagagagatgatgacaattttgagaacatgttagttatgagcatcgcaaagtttattatgatggaagcagaagatgcttcttcagcaagttatgatatcgctaacgaaggaaggatggcggtcataacaaccactgatgcctctggcagcccattggccatgagggatttcgacggcctagctgactccatgtctacgaggagcagtaaatcagaaagccttcgaagtttgcaatcctcctacgagcaagaatccccgagtgtaaaccggcgccgccgtgtccgctttgaggtcccagaggaggatggcatgggtcagcaagtgaaagaagaactcacggcactagttgaagcgaaacatgctgggatcgcatacatcatgggggcattcttatatcaaagccaggaggaactcaaatttcctgaagaagtttgctattgatgttggttactctttcctccggaagaactgcagaggcccatcagtcacgctgcacattccacacattagtctgatagaagtcggcatgatctactatgtttagcttaaggcccattgccgaagctcacatgtggatacccggtcggggcaatgcttgctcgcacgcatgaattggggacgatgtggaggacaagcctacaagtaagggaggtgaaagagtggcgttgcagccttgcaggtcttctgcacctaccccatcctagcttgtgtctgctccaccgtcgtcttctaccgtggacacaaggtacgggagctgctgctcgacgagctgctcgtcgcggtacgcacggctatggccaccaaaatcggctcgtagtctttccatgagacaatgtacttgatagcggacgcacagtagcaccccatgtttacggtgagcgctggcggttcgctactttaccgagttctttagaggaccttgctttgctggagaccgaaaacaaggctgcacacgctaaatttagcatacatgagcatttacagtcctgtgttggggacagtcttaatttactccatccttcattgtaaacatgtgtacagttgaaatttgagaaggctttaacgggctctacaacttaatttatctgacaggcctggccaggtcttattcagacaacc

SEQ ID NO: 30092 - DNA, 1050 bp, Zea Mays
attaagagagtgccaaaaacagtcagcttggaatctgcagggattttgaggcagttagcaaattatcttgatgccaatattccaaatgctgatcttattgctagtgcaattggtgtggcatcagcaattatagacaatgttccacttgttgctgcaaccatggggatgtatgacctgacttcgttccctcaagactcggacttctggcagcttgttgcattctgtgcgggtactggtggttcaatgcttatcattggctccgcagcaggagttgcttttatgggagtggagaaggtggatttcttttggtattttcgcaaggtgagcggttttgcctttgcaggttatgcagctggtataatctcttaccttgctgttcaaaatctccatctatcccttcccacgtcgctggttgagatcccttttatttcgggatcataaaagcttggcctttgtggtcattttagaatgatcacactctacatatggaggtgaacatcattattgtttccatatcttatgtaaggtccagtgtgtcggcatgtagagtattcagaatttgggggataagacagccctgagcttcaaggccagacatcagttttggacaggcttatctcgtgctgatgaactttagggtagggttgagctccttactagggggctgtttggttcgtggctaaatatgccacactttgcctaaggttagtcgttcgaattgaagaattaaccttaggcaaaaaagttaagcaaagtgtggcaagttagacatcaaaccaaacaagccctagaactgtgggttcgaaccaaagtatgccactctggatatttgtgaacctactcggcaaacaaaggagcaacttagaaatgtgcaattttgtaagaaacaatcccttgtaagctaagagtgtaataagatacagaaatcttgtataactgctgtctggtaatctcattgatggtcttgttaggcagctgcatagttcaaaacttcataccacatcactagggatgagttttgcatctgacatggatacctggttgaacaag

SEQ ID NO: 30093 - DNA, 227 bp, Zea Mays
tggggcaatcgctccccggtgtatgtgtgaccgcgatcctcgcatcaccgcgggcactcacctatggtgaagttcggggcccgtgtactggccagatgggtacgcgtcgtcccggggagggtcctcattggctgtctcggacggggggatgctccgtggcttcgccaatggcgcatcggagctaagtccaccgcggaagccgctgctagctaataccactgcctgac

SEQ ID NO: 30094 - DNA, 2532 bp, Zea Mays
gccgccgtggtccgctgtcgcacacgccctcctgcccctctgctcccctcccagatcccgtgatccgctgccgtgatccgatgccgcacccgccatcaacgccctcctccccctctgctcccctcccagatctcgtgatccgctgcgaggccgccatcaacgccctcctccccctccgctcagctcccctcccaggatctcggcgcgctttcatcgccgccttgatggtccacggctgcacccacatacgacatcgcctgtccgcacgcaagcttctgcctgcgcccacctgtgtgcatagatgtgtgcccccgcccacctcttctgcgcccaatctttacccgtcgtccgcgccgctgttccatcctcgcacccacgcccgagatccacatgtgccgcaccccagccgtgctccggatgctgcaccgcccttccatcctccgcatgcagcaccatgttggccgccgccctgaaacctcgctaccacggagctgcaagcccccgcttccaaaccagcaccatgcagacttccaatttgttttttgtttggagcactgttgattttttctcgtttttttgagaacattacattgcccgtctttcactgttcaacttttcttaattaaccatttacatttaccaaaaacttattcaacttttcactgttcaagttcaatttgttttgtgcagtattgatctgttgtgcagtgtatactttgaggttcggttggccgatcttgcgatcgaataccaaaaacttgtgcggtactctgttgctgaataaaacttggatcaggttaccccaaccccaatggcatttaccgagccgatggaggcgaacctgctacgccaagtgctggactatccccccagtgctctgtccatgtccatccctccttcagcttcattgatggttgcactgctctactatactataagtgaattgagttaaagcattttttgttcgactactgtttggtgcatgcaacttaatatggctgatttttagtctttctattttagtttataaattgtcaatcacagggattaaaagagactaaaagtaaggtttcaggttctatttctatccatctttaattaagggctgaaacgatactgtcttgattcctaattcacctaatattcctagaccaagaacgactcgggttaatggtcagggatgccaaattgtttcagtaaaactaagcaagctcgtatgatgattatgtacctacttgagaacaaattgtctaaaacatatctgctactacacttcagtaaaacaattgatcacacacaagaagttcagatcagaaagcaggctgtcgctactcccgtcaggttctcggatggttcccgtcaagggctgaccatggagaagagcacagtggtggtcagtgtccctgttgttgtcatggccgagactgctgagaccgactacagctcgagcttctcagtcccagaaagatgttgggaagggtgataaatcaagggataagggaactgctgagaagtttgcaatatatcagaagcatcgttcttcgttggcagacactgttcaattcaggaggccagctgctccaacttccagtgtgaatgctgatattgtgggaacatccactctgcagtctgcatctctaccgaaacaagaaccctcaacagctacatccaagagctatactttcagagaaggtgatagggtgcgttatatgggtccagctcagttatcctcattgtcacaaaggctcctctccttttgctggcttcgctgttggaagcgagacatcatgtggtgtggataacgtccttgcagagcacgtgaactcaaatttcactctaatgccagctagctgctacatagtgcacttctgtatattatgagaagagagtggctcttcactcccatcggattgacaaaaacacactcggacaaccagtgctggtattaatcgagatgtcgcatcaacaaacgctcatgcagagccagattctactcctacagtcctacgtctacacgagacgacacaagtgcatctataattgatcttttcttttcatctactattctcaacagacacagcagaactgcatgccagcagaggaatgcatatctagtggagataaactgtaatcggccgcctggatgacacgataggaccacgcgtaagaacaaactgggaccaaataataaaagacgaacggagaaaacgtgtcgttgcagatgcccaggttgtcgcactggctccgtcactgtctgatcgagtatctgcaaagtagggattaggtttgtcaccgttgactttacatgcgcctgcacattattctcaagtagtagtacttgtaatcacccctaggccctagtcaatgtgcacgagggaggccaacgtggcttcgcccttgctttaaaatctgactgttttttttcttcactttctcataagaacgtacttttcctgtatcagtcgcctagatagttattttaaacttttacaagaattacagcgggaggtggtgataacgattacagttaaa

SEQ ID NO: 30095 - DNA, 546 bp, Zea Mays
cagattccagatttgctctctggtctctatataggaaactatattgaaaacacctcaactaaaaaaactcagctgtacaaaacaagagacgagaaatacctcctcgatttgcaaagagtcagtgggccacagctcctctttctggacttgtgcgcggcctttctaactcaactgagagttctttgatttctggtgtcagctttccatcagttgcattccttgcgtttcactagaggaatgtctaaatcgctcacaaagctgtaaatagtaatctccagtagattggattttctggagtatgtagatggtaggcatgagaagatgttatgcctggcggcgatcttctgaaccagactgtgtggagtaacttatctcctaattctttacggctggccagctgccggtgaattagatcagtgcttttgctggcataatgtctatctacattaataatttcagctattacaacggttaattaaatgctgtgctgcttacaggccaaatgagattatgttttgaaggcaactctttttttttgcattaatt

SEQ ID NO: 30096 - DNA, 1627 bp, Zea Mays
tcgccttacgcctttccgcttaaaaggtaaaaagggggtcgttcgccttaactcgtcttattgccttaataactatggtcttgtcatcgtgcctataatggttaggtaataatagactaaagcactcttttcaagtcgtccgattaatcgtccaagtcgtccgactaatcgtgattaatcgcccaagttggtcagctagaacgaccagcaagtcgtccgatttgaaagcaatggactaaagcccatccttgttttggaatattttttaatctggtagtgacatattggtttctatttgtgtttactttatgccaaagcaatttttttgaagcctttttcctggtacattcagtagtcagtactttaaatccaccatcatggcatatggtctaacttgtactctagatcttgagggtaacaccgaggggaaaattcgggccactgaagaacttgacaagctaaaagaacaaagggcagaagagcaggcaaagatgttacttgaagctttcaacaaagaccgtgcttctttaataaactctcttcaaaatgccactcaaacaactacacctgtcccccctgctgctccggatgcacggacacaagaaatgataaacgagaaactgaaaaaggcagaagaactaggtgagaatgggatggttgatgaagcccaaaaattgttggatgaggcggaagctctgaagaaggctgttccagactctacaaaaatgagcgctcatgtccagataactgaccaaaagctgcgcctgtgtgacatatgtggagcattcttgagcgtatatgacagtgaccgtcgcttggcagatcattttggagggaaacttcatatgggttatatgcttatacgtgagagattgtctgaactgcaggaagagaagaacaaaaaacggaagctagaccgagctgagtatgacagaaggtccagggaaaggagcggggaacgtgccagggattcgagcagggatcgctacatagaccgcagcagcagccgtgacagggagtatgaccgcagaagaagccatgatcgctaccatgacagggaaagagagagagattccaggcagtctcgtagttatgattccagaagccaccgcaggtcatattcaccaaggggaagttctagggattatgatcgatctgggcgtcatgaacgccgtgatcggtactaggagcaaggaagcctccttgaaatttagggtactagattgcgttgcctcagggctagtttggccacctcatttttccaaggattgacaaccttatttttttaagggatttctattttcctaagaaaaattagttcattttcccctgggagggaataccttggggaaatggaggtgccaaactagcctaagtgttgttcgggaattctaagagggggcttaggtccaactggagaaaggcatcagctctttgcattataactaagggataggatctgacgtaatctatgcgtatcatattgttgtgttagctggtgttcatcgtgtaaacacaatgtggtggcgacgtgtcatgctttaatacgcttatatgcatttgaattaagttaatctgcccttgccatgtgtcttttattctggtaataagtttgtactcgtacgaa

SEQ ID NO: 30097 - DNA, 1592 bp, Zea Mays
tttagggtttgaaccccgccctccaccgccaccatcagctcgcatcgtcgtcttcgcagagacagtcctggcggcgctgaaggaggagacgcagcagcggatggatgacgcatcgattggaggtcattggtggccactcacgcctcctcagacctcaccctcacttcgtcgtcagcgcaggtttggccaacggcccccgaccggatcgcaggtcctcctcacggtgaggcacagcccacagagtcgagccggacatcacaaccatgaccatgaggcatcgtcgcagcagtcggagtcatttttgctgccccctcccgacacctgtaaattttgtatgccttcacgccgtgaagccacatttgcggccattggcaatggctgtatccactgtttcgatccatatatttggtgatgtcccttcttcacctcttgttgggctgcttcaggacaaaatcaataactggagggagacatctcttatattgacatccatccttttcgctgcagttgtgttctggttcattggtgtgtctgaggctgcacaagatgctcttgatcatcttttcaaccaaggccacaatctcgtaacagaaaatgagatttctgatacctttactaggctggttgaaaggctaccacaagtggtacttggaagcgaggagacaaccacactttcacatgctaggatgttgttggctctgaccttttatgctggtccctagtttctgataaatcatcttcactgttctcctgtattgctgctcgtttctttgattgtttgggtttatgcataggtcatagctcacagttttctggttccatggacaagctaattgtatcaaagccactatctatcgggtatctttattcagttgctgagttgaagagtggcgcctattctaaagatacaactaacatatctctgcatgccacgtcaacatttgcagcctccaaaatatctgttatccatgataatgctttgccaaattcattacttggtacagttgaatatgagttgccccatgtgcctccatggtttattcatgctggtatccagaagctttatggggttcttgctggaataattagacttgttggcctatcaacagtgtcaggaaccgggccatgttgatgttcaaaagagttgtcagaagttcatgacatctggtatttattatatcttcttttgtagtgggctggtgtggtctgcttagcagcaggtagcactacaaccagcaatgtatggatgaattgaaggtagtaaagaacgcatgcaatcttatagaaactctacatcttgaaactggcatgattgacaaagaagctggatgcatcctttggattggtgtcttcttatcatcaagcagtaatgtgaagcaagttcatttgttgactaagaacagatgagcacaaatcagtgaagagttcattgcactagagatggaggatggataggtggtagatttcaatatggctttgatactattgtttctctttacaatctttgtacataacaagaaaaatgacgttgtatgtggatactattgtaattcaagaatttatttctgaataataaatatatttgtttataa

SEQ ID NO: 30098 - DNA, 1207 bp, Zea Mays
taggtactacaataagtacacctgttgatttcagcaaacatttcagataaatgaatgatttgatatagcttgtggacttcggagagatgggacccattcggtgttctcgttgcaaagcgtacataaaccctttcatgaaatttgttgaccaagggaggcatttcatctgtaacttatgtgaaatgatactcctagagactacatgtgcaacttagggcctgatggtaggcgacgtgatgctgatgacaggcctgaattgtctagaggaacagttgaatttgttgctacgaaggaatttctggttcgtgatccaatgcctgctgtatacttcttccttattgatgtctctatgaatgctatacaaactggtgcaactgctgcagcttgcagtgctatttctcaggctatttcagatctgccggaaggtcctcggacaatggttggaattgcaacatttgattctgctattcacttctacagtcttaaacgtgctcagcagcagcctttgatgctcatcgttcctgatgttcaagatgtatatacacctcttcagactgatcttattctcccagtttctgagtgccgggacaatctggagcagttgctagaaagtatcccaagcatgtttgagaataatagggttgctgattctgcttttggagcagctatgaaggctggcttcctggcgatgaaatctaccggcggaaaacttctggttttccaatcagtgctgccatcacttgggattggttctttatcagctagggaagctgaaggtagagcaaacattacaactggtgacaaggaagcccataaacttttgcagcctgttgacaacaccctcaagacaatggcactagaatttgctgagtatcaggtctactactactatccgttttctgctctttcagatccagccaagctcttcaatgatctcagatggaatatcagtagaccccagggttttgaggctgttatgcgtgtaaggtgcagtcagggtctccaagttcaggactattatggcaatttctgcaagcgtgttcccaccgatattgatcttccagcgattgattctgacaaaactgtgatggtcacgtttaagcatgatgacaagttacctgaaaatgtggaatgtggcttccaggtctacctcgggctatgctgcgttccttggtgacaacctgattttctggtcttccaagcgtca

SEQ ID NO: 30099 - DNA, 1219 bp, Zea Mays
ctatacttggaagtagatcaaggaatatcctgaaaatagataaaattgaaatctcattcactttcaaacttatttttttaatgtgttgctaatatccttaatgtgttatcatgatactatttaatcttttatctcatcttacctagaggcgttgataatttttatagctcatgatagcagaaaaatatttgagccgactcgtgctacccaatggactagcaaggctacaactttttagggttatggcatgactgagtctgctgccgttggaactcgtggcttcaatacttcaaagcataagaagtatggttcagtaggactcctggctccaaacatgcatgcaagaattgttcatgtggaaactggttgctccttgcctccaggctcttgtggggagctctggctccatggtccagctataatgaaaggttacttgaatcatgttgatccatgcgcaataaatggtggctggctgcgaactggtgacattgcctacttcgatttcgatgggtacttgtatatagtgggccgcttgaaagaggtgatcaagtacaagggatttcagatagctccagctgacttggaagcagttttgatcgaacaccctggaattgttgatgtggctgtgacgtctactgaggatgaagaagctggagaggtaccagtagccttcgtggtgaggaaatctggaagtggcctatcgtgcacgcaagtgatggagtatgtagctaagcaggtgtccccgtataagaaggtgcggaaggtggtgttcgtggagtcgatccccaagtcgccggctggaaaggttctcaggaggcttctcagggaatctcttgcagctagcgctgttgctggtccaacaagttattccgagtccaattccatgcgccattcgagactgtaactgcaggacaaggccagccaagcaggatctcggtcaggaacagtttccagctttattttaggttgccgtgacctgaataggccttctgtatcacagttaggggcttagcacactcacatagatgaacaaagaccttttggattagtttgcttgttgagcaaaattcaaagtgtaaggaagatgttttgtcttcttcttctctttgtgtccttccgttgaaaaataccatggtcaaatctttctacaatctgaaaagaaggtagccaagtgatagttcgtagttcaagaaacggtttcacgctatgttggtcctat

SEQ ID NO: 30100 - DNA, 4536 bp, Zea Mays
  misc_feature (1)..(1): n is a, c, g, or t
ncccgtctccgtctccttctcctcctccccgtcgccgtctccgagtctccctctatttctctccgcccttgttcttctcctctctccctctatcttattacctcaagtagaagtagtatatattttttgtccgccttttcaatttttccttttatctccctgcgtctcttcgtcgtcctcctgctgtggcggccgccggcgatccccgatcggcgatactcagattctagttgtccattgtgctgcactgcagcagtagacaatcgtgtttttcggtgttttgtctgtctctccttgatcattcagatgcctgtacagctcaactgctatagctagctgtatatatctggttgaagaggactaatctagcaacaatgtcatcgcttcagttattgcaactaacagaacgggggcgcaaccttttgtcttcaagaaggagaacacttgcaattgtttctggtgcagtacttgctggtggagctttagcatatgcgcagtcaggtcgatggaaaaaacaccaggaagcaaattcttgcagtgatgcaaactcacatagcagtaataacggaagaactagtcagaacggcattgatggtaaattggttaaaacaaggaaaaagaaaagtggactgaagtccttgcattttttggctgctattttacttaagaagattggcccgaatggaacgaattaccttattggcttgatactaacagcagtcttgcgtacagctgttggccacagattggcaaaagtacaaggatatttattcagatctgcattccttcggcgtattccgacctttacacgtctcattattgaaaatcttcttctatgctttctccaatccacgttatatcagacatcaaagtacttaacagggtctttaggcctgcgcttcaagaaaatcttgacagatcttgtccatgctgattattttgagaacatggtgtactacaagatctcacatgttgatcatcggatcacaaacccagagcaaaggattgcaagtgacataccaaagttctgctcagaattaagtgaccttgtacaggatgatctggctgcaattgtagaagggttaatatacatctggcgcctctgctcttacgcgagtccaaaatatgtgttatggattctggcatatgttataggtgctggtggtacaattagaaaattttctcctgcttttggcaagctgaagtctacagaacaacagctagagggggaatatcgtcaactccattcacgattgagaacccatgctgagagtgtggcgttttatggtggtgagaacagagaagcatcacatattaagcagcggttccgggcacttgttaaacacttgaatgttgttcttcatgaaaactggtggtttggcatgattcaagattttcttctgaagtatcttggcgccactgtgggagttatcctaattattgaacctttctttgcggggaatcttaaacccgaatcatccaccttaggacgggcagagatgttgagcaatctccgataccacaccagcgtgataatatcactatttcaatctcttggaaccatttctattagttcaaggcgcttaaatattctcagtggctatgctaatcgtattcatgaattactggatgtctcgcgtgagctatctggtggccgtgatagattgattactcaaaattcttctgatggaaattatattagcgaggcaaattatatagagttttcagatgttaaggtggtgacaccttctgggaatgtcttggttgataatttgaaccttcatttggagtcgggctctaatctgttgatcactggtcccaatggtagtggaaaaagctcccttttccgtgttcttggtggtctgtggccaatggtatctggtcatattgtcaaacctggtgttggttccaatctcaacaaggaaatattttatgtgccccagagaccatatacagctgttggaacgcttcgcgaccagttaatctatccactcacagcagaccaagagactgaaccacttagctatggtggcatggtggatcttctaaagaatgttgatctggaatacttgctagaacgctatcctcttgataaggaagttaactggggtgacgaattgtctcttggtgagcagcaaagattaggaatggctagactgttctatcataagccaaagtttgctatcctggatgaatgcactagtgctgttacaactgatatggaagagcgcttctgcaaaagggttcgagcaatgggcacatcttgcataacaatatctcaccgtccagcattagttgcgtttcatgaaattgttttatccttagatggtgaaggagggtgggatattcaggacaacagaaatggttccttctctcccgaagttgagtttgatgtgctgaaggcatcagaaagtgatcgcaagtctgatgcacttaccgttcaaagggcttttatcaccagcacaaagggaaatgcgtcaatgaagcccaagaaacattcttattcaacagaggtcatagcatcttcccccagtatggagatagaacatacagtacaatcatctattgtcacacaattgcaatgctctccaagacctttgcctgtcagagttgctgcaatgtctcaaatactggttccaaagctatttgataagcaaggagggcagctgcttgcagtggtacttcttgtattctcccgcacttggatttcagaccgtatagcttcattgaatggaacaagtgtcaagtatgtcttggagcaggacaaagctgccttcattcgtttggctggcactagtgtgctgcaaagtgcagcaaattccatcgtgtcaccctcactgaggaaccttacttcaagaatcgcccttggatggcggattcgcatgaccaatcatttgcttcaatattatttgaaaagaaatgctttttacaaggtattcaacatttcaggtatgagtatggatgcagatcaaagaatgacacatgatgtagagaagttgaccaatgaccttgctggcttgcttactggtatggtgaagccattagttgatattatttggtttacatggagaatgaagcttttgtctgggcgaagaggggttgctatactgtatgcttacatgttcctaggtcttggttttctaagagctgtgtcccctgactttggggatcttgcaaaccaagaacaagaacttgaaggcacgttcaggttcatgcactcaagattgcggacacatgctgagtcaatagctttctttggtggtggatcaagggagaaagctatgattgacgctaaattcatgacattgctcaaccactcgaaggttctattgagaaagaagtggctttatggtatttttgatgattttgtgacgaaacagcttcctcataacgtgacatgggggctgagtatgttatatgctttggagcacaagggagaccgagctttgacttcaactcaaggagagttggcacatgctctgaggttcttggcatctgtggtgtcacaaagcttcatagcgtttggtgatattcttgagttacacaagaagttccttgaactctctggtggtattaacaggatatttgagcttgaggagcttctacaggcatcacaaagcatgccacaagcgtggacgttgaggagcatctgtacaggctagcaaccaacatgggcataacagtcatcacatcctcacaaaggcctgctctgattcccttccattcgttggaactgaaactcattgacggcgaaggaaagtgggagctatgttccatccaccaataaccgattgccatcaaccagtttatttatgttcaccggagtagggtatttacaagttgcaacgcacagaggaaaaaaaactcgtccactcgggtgtagagtgtgtgacggagtcttttttttttttggtttcccttttcttttctttttctctcccctttgatggaaatcttgcgatacggaaagggagggaggaaggaaatatacggcaggaaaggaaagtattaggagaggttatagatgcaggcttcgtcatttgggatagcatagtacatgttcctggcatgatatgccagcctgattgatttttatacgagatacagaataagttaaaataaaaatggatatggcacaaagtgtgcccttgtaaattaaatgggaaactaatctataggaaattcatcctctctgtgtcgcccttgcatcgaacgtatcccaatccatatgtaatggcctaatgggaagataccgtatgcaatcactcatatttgcgagaaaaggaatcggcaattaaaatactacacattctgtgaggttgtggtgtttggaattctagtttatgctattttagtggtaattatctacaatgttctagaagcaagtcacttttatgatgcgcccgctaacaaggcaagggtattttatagttagaatctaattgacggataccgtacgacaccctaactaaatttaatactcataaaaaataaatttaatatcaaagtactcataaaaataaatttaatatcaaa

SEQ ID NO: 30101 - DNA, 2040 bp, Zea Mays
gccacaccaaagaccaaacttggctcgtgtcgtgtctcagtgtctgccaccgagacaaaaatcgtcgtcagaaatttaacgacgcatattcgtctgactgacccgcccgtgcgccttcctcccgcctccccttccaccaccaagagtgacgacagagagacagacagagagaatggcggcgccagatgcccggccctcgtcagccggtccaccgccggcccgctccctcctcctgcctctcctgctcgtgctcctcctcgcggcctactcgctcccagccgactcagcagcgcgcccgtcctccaactccaacccacggcctgccttcacgccgccgctgctgaagcgccaccagctgcggcgcccgagcagcagcagcgccgagctcgtcgccgggcccgccaacgcgtcgaccaagcccttcacggcgcactacttcccgcagctgctcgaccacttcgccttcacgcccaacgcgtccacggtcttccgccacaagtacctcctcaacgacaccttctggcgccggcccggcgccggcgccggcgacgacggccccggcccgctgttcgtgtacacgggcaacgagggcgacatcgagtggttcgccaccaacaccgggttcatgttcgacatcgcgcccacgttcggcgccctcctcgtcttcatcgagcaccggttctacggggagtcgaagccgttcgggaacgactcgtacaggtcggccgagacgctgggctacctcacgtccacgcaggcgctggccgacttcgccgtcgtcatcaggggcctgaagcgggacctcggcgccgaggccgctcccgtcgtcgtcttcggcggctcctacggcggaatgctggcttcctggttcaggctcaagtacccccacgtcgccattggtgccctagcttcctccgcgccgatcctgcagttcgaccacagacaaagggctcctggacctcagcaaactcttcagagcctgcaagactgtgaagtacgcttattcaatccggaactggctgtggacagcattcacctacactgccatggtggactacccgaccccagccaacttcctggagaacctgcctgcctacccagtcaaggagatgtgcaagaccatcgacgcgttccccgcgggcgcagacgtcctggagaaggcgttcgcggcggcgagcctgtactacaactacacgggagaccaggcctgcaacaagatagaggacggagacgacccgcacggcctcgatggctggcaatggcaggcctgcacagagatgatcatgcccatgacgatctccaacgagagcatgttcccgccgtccgccttcagctacgacgacaggtccgacgagtgtttccagagctggggggttcggccgaggccgcactggatcaccactgagtacggtggatataaaatcgataaggtgctcaagaggttcggcagcaacatcatcttctccaacggaatgcgagacccatggagccgtggcggggtgctcaagaacatctcgtccagcatcatcgcccttgttacagagaaaggtgcccatcatttagacttgaggtcttcaacgaagggtgatccagactggctcatagaacagaggaggcaagaggttgagatcattcagggatggattgatcagtatcatcaggacatcttcatgaaaacaggacaccttcctgttacggtcatgtttggatccatggaaaaaaataaaggacaaaaaatcaataatttacacactaaacatcagaaattgctgaatcttacacaaagcaggcccctttgtgaattagtaaggggtggtgcaggtgctgggacttcaatccgcgccagagcagtgatcgactgatctcgcaggcctctggccagcggaccaaggcagtcttgagtcttgactcagtttctgttttttttaactgtattgtttcttcttttgttctcggcaaggaacagtcttgacatttttctctgttttatgcatgtagattagggctgggtatccatatttcgagaaaataatagtaatt

SEQ ID NO: 30102 - DNA, 2016 bp, Zea Mays
cccgtccctcgcagcaccgatcctgccgtccacctgttaataaatcgcctgagtttagtcgaaacacaatcgttaaaatgcagtaaagtaattcacgacccccgggcgcccccgtctccgctcctttattaatatcgccgcggcctcgcacctccatctgttctatatcgccccattgctcgctcgccaagagttcttcttgttaggcaaggcaaaagcagaagcaaaaagagaaaggtcttgttgccgatggggagctcagggttctcgtggacgcttccggaccaccccaagctccccaaggggaaaccggtggctgtcgtcgtgctggacggatggggcgaggccaaccccgaccagtacaactgcatccatgtcgctcagactcctgtcatggactcgctaaagaatggcgctcctgagaaatggagactagtgaaggctcatggaacagctgtgggcctcccatctgatgatgacatgggcaacagtgaagttggtcacaatgcacttggtgctggtcgaattttcgcccaaggtgctaagcttgtcgatcaagctcttgcctccggaaagatttatgatggagatgggttcaactacatcaaagaatcttttgaaagtggtactcttcaccttattgggttgttgagtgatggtggtgtccactcccgtcttgatcaactgcagtattggtttcgtggagaccctagagaatgatcttttggagcttagagcgaagggtgttgatgcacaaattgcatctggtggtggaaggatgtatgttacgatggaccgttatgagaatgactgggatgtggttaaacgtggttgggatgcccaagtgcttggagaagcaccctacaaattcaaaagtgcacttgaggctgtgaaaacactgagagcacagcccaaagccaatgatcagtacttgcccccatttgtgatagttgatgacagtggcaatgctgttgggcctgtattagatggtgatgcagttgtcactatcaacttccgagctgatcgcatggttatgcttgcgaaagcactagagtatgcagattttgacaactttgaccgtgttcgtgtccccaaaatccgatatgctgggatgcttcagtatgatggtgagttgaagcttccaagccgttaccttgtttccccaccagagatagatagaacatctggggagtacttggtgaagaatggcatccgcacctttgcttgcagtgagacagttaaatttggccatgtcacatttttctggaacggtaaccgttcgggatactttgatgcaactaaggaggagtatgtagaagtacctagtgacagtggtattacattcaatgttgcacccaatatgaaggcgcttgaaattgctgagaaagccagggatgctctcctaagtggaaagtttgaccagattattttggatgctgtcgagcaagttggtggtatttaccttgttaccgccgatcatggcaatgctgaggatatggtgaaaaggaacaagtctggcaagccgttgctcgacaagaatgaccgtatccagattcttacctcgcatacccttcagccggtcccggttgccattggaggccctggccttcaccctggagtgaaattccggaacgacatccaaacccctgggctcgccaacgtagccgcaaccgtgatgaacctccacggatttgaggctcctgctgactacgagcaaaccctcattgaagtggctgacaactaaacactggccacctgtgtccaattttggttatatgtagttctgagaatggacattcaataatttatgtttgcaagcacgttgctcaaactcaccaaaacatcgagggatgccttttgactttggcatttacagcattttcgtttggctttaatccttatcggtttctattgcttctgtttcatttctatgtatcatagctgcagtagttcgaacaactgtctttgcacaactcattagatgctctatttatataccgttgacgattgcctcct

SEQ ID NO: 30103 - DNA, 957 bp, Zea Mays
agatattctacttccttccctccatcccggtggaacgtgaaaaataagagatatgaaactgtagatgaaagtttatagggataagtttgaaatttcatctgggaggagataagagatatgctagacaaacggctcatgggagaacggaggaggcctcgattctccaaggttctccttgtcgacttcgcgcgcgaatcggaattcgtcagaagtcatgctaccagcatcagcaataagctttcctgtgctcaccagcacgaagaaggttttgaaaacatcacccgccgatatctccccagactgtgctagcttcccaccataccagaagtccagtgcccatgacaagaacgagaggcaaggtgacaaccctgtggtgatccctgctacccatgatttcttccttgcttttttcaagggttcctcttgcgcatgctcgaatagctgaagaacctttgatgaacatccaaaggaggttaccatcctgtggttgtaaacagcttctatggcaatctgggtgctttgatgctgagcctttgccaagtcccttgacacatttgagagaaccattttttttgcataataacacatcattgtagatggctgtacagctatcatgacaagagcaagtttccaagctaccatcaggcccattgtcactgcaattataattccagaagctgtttgaagcagtaaggatattctgtctgcaacaagggttttgacaagagaagcctcattgcttagccgagagcacaatgcaccgcttgagttagtttcttcatcaaaccatgctgcctcaaaagttaatatcttctcaagtacttggacccggatgcgcctaacaagatgctcccccatgtatgcaaaattgtagtgctgcaatagattaacaacaatggataccaaggacagtgagcagaagatcaaggcatagcgtctgataattgcattcatctc

SEQ ID NO: 30104 - DNA, 1559 bp, Zea Mays
cggtagccctcccaccgccgcgagcccgcaagaataaacagaagagtagagaaaaaaccaaaccaaaacccggagccctcctcgtctcccccgttcggcggcgcgacggtagagagattccgtcgaacacatggccgctctcgcctcagccgcccgctcgaggcgccggctccttccctatctgtaccgcctcctccactccgcgtccacaaccgctgtctccccgtcgccctccaccagccgcttcctccgccacgcctcgccggtgccccgcacccctgaccactccccttaccttcggttccccgccgcgcgcgtctctacgctcccctcaggcctccgcgtcgtcacgcaggcctacccggtcgccacacggattgcctccgtcggcgtctgggtcgatgcggggagccgcttcgagctccctggaaccaacggaaccgcacacttcctggagcacatggccttcaagggcacacggcgccggcccaacgcgcaggtgctcgaggtggagatcgaggacatgggcgcgcgcctcaacgcgtatacctcccgcgagcagaccaccttttttgccgacgtgcaggcgcgccacgttccggcggcactcgacgtcctcagcgacatcctacagcacccgcgattccccgaaagggctatccagcgggagcgcggcgtcatcctccgtgagatggaggaggtgcaaggtatgatggaagaggtgatatttgatcacttgcatgcagcagcattccaaggccatccactaggggacacaatattaggtcctgaagaaaatattaggtccatttctaagaaagatttggagcaatatatctcaactcactatacctgtcctcgaatggttgtatctgctgctggaagtgtcagtcacgatgaggttgttgatcaagtgaaagaattattcacagaattctccactgatccaactactgctgatcagcttgttcaggcgaacccagctatttttactggatctgaggttcgtgtagaaaatgcagagtttcctctagcacacatcgcaatagctttcaaaggttcatcatggactgaccctagctccattccccttatggtgatccaaagcatattgggatcctggaacaggagcattggggttgggaactgctcagggtcttctttagctcgtggtatcagcaatgctaatttagctgagagcctgatggcgttcaatactaactatcgggacacaggaatatttggcatttatactattgctccgcctgacaccctgcaagacttgtcacggttaataatggcggagtttagaagacttgcatcccaggtgtcagaaacagaggttgcccgtgcccgcaatcagctgaaatcttctctgttacttcacattgatggatccactgcagttactgagaataatggtcgccagatgctaacttatgggcgagtcatgccgttcctagagctttttgcacgcattgatgctgttgactgtgctacagtaatggaaactgccaaggagtacataattgataaggtctgcagtatagtggtcacag

SEQ ID NO: 30105 - DNA, 1417 bp, Zea Mays
tttagggtttgggggatttgtgggctgttttgcagcccgttttggcgtggagcccaaatttacacgtttttttggccaaagtgctttttttcgcccccagccgaaaccaccgaaatttcggaatttccatttggaaattgctaaccctggtaccaactaccgagttaatcaacttaatgtcataacatgagtgcagccagagcatcaagcccatcacagttgggtccatcttaatgtgtaacctaagggacaccaactgaattatcaagagcagtaaatgctggatctcaatattagtaggactggatgcaaaacggaagttgttcaagcttctggacttgctcaaaagtcttaagattgttaatatctatggatattttttttttcaaaacaaaaaagttatcaacctgttgttttgtagtacaacaattgtttgttcgaagtgctctacaaactggcacccccccaaaaaacaattattgaaactaatatttatgttgttgcccccatatttatcagacatccttcatatcctctcttacatgccaaaaggtctcaattttattgagcacacaatcaatattggttggaaagagcatcaaagagctcgacctatcattgtagatccagcactgcaggtcccaaataaaactgaggttgtaacgacaaaggagaaaaggagttcatcttgggtgatgcttagtcgatcgttcctggagttttgcttgcgatgggacaaccttcctcgcacactactgatgtatttcaccaacttcctctcatcctcagagggctacttccacacagtgatctgcaactcagagcactaccagaacaccactgtcaacagtgacctgcggttcatggcctgggataagccccctctgacgcaccctgttaacctcacaacagagcattttgatgcgatggcaaacaacggggcgccatttgcacactctttcgccaatgacaattcagtcctggatatgattgacgccaagttgttgggccgggcacctggccgcttcaccccgggtggatggtgtttgggtagctcagtaggcgggaaagatccgtgcaccttcttgggaagatcctttattctcaggccgaccaaaggttcggccaagctagagaagttgttgaaacttttggaacctgataacttcaggcctaaacaatgtaaataggactcattttgcatgtagcattttgtgggtactgttcagaagccaaagtttgacgaaatctttctagttattgcggcagttaggcatacatacaagtgtgttgttgtatacttgcatctggaaagcttatctcaaaagtgatttgagaccatacatgtactactgcggtttcatcgcttccacggatgttaaacaaccgatgataatcagagacttcagcaattttc

SEQ ID NO: 30106 - DNA, 1591 bp, Zea Mays
ttacgccgcacctggggcgctcgttttggccgccgcacgccgcacgccccactcctcctctcacctcacttgctcgtcgccgcacctggatctggctctcgtctcctccaagcacggtgaggttcttcccctttctacttttcactttgctccccagtggttcgcctccatcctccttccctgcagcgctcgcctcgttcttcacctggatccggcgtcggcgtggggacgggccccgccgcgtggcgctggacgcgacagatcttgagctgcgcgtggcgggctccagtccgtggctgtggcatgctggaccggcggctaggcgggcgcgtcctgctccaatccggctaggcgggcgcgtcagccgcgagctaatgagcagatggaattataaagctcccaagaacagcaaatccggtctctgtccaacaaatccggtctctccctcgagcagtcgatctcctccggtctctgccaagaacagcaaatgagcagagctcccaagccgttcaatcttcaaatcatgccgtgcttcttcctttttttgccatgctcgtccggccaccaaaacagcaaatggcctattttctccccctctctgtctgtctgccaagaacagcaaataagcagagctccaagccgttcaatctccagaccatgacgtgcttcttccttccttttttttgccacgctcgtccggccaccaaaacagcaaatgggctattttctctccctctctgtccgtgtcttgttgtagcatctcatgattcttttttctacttgtacaggattaggagtgcacctattttgattctgcgaactgagtaactgattctaaaggatagggcaagaaggctcctttctaagcctatcaagtttttcaatgaaatgcaagagttgtttattaacagcagtgctgatggctctctagccatggaagctacaacttgtatgaatgaaactcatcctggagatgacagtgacttcaatgatgatgtgtgcagtgacttctccaactatcctcagcctgtgcatgatctagctcgtcaagttctggactgaagcgcccacaaggagagggagtaccagcgaagaggaacgtggaaccaaagagtcgcacaacaaaggaatgtatctagcacacaaagatcaaaagggtatgcgtggtttcttatctgctgcatcagacataacatttgagtcatgggtactaaagcatctgagtgatttggacctatgaatcgactagcaggatgatccatgtaggagatgaatggtgtgatagttggggtttttgcatttcttctaggttgatggatgtcaattgatggagatatttggtggttgtgactagtgttacattgctctttttgttgatttttaactttgagggtaccaatgagcatagtgcatagcaccagtaccttttacaattatggaatctctgcaaagcaaggaaggcattggactgtaataaattttgctccaatttcgcattgcaaatgttctagtagtgtcagatttttctctaatgcttctagtgaaaaatgagaccttttggagacagtttctaaattttgtgtgctgctag

SEQ ID NO: 30107 - DNA, 543 bp, Zea Mays
ccggaaattaggtgccacctgttctagacctgcatatgtagccatgtagataaaaacatcactaaagggaaactaacgatagatgttgcatacttcatcttccacgtccactcggaaactcataacctctgtgatgagacttcttgcccagtaacaggtgaatttgtgctagctagccaacagacattaccatcgttcaccccgccaggttcctacaccctcacgatgaagttgctgggggacagcaacgaggaactgacctgcatctctttcgggttcagcatcgggtttgttgcgccgaatcccgtcatctgaacccagtatcgaatgtcatggatgtactttacatgaaccttgtagtgcaacattctccataagactcggaacgtgtgaccaactgctgtcttgcattcggagttgggcgcctgacctaacgatcttaactgcatacagttttatcatggacctaccagagtttggtgctccgtgctccatgtcagcatgccttttacatgtatataagactatgtacaacggctccca

SEQ ID NO: 30108 - DNA, 2474 bp, Zea Mays
gttttttccggccgggagcccttctcctccaccacccgtttctctttctctaggctcgcgcctgccccgccttcgttgtcgcgcctgccacctgctcgacgaatcgccgcttccgccccacgccgcgatgccgacgcccctcgccgcggcgctgctgccactgcccgcctctcccgcactgcactttccgcggccgcggcccggtccctcatggcgtgcgcggccggccgtggttagggcggccgctctccgcgccctgccacggcgcctcgagctctgtccgccgtgccttgcggcggtcgagagtaacccggccccgccacccttagctccgccaccgccggacgaggcgagcgccggctcaggcctcgatgcgagggccgggggaggtggcggtggtggtgacggaggtggcggcgctgatcttgggtggttgagggctttcccgcatgtgttcactgcgtcaatggcaaacttcctattcggttaccacattggggttatgaacggtccaatagaagatattgcaacccagcttggttttcaaggaaatccgttcctccaaggtcttgtggtgagcatattcattgttggtgccttttttgggagcttaggctcatctgcattagtagataagttcggctgcaagaggacccttcagatcgacagtattccattgattattggagctctcctgagtgcacaggctgattctttggatgagatgcttttgggaagattccttgttggcatcgggatcggcgtaaacactgttcttgttccaatatacatctctgaggttgctccaacaaaatataggggcactttggggactctgtgtcaaattggaacatgtctaggcataattgctgcactttccttggggataccttctgagagtgatccacattggtggcgaacaatgctttatgctgcatgtgtacctgggattcttattgttgctgggatgcaatttgctgttgagagtccacggtggcttgccaaggttggaaggttcgatgatgctagaaaggttgtagagagcctttgggaaccttctgaagttgagaagtccatggaagagatcaaagctgttgtgctaaatgatgattcacggggcagctggtcagaccttctggtggaaccacataatagagtttgctggaataaatggtgttctttatttttcatcattgacattccgtgatgttggtatcagtagtggtgctttagcaagcttatatgttggaataaccaattttggaggggcactagttgcttcaaatttgatggacaagcaagggcgaaagaagcttttgataggaagctaccttggaatggcttttgcaatgttccttatagtatatggtattagcttcccgcttgatgaaggagttgcccacagcttatcaatcgctggaactcttttgtatgtgctttcactttctattctctctagcaaaccccttaggggcttgggctggtttggtgacaagggaattggaggggatccatggaggaggaaatccattgctatacaaaattgttgttcttcactagcagaaggcttgcttagaaccttttgtggaaattatacctgtgggtttctcaatgtatggaaatcatttacttacatcatgaacaatgtgaaaggttttctagtacgatctctgcttcatgatatgatgataaatgaattacaccttgttaatgtgtaaagaaaccactaattcagaatatttattagaaattccacttataaaatttgtgtttataatttttaaaaagattgttagttgcgagatctattttttttcatttgcaggtacatttttacttttgcaattggtgctggaccagttaccggtatcattataccagagctcagcagtgctcggacacgctcaaaagttatgggcttcagtttcactgtgcattggatatgtaactttctggtgggactatttttcctggagcttgtgcacaagtttggggttggagcagtctatgcaggttttggtggggtctccctgctgacagcactcttcgcctacaatttcatagttgaaacaaaaggacgttcgcttgaggaaattgagatgtccatgagcagtgctacccctggcaagcaagagtagaacatctcaactgtatggacaaactgaacaactgacgggaggaatttaataagagaagagggggcctaatcccatgaatcttcagcagcagcagtttgttgcaaacaacatcaactcctatagataatgagcacaatcaaattcagcttttctttggtagcatgagaatcgttgtacaatattaaaaagggtgaagaaaacgacccttttaatttgttttttgtacatctgatgtatatattttacgccttctgtagtacgtaaaataaagggaacagatctttctgatattacttgattgatgaatttggaatattcgcatcctttgttctggca

SEQ ID NO: 30109 - DNA, 266 bp, Zea Mays
agagtgggaaaggccgaagaacggcaattaagctgacaataattgaaaacgaagctgtctcaggcaaatacaaattaaaagcagcatccatcgtacgagtacatcatagtctcatagcacaaaggtgataaagggggtcatcagttcatcacatcgctaatatatcattggcggcgttcctatccactatcctgccagctccgggcgcgcgatcttgcggcggtgcggcgttggcggcggcggcgggggagcaccggggtgtctgc

SEQ ID NO: 30110 - DNA, 1749 bp, Zea Mays
ctgatgtgtttggatgcattggtggagccaaacagaaacatcacgtatagagaagaggcgatcaagaccatcatacgttctctgagatgctgcctgtcagaggacactgtcgtgcccagcactcggagagctctgctgctgctgggagggcaattcaccttctcaggcgaccttcacgtagaggactggatgctggaacatgccggcttcgtcgaccactcacgggccaccactgccacttctgatgctgttgtaaatgacaaggaagcggccgaaaacgatgcgtggctgagacacgtggccgcggcgctactcggcagccgtagcgggatcaggagaccgttcctagaggcgctgtccaggtgcctgggctcccccgacgccggcctggtgggggcgtgcctgacgatggcctggtggaggttatcagtgagaaaatagatatctgggtaaaccacctcttcagctatgattttgcattttggttttatgcaaatgttgcctatcatattattgaattgcaactatttttttgtactgattaaatactaatagtgccatgagttaacgttagtgttttgtgattttttacaggctcatgggtgtctcttgtataaaatctgcacagaatattagctgttggttatgattatggaaggtcttgtttttagctcatgaatataggtttcaaattttagttgttttttattaggaaggtcgaatataaaagtaactgattttattgtatgtacctgattaatctaaaagcattgaaataattctgctcttggctcgagtatgtatctgaggtatacagagaaatggaacgtgttggatacgctccagatagaaaggctagaaaaatgtttcatataaaattttttactaccgtcgcaacgcacgagcacatacctagatgagtctgtctgttactgcgaaaagctacatacaaattataattgtgggcacattttcattactaatagttttttgttttccttctttttttacctgaggttacaaagggtgcagggtattctccacggcagtgtgtccaatgatcctaaacaagacaatatgtatttgctctttattatcaattcatctatattgtgaaaatctgaaagaacgtggaacctgaaactattgtctggtgggctggtggctgattttcattcaattgggctggtacacctctgttttgactcccatacaccaagaatcgagggcgccagcatccgtgggagtaagactctccggctttgaaggaggagacaaaggccgaagggcagacacattgccttctgttcatgctgcttgatgttgaaacaccaaccactcaccagtcatttactctcacttgctcattggatcatgtgcaccaccatagttagaaacctttatgtcacagttagcgcaatgcattgggatttttttgctatgcacagaatacgaaggttatattatatctctatattttgaatgggagtcattgaagcctaggcaaggtacttgtatttggatctggcataattacaatcatcctgtcatcatcagtttcactcctctggctgctccttgtgtgtgtccactaatgcgttcagcattgcaactgctactgccaaatgctaaggcagcagtatacatagctggttcagtttgtgcagcatttgttgccaacatagatggtcactctgataaaactgtcaccttcaatgggaggatgctcagaaatttggtggctggtgg

SEQ ID NO: 30111 - DNA, 2568 bp, Zea Mays
ccgtccctgtgtggctcgtgtggctggctgtgtcctccatcctttcaaggacctcgggaatccagaaaattccggtggtcggtgcccacggacaggcgtgtgcgccacgagcccgacgaacaagggaacgaggccatttccaccggtcaaactaggagaagcaagcaaagctccccgccattagtagaatccgcccgaagtctgccccgctcttcggcctcgtcccttctctccagggccatggatgtagatgatgtgctcagtaacttgcgtgttgttggtgtgccaacaaagagtgcaatttacatatggggttataaccacagtggccagactgcccgaaagggcaaggaatgccacttgaggatccccaagagcctccctcccaaactattcaaattggggaatgggaagagcctcaggtggaccgatattgcatgtggccgtgagcataccgctgcagttgcttccgatggatcactgttcacctggggtgctaatgagtttggccagttgggagatgggacagaggacagcgcgaaagagcccaagaaggtcaagtcattggagactgagtttgtaaaatcagtatcctgtggcgcacattgtacagctgccgtcgctgagcctcgagaaaacgatggcacggtatcgaaaagcaggctttgggtttggggacaaaatcagggttcagattaccctcgtctattttggggagctttcacaccaaacacggtgattaagcaagtttcttgtggagctgttcatgtcatggctctatccgaggatggtctactgcaagcatggggctacaatgagtatggtcagcttggcagaggtcgcacttctcaaggacttcagggagctcgtgtgttaaatgcttatgcaaggttccttgatgacgcccccgagcaagtgaagattgttagagtgtcatgtggagagtaccatacagcagctatatctgaaaatggggaggtgtaagtccattagtcatcccaagggagctgttctctgctgccagtgactgttgtatggtttctcacatgacaacatagaagcatttggaatattgaagactaaccacgactaactatagggctaactgcaaagaaaggaagtaaatacatttatattatagatctcatattgatcaactaatctcaatatggcgtcagggttactctaaatagctttctgctatttaagatctttgtgcacatagatcgaagtgggccttctcttgagcatcctagtgtcttagtgaatgcaaagaaatgtgaagaattaaatggatgttgttatatcattattatagttgaataacttgtcaatcatttgctgaatctatcgatttgctagcttatatacgacaggaaaaaaaaaagattgttataatttcactttcaacatttgtagtcaaaatcattccgatttcatacttttcgcttttttgatgattgaaaacctattccaagtagggacttgattatttgtaattataatatctttggtttttgcaggtatacttggggactgggaagcatggggcagcttgggcattgctccctccaatctggagataatgagctgatccctaggcgagttgtggcccttgatggtatagtagttggggacgtttcttgtggaggtgtccactcttgtgctgtaactgaagggggagctctatatgcctggggcggaggacatgtgggtcagctgggagtcgggcctcagggtggcttcttctcttgctcccttaatggatccgacatgctgctccgaaacatcccagtcctggtgataccctcaggtgtgttggtgaagtgagacgactcgccgctggaggtggccattctgctgttctgactgatgcatgttcgctgaaagagctgtgcgaattcaagctcgcagagaccgtgaacctttcaaatgctcagctaatagaagatgttgcatcgcggactggtgcggatgccttggcacgcttgtgcgagaaagtaagggagcatttggataaggaaggagaatgtgaattcctggaaaagcaagtggcagaagaggtcaacactataggcagttaggccactagcaaaacagttcaagcagtctgaggctgaagccagtctgggattaaacagggagtcatctacaattgatagcttgacctcccagtaaagttactgattcggacattaattgttgtggtgatcatggaaaatatgtgactcgtcaattgattctgattggtctgtagacctccattggtggtgagcctctcagctgcatcggggaggcgcagaggctctatatgtgtcatgatcttgttccgaactgtcaggttgctgtaatgtagccaaatggaaacctttgtatccctggaacttgaaaggcatgtacctggtatctgcagccagtaagtttggcaatctgaattcgatgccaattcctgggcgtattcgaacgtcctacgtccatgtatttatttcagttcatgtgcatctaaacaatattggtatagcatgaaatttaagtacatcaacacacatttaataggattaacagaat

SEQ ID NO: 30112 - DNA, 3000 bp, Zea Mays
cactgccatggcggcggcccgacccgctcgcccactcggcgctgctccgcctcctcgcccgcgcccgccgatttggacgccgcggacgccgcactacgctgcatgtccctcgcgggggccgcgcccacgcgcgggagcctcggcgcgctcgccgccgcctacgcggacgccggcatggaagagaaagccgccgaggcgtgcgcgcgcgccagggaactgcacggcgcgctccccgacgcgccggactgcaactgcctgctcaggctcctcgtggagcgccgacggtgggagcgcgcccgggggctgtacggcgagatgctcgtccgggagggcggcgcggatgactacagcacctgcgtcatggtccgcgggctgtgcttggaagggcgggtggaggaggggaggggcctcattgaggccaggtggggagaagggtgcgtcccgggtgccgttttctacaatgtgctcatcgacgggtactgccggcgtggggacatcgggagggggctgctgctgttgggcgagatggagacgaaggggatcatcccaaccgtggttacgtatggtgctatcattcactggcttgggaggaaaggcgatttgacgaaggttgagagcttacttggggagatgagggcgagagggctgtcccccaacgtgcagatttacaacaccgtgatcaatgcattgtgcaaatgccggtcggcgtcacaggcatcagatatgctgaaccaaatggtcaaaagcaggtttaacccagatgtcgtcacgtttaatactatgatagcagggttttgccgggaaggggatgttcgagaggctctgaaacttttgagggaggccattaggagggggttggaaccgaatcagttaagctatacgcctttgattcatggcttctgcgtcagaggagaggcgatggttgcatcagatttgcttgtggaaatgatggggagagggcatactccggacatgatcacacttggagcattgattcatggcctcgttgtttctgggcaggttaatgatgccttgattgttcgggagaagatggcagagagacaggtgatgcctgatgctaacatatataatgtgctgatcagtggcctatgcaagaaacggatgctttctgcagctaagaaccttcttgaagagatgcttgagcaaaaagtccagcctgataaatttatatatactactctgattgatgggttcgttaggagtgacaaactcagtgatgcgaggaaaatattcgaattcatggaagaaaaagcctgccctgatattgttgcctacaatgttatgataaaaggatattgtaagtttggaatgatgaaagaggcggttacatgcatgagcagcatgagaaaggctgggtgtatcccagatgagtttacatatactacacttgtcgatggctacgctaaaaaaggtgacataagtgcatcacttaggcttttatgtgatatgatgaagcgaagatgcaagccgaatatttttacatatgcatcactaatatgtggatactgcaacatcggtgacacatacagtgcagaagatttatttgcaaagatgcagtctgagggtctatttcccaatgttgtacactacacagttctaattggtagtctctttaagaaagataaagtgatccaagctgcagcgtactttgagcatatgctgcttaaccattgccctcctaatgatgctacagtgcattatttagtgaatgggctcgtaaactgtaggcacggtatggtcaactcaaaccgcagtgatactaaacaggctcacgagaagagtgcccttttagatgtattcaggggattgatttctgatggattggacccaaggatttcagcgtacaatgctataatcttcagcttgtgtagacataatatgcttgggaaggcaatggacctgaaagataagatgtctaacaaaggctgcttgccagaccctataaccttcctttcacttctttatggattttcttctgctggagaatcagggaaatggaggagtgccttacctaatgaatttcagcaggatgaatttgagataatcaccaagtacatggcattattcaatcagcatgtaactagttcagttgtaggtgaagtctctaggattttacagttatattctgaggagtttcagttcctcaaacaaccagagcagagattcgctggttcctgacccccacaatgtcatggtttacctggcacttggaatcaaggtataacaagaagaatagcatggtttgaaatgccaaggaagctcctgacagggtgtttcctccagcaatgaatttcaagaccgcaagtgcaatctgcaaggcaaagtttccggtggggatcgtccttgaaggtacgcgaattaaatcagccgctccctcgttacagccagcagcactgttgaaactttttcccccccacctgtaatgttagacattagccaaaaacataaagttatttcccgtctgcatatatacttgtgtacatagctgctgaccccataccgagcttctgaccgtgttagcatctagcgcaagaggcatcccgcatgacaatagaactgttttacggatcatcaccaccactagaagtcggagcggcgtgtcccaaccccaaaaatattctgttttcatctagtataaaacctgtctactggacgcaagagggacctggcaaaattacttgaatgcaatcctgatgttttcttcaccgtcggcagcttgaacctttaccgctgatgtcagcattgcgcagcgcaatatttgatatgtctacatatgctgtgcggtggaattgttcagatgctccgcggtgacttcggcgtcagattttattgggccgtggcgtggaatggactgtactgcaagcctcacgagaagtgcaacgcaaatgggtcccgttctcgcgggcaggcccacgacacagatgggtagaggagagtcaacagttggagtcaccagggtgccgtttggttcaaaaaatg

SEQ ID NO: 30113 - DNA, 3521 bp, Zea Mays
gttaattccgttttgtcggcccaagatcaccaccctctttgccaacgaacgaacgaacaaggcgcaccaaatgtccaaaccttaaaaccgacggaaagagaagacccacatctcaccgttcactctccctctctcctccccctcctcccagatcccgatccgcggctgcctccggcggatccagccgcttcctcccgccgcagatccgccgcggccgccatggagaagccatgctctctcctggtccacttcgacaagggctcggccgcgatggcgaacgagatcaaggcggatctggagggcagcgatggccccgccaaggccgacgccatgcgccgcgccatctcgctcctcctaaacggcgagacgctcccgcagctcttcatcaccatcgtccgctacgtgctcccctccgaggaccacaccgtgcagaagctcctcctcctctacctcgagatcatcgaccgccgggatccggccggccgcgccctgccggagatgatcctcatctgccagaacctccgcaacaacctgcagagtcccaacgagtacatccgcggcgtcacgctgcggttcctctgcaggctctccgagcccgaggtgctcgagccgctcgtgccgtccgtgcttgcgaacctcgagcacaggcaccacttcatcaggagacacgctgtctcctccgtatccgcgatctaccgcctcccgcatggggaccagctcatcccggacgcgccggagctcgtcgagcggttcctcgcatctgagcaggacgcgtccgcgcggaggaacgcattcctcatgctctgtgcatgtgcacaggaccgcgctgtcgcctacctgctctcaaacgccgaccgggttgctgagtggcccgatctactgcagatggccgttgtggatctcatccgcaaggtctgccgatcccagaaccgtgccaacaagggaaggtatatcaccatcattacctcgctgctctccacgcccagcacagcggttgtttatgaatgtgctggcgcgctggtgtcactctcttcagcacccacggcagtgcgagccgctgccaacacctactgccagttgctctcttcgcagagtgacaacaatgtgaagctcattctactggatcgcctcaacgagctgcacactttgcaccgggatgtcatggtgggggtggtaatggatgtgcttcgtgcactggccagccccaacttagatgtcaagagaaaggttcttgatttagttctcgatctgctcaccccgcgtaatgttgaggaggtggtgctttatctcaagaaggaggtggtcaagacgcaagctggagacctcgagaagggtggcgagtaccgtcagatgctggtgcaggccatccatgcctgtgctgttgagtactcagaggtggctgggtctgtagtacacctccttatggacttccttggagacaccaatgttgctgcagctgttgatgttgttctgtttgtacgtgagatcattgagaccaatccaaagctgcgtgtttccatgatccagaggctaattgatacattctaccagattcgagcatcccgggtctgctcatgtgctctctggattcttggggagtactccctctctctatcagaggttgaaagtgccattgctaccattaaacaatgtcttggggatctaccattctacactgtatctgatgaaggggaggcaactgattctgctaagccagccaaggcagtggtgaactctgtcactgtatcttccaggcggcctgttgttcttgcagatggcacttatgccacacaaagcgctgctactgagaccattttgactccatcagttgctcctgggtcattggcatcaaccctgaacctcagatcactcattctatcaggtgatttctttctggctgctgttgttgcatgtaccctggccaagcttgtgctgaggctggaagaagtgcagccatctaaggttgagtcaaacaaggcttgcactggagcattgctgatcatgacatcgattctgcagctgggccagtcttcttaccttccccacccaattgataatgattcatatgataggattgtgctgtgtgtgagattgctttgcaatactggtgatgatgtcaggaagatttggttgcagtcatgcagacagagctttgcgaaaatgcttgctgagaagcagttcagggagacagaggagatgaaggcaaaggcacagatctctcatgcccagccagatgatcttattgatttttaccacctgaagagcaggaagggcatgagccagcttgagttggaagatgaggtgcatgatgatttgaaggctgcaactggtgggtttaccaaggatgcagatgacgcaaacaagctcaaccgcattcttcaattgactgggttcagtgatcctgtgtatgctgaagcatttgtaacagttcaccattatgacattgtacttgatgttactgtaattaatcgcacaaaggagacacttcagaacttgtgcttggaattggctacaatgggagacctcaaacttgttgaccgccctcagaactacaccttggctcctgagtctagcaaacagatccgcgctaatatcaaggtttcatcaacagagactggagttatatttggcaacatagtttacgagacttcaaatgtgatggaacgatcagtggttgtcctaaatgatattcacatcgacatcatggattacatctcacctgctacctgtgctgatgttactttccggaacatgtgggcagaatttgaatgggaaaataaggtggcagtgaatactgtgattcaagacgagaaggaattcttgaatcacattatcaagtcaacaaacatgaagtgtctgacaccacgtctgcactagacggagaatgtggtttccttgctgctaatctttatgcaaagagtgtgtttggtgaggatgctttggtgaacatcagcattgagaagcaacatgatggcaagctcagtggttacatccgaataaggagcaagacccagggaattgcactcagcttaggtgacaagattactctcaagcagaagggtggcagttaactttgacaagtgctgcagttgtatcatcatttttctcttttaggaaatccacgtgccagagataccagtgccgtggcattgaattgagtataaatgtttttttgtacaaaaggatcaaagaaacagataagacgacagttatgaggaagtcacggtgttagatccctgagcatgaagttctcggtcgaagatccatgttgctgtagtaacgatgctgttccaacttcctttgctgataaaatgacaatgtagaaatagttctgaagttcatgttgatttgtcgacaggtgggtcaattgtgatcctgtactattgttatgaatccctcttgttttgatgttatatttgctcttattttaattttatggtcttgaaactcaaactcggaggttgtcaccttattttattttttattcttagtttattgctactacggtttgtatattatat

SEQ ID NO: 30114 - DNA, 3448 bp, Zea Mays
ccccacccggcgaccagaaactcccgcaccggctgctgatggagtcttgacaagtgattcttgtcgatcggccagctacggcggcggtggccacgaaacgatggaattaggtgcttctgtttccatgtctatcctggaaaagctcgtccagagctgttcctttccagattcatggcgggggccgccagacgctgaggtccaggctctcataggatatctcgaagagctacggtcctccgtcctggatctttccaaggaggatgaggacgaggatgactctgctacgtcgtcgtccacgctgaagatgagcctgacgagccagttgcaggaactttgttatgatgctgaggactatctggagatggcgcagcactcccgtggtggctgctcctggcagatcagttgggtccggagcaaggcgacgaggcagcgccccgctctaatcagcgcaaaagatctctccggcctcatctcccgtgtgaatccggcgaaagaaatagcccaagcgtacatcaagtctgctagttcaagaaccaccaccaaagagaatggccctaggccacaagaagagcctgcaaaaagcagtagtcgccgtgccgtctattctgatgatactctacagcctgacagccatgacgagcagctagtcaggttgctggctttggaaagtgatcagcagctcaagacggtggcaatccttggcctgcctggcgttgggaagacaacacttgccagaagactgtaccactgctatgaagggaggttccattgcggggctttccttcgggcgtcccgtaacctgcaggataccaccaggcttctcgccaccatgctatccaagattaagggccaacaagggtgccgctactgggggggctccggtgatgagcaagatctaatcgacagcatcaggcaacatctacaaggaaaatcatatttcattgtgatcgatgatttatgggctacatcagtgtgggatttcttgagccgtgcttttcccaaggataactgtggcagccgaatagtaataactactcaagttacagaagttgcatttgcttgctgtaacaaccacacagttgatatattcaatatgaaacctctggacgacgatcagtcactgcaattgttttacagtcgagtaaagcatataaatggttataatgctgaagaatgcaaggccatatcacatggaatcgtcagcaattgtggtaatctttcaccgctagctatcataaatatagctggcatgttagcaggctgggcggatttcaatatgaatgactgggagtacgtaagcaagtgttgtacatcaacagcaaatcttactaccgaggaggcgacggagagatttctgaaccttatgtacaacaagcttccagccaaattgaagacgtgcctgctctatctcagtatgtatccagagggctgtgtcatcggaaaggatgatttggtgagacaatgggcagctgaaggtattttcagtcaagtggtggaaccaaaaggtagagaacatgaagtgggttttatttattttgatgagctcctgaaaagaggattgatccagcctgtagatacagactacaatgatcaagtgttgtcatgtatagttcatcaagtggtactggaatttattacaaagaaatcaatgcaggaaaacttcatcactgtcgtggattatcgtgaaacagggacagtgcttgatgataataaggttcatcgactgtctgccaggtttgaaggtgccaaaagtgcacagataccgcggagcttcagagtacgccaagttcggtcctttatgttttctggattcattaaatctttaccttcccttctcaagtattgccttgtccgagttctgattcttcatgtttggagtgatgatcaaggcaagactgtggttctagacctttctccagttggtaatatgcttcatgtaaggtacctgaaggtggtaagcaacatgatagtcaaactcccactcattattcgaggcctgcgacacttagagacactcgaggtggatgcagaagaagtcgctgttccactggatgttttcatcttgaagagcctgttgcatctccgacttccgagcaaggcttatcagcctgattcagatattcaaaggattgatttaacaaatacatttcctttaagatttctgcccttcgtcagagcgttgtcaatgctagggcggtttctcctctcccatggccatcggattcgccatttgacatcacttcaaagtcttggctactttgacctaagcacttgctccagatatactgtgtggcaacttggcaagctgaccaatttgagggatcttcatctaacctgctctgcagttcgttccaggcatcgaattagcaacatccaatgccttgcctctgttctggggaaatgcaccagcctcgaatctctaactatccgtggcgaagcatcttcaaaccagagcatttcttttgatggcttaagcagcttgtcttctccaccgtacaacctcgtgagctttgtgctgtccccgaggattttcaaaatggcgaagctcccaaagtggattgggcaactcagcaggctcagtacgctaaagattgctgttggcgagctgtcaagtgaagatgttgacatcctcaaaggactctctgccctcactgctctttctctctacgttcggagaaaccctaagaaaggaagctggatcctattcagtaagggcttcgcagtgctcaagtattttaagttcacttgcactgcactgtgcgtgaaatttagtgaacaagctatgcctgctgtccaaaggctgattgtgtgcttcaatgctaacacaatgcagcagtacaggccggaagatgcaggaatttggtacctgtcaggccttcaagttatctctgccagaataggagctgccggtattgatcaagccagcagagaagccgcgaaatctaggttgctggacgccattcttagcaaccatccaaagcctcctcctatcagaaacgtgcaaatggtggactgggttattcatggcgacacagaggagtgttcaaccggtgtgatgatacgtaaagatgaaagcagccgtgagcatactaggtcatttttaagtcagttcccgttcagaagacgacccctgcttccctccatattcacaaggcgtggccaggatgatgagcaacataaaatcgaagaaaatgatgtgctacaagatagtattatcttaaggaaatcctcttcgctaatgcaaaaaccaggactcccctaccgctacaacggtgctccctaccgctgctacagtggtagcggccgatggtggggtataggggaaggatttagggggaaccgttgtacagggtggagatataggggggaagagaacactgacgtgacacgtgaatgagatatagagggagaaatttaggggtaaccgctgaacacagtcttacacgag

SEQ ID NO: 30115 - DNA, 2394 bp, Zea Mays
aacaatctcgctctcgctcccgctccggtccttccctttcctggacgattccattccattccgttccgtgggtaatggatgacaagtgggcccgttattgacatatggcattggcaggcctttgtttctcagtcctataaggccgagaacaggcagagcaccgggatctagggtttcgcacccaacacccggagtgagcggcggcgagggatcggatcgtcggcggcgatggaggacgaggtgcagagggcagcggtgagcagttggaacgagcttgactatgaggcggaagcgcgtttggtggcggaggcgagggcgtcgtgggataggaaggcaaggggggaggaggaggatgaagaagaacatgatcctgagatgaccttggactactacgcctaccaggctaaaaagtttcgcaacacctggaacatcctctatttcggccacttcggtcgcttcgaggacaccacaaggatccctcctatgcgctttacagagaagccgcctgactccccggcgtacccgcgcactacactgcaggtcttttcgatcaaagttgcagggatagaggggggtttacagtggccactccatgtgtttgggaaggttgccctacgcgacgcagttgatcacaatcgcaatatggtcttcgatcgcactagagacaactgccaaatccttacaaaagaggcatgacctggaaaactgcttagctgatgctgtaacattttgatgtctctgttctctgctttctggaggtgccatcccctctctttggggaggcttctggttaaacttgcttcagtcacgatgttactgtgctggataaagaagatgccaaaggtgcaatctctcacaatgctgttgtattatgatttgcattcttcccttgatttagtcatattaaataatggtatgaatggatagttttttgctaccagagctaacagaaatcgtcatcttccattttcgtatgttgtgtagctgaactttgaggttgctaaaccatgcacccagaatcggagttttgtagttgaagctccatgtggtaggaatgtgctcacaaagcaaatcaaatctcttttccaataacagggccgttagtatccttttcccttttattttgaccagaatctccatatcttttatctgcagagttgagatacttgcaactatacacaatagaatgttcttcgaacctcaagctgcagctcttgctccaactattacttgcctactttgtttttcctatcacgtcttcttgtctccctcgacattgcccgtctgcttccttgcgccttgcttgtgctgtgggctcccttgtctcgcctcttttccagccgtggccaattgtgtccattgctgggtttgccaccaccttcccgtgtcaaggcaaacccctccatttcgagcacgttccaaacccaaacttcacattgccttcttttgagagctacgtaaggttccaaatttgaaactgacaggtcctagccgtgctgttctgctggtggatcctgtgactattgaggctgacctgaaagttaaaggccgtactgaatctgaggataaacacttgagctttctagcagtgccattcttggtcatgatcccgctcgagtcatgcctgcgtacaagagatttcaccagcaagcttagcacgctgaggtttgctctcgcaattgttgttctctcagtggaggctacaattagtgtgcgagttcgtggtgggtcatggcctgatggtctccgtgcccagtttgctgcccacacggtgagtataggtcgtgaggaagttgtcttgcttgattctggggacgataaactgcctgtttctgatgatggcactatcaaacttggtcgtcgagttgcatctgttgaagtgagtggggagctgaacgtttctgtcaaggcatggcaaggtggtgaagtctttacgcacagagagaggggtttcaaacctaaagaggcaggttggagttatggcactcttgacgttggcttctgccaaatggatgtatctgtggcctggtcgcttctttcgtcgtacggtgaaaatgaagctttgtaagagtcggtgttagccgtggtcgttgcttcgattctctagcatgtaatgataagttcacattgggatatgcttgctgttttgctgtaatgataagttcacattgggatatgcttgctgttttgctttttatttatttttcttgatcctctagcatgtaatagagtatcctccaagtagagtttttttttccttgatctccctgcataaagcccaagttgctcattgcttatcctaattgttttcttgtttctagtactgcaaggctaaacctggaattatgagtaactactgcacactggttgagcaaaaaaaaaaaaaataccaga

SEQ ID NO: 30116 - DNA, 1019 bp, Zea Mays
atctcgggcgggtgagcagcccaacaggcaacagcagctctccaccttcctcaccctttcctcctgaatcctgatatttcctcctttccccatcccttcccctggcttcacggctcggctggctgcacgccggagccccggcgccagatctcgccaagtgccagggccgccgcaggcccctctttgcctgcgcgagtctcagaatcccgagagggaaaaagaaaagaaaagatgatgacttcctctgcctgttactacctgtgccgctccctcgtccgggctcctccgctcaagtcgaggagtgcagtgcgctgtccaagcgccgccccgccaggagccagcggtgccacctccacctccaagacacaggatccagttgaaaaccagaagctatgtgcctatttggttgagaaggcagtcaatagacttccgccaggagcagagaatatacttgggatctttgatctgcgaggctttcgggttgaaaatggtgatctccagttcctaaagtttttgatggacgttttttactattactacccgaagcggcttggccaagttctttttgtcgatgctccatttgtttttcaaccaatgtggcaggttgttaaacctctgttgaaatcatatgcctccctggtaagattttgtgataccgagactgtgaggaaggaatacttcaaagaagaaactgtgcctcctgatttccgcgattaggtggtctcggaaacatgacctttaattgattgagaatcgattggcacccaggggggctggcgccttcctataccttttgattaacttctcaaaagttgctcagacgacaacaaacgattggagagtccagtaaaaaatgaccctgtagtcctgtacttgtataacttctgcgaagtagaatgctgagtttaggctgctgtctggagtgctcctgtaccatatttttctggttttggatgaagctatatggaccaaattcatctctgttgaacaattgccaattacataacttgtgtttgccc

SEQ ID NO: 30117 - DNA, 2003 bp, Zea Mays
gttcctccctcacggtcacgggcggagagcgccgaagcggcgacgaaggcaggcagacgccgcggccgcggcccgagtttttaatacgaaaccgccaccaagctgcttgcttacggcctagtttcacctcccccattcccttggaattggatttgctcccgaatccggcgaggaagcgaccggcactccacgccacgccgcggcgcccaaggaagggaagcttggggccctaggcctcgtctccatccccgccgcagccggcgcgaggcggcgcggcacgagcacgacggtcaccatcagccaccgcgcgatcccgggggacggccaggccagattccacaacgttttactcttattaaactccccaacttcgtctaaggaagcaagtgatttcattatgaaagactggtctattttctccaaacttgatcacaatggaggttaccttcccaggttcccaatggactctccaatatctcatgatattgggttacgattggtatcgcaagtcggaaacttagttgagtgttcatttcaacatccaaggcatatatgtgctacggggagtggagctgttcaggaagcattcagctgtttcaacaagtttgctggagctttctatttctggttttctagagcatcgaatcctaagttattccaaaggctatcagcagctgcaggctcaagttcaagagcttgtcggtcacacataaagcaagtgacctcttgcttgcagcatttacctggactggagtttggttcacaattaagagaagatcatgctgtacaagtgcttttagcaaggcttgcaagcgcaacttttggacgcctgtggacagaggtggaggagcggcatgcctgcaacatccttatgctggctgctgctactgtaattccaccatttgaaaacatatgctggctgcgtcaatggcactaagaaaagatcgtggaaacatagagcctactgaacagtcttattcagaggaaaaccgtccaggttgtgcgtgtgttgctgtgccaagagtactcttaccagaagatgcaacggaaccaacaactggcatcaagttccccactgtactcgaagacaattccaatctgactacagaggtccttgttggaatgggttttagaagcatgcgaataatgagggtcaaaaatctgaatctttatgcctttggattatatatacaacctgattctgtctgcaagaagctgggtccaaagtacgcttatattccagatgctgagttaaaggatcacccagatttctatgaagatcttctgagggaaaatattgatatgactgttaggctagtagtaagctacaatggtctcagcattggcacagttcgagatgcatttgagaagtctcttggcttccggttgcaaaagatgaatcctaatactgattatggttgcttgaagacttttggttcttgttttagtgaagacattcgtatacctgctggtacaaagattgacttccggcaaacatctgatggccagctaataactgaaattgatggcaaacaaattggcactgtccagagcaaagatctttgcagagccttcttcgatatgtatattggtgaccccccagtttcagtggagactaaacaagacattgcgcaaaatgtggctggactcataagaagatgctagggaaacgggaaaactaaatcgaagaacctggaattatttcattcatctatacaaggagaggacatataaacagaaaggaagccaggagaggatcgattgtatttatagtggtagactgtctttgtaagctataaacataaagcatatgcttggcaaaggcctccatgcctttcatatggtttggcatctttgccatttcctggctggctggcgtgctgtatcatgtcgacaaatatatgatacagtaaaaagttgtacaacaagagcatgtttctgtgccccaagtgaaaaatgacggggttcagctttgttcatacagatgattgatggttctccct

SEQ ID NO: 30118 - DNA, 1677 bp, Zea Mays
gtgagttactaagcttgcctgtttcattgcttcctgttccttggaggaattcgtgttgtcaagaactcgtaataaccggcgaatctagatgggacagaaatgtgtaggttattttccgctctatatatgctcttctggattcgttcattagctcggtataagatggaattgtagcctgtatgttgggtggatgtcggtggacgccaactgttcgacattttgccacatagatattcttgtggaacggctgacactgtaggtttgtataatttgtagagtcgataaagttcacataatatcttgttcttttgtgtagttctgctgctgtgcaagttgccctctggacttgcttgagtaaaatgcttcgaatggagaaatgttgaaaacgggaaggcacaagctgcaaactttcccttttgcaccatcagcccaaacgttggtgtggtggctatccctgatcctcgtttgcaggtgctctcaaaattaagcaagtcccagcagacggtcccaacatccattgagcttgtggacattgctggtctagtcaaaggagcaagcaaaggagagggactaggaaatcaattcctttcaaacattcgtgaagtggattccatacttcaggttgtgcgatgctttgaggatgacgatatagttcatgtcaatggcaaggtcgatcccagatcagacattgatgtcattaacctagagctgatattttcagaccttgaacagatagagaagaggctagataagcttaacaagagtaaaacgaaagatacccaagtaaaagtgaaggaacaagcagagaaatcaggattggaaaaaattcagcaggcacttatggaaggaaagcctgcaagatcggtcgatttagctgagcatgagaaagaagctataaaacacctttatctgctaactatgaaacctgtcatttatgttgctaatgtgacagaatctgatcttgctgaacctgatagcaattctcatgtcaaagaggtggctaaagcagcatcagacttgcagtctggtatggttacaatatcagctcaggttgaagctgaactcgccgagctacctctagaagagagagtagaatatttaaaatctcttggtgttgctgaaagtggactaggaaatttggtaaaagcaacatataatctattggggttaagaacttatttcacaaccggagacaaggaaacaaaagcttggactattctttcaggcatgactgcgccacaagcagctggagttattcatagtgacttccagaaaggattcatcagagctgaaactgtatcctatgatgattttgttgcagctggttctcttggagtagcaagggagaaagggctgctgaggttggaagggaaggattatgttgtgcaggaaggagatgtcatgcttttcagattcaacgtgtgacagcaatagtagcaaaaggcttcaaaaacaccggaatttgtactaggcagaatatagtttgcccatattgtgagattttttttttgccacttgaccaccgattattgatctaccacgctggtagggcagctttcttagatcaagcctaatactggacagctatcattgttagcttcacctaaaaagtagtaccccgcactagggaataatttctcggacgaatttcaaaaaaaaaaaaaaactcgctctcgg

SEQ ID NO: 30119 - DNA, 2494 bp, Zea Mays
gggacgcaattcaaaaggggacgagggcaggtcaggcgctcggcgctcctcacgagcaacggctaccacacgaaacaatttcctcttcctcctcagcggcaccgtctcgtcgtcacctccctcctcttcccttcccgcggcccccgacgccctccgtccctcgtcgtcatccagtcatcccctacacccgataaaaggaccgctcccgtcagagtagtggcgaagatttgcccgggcggagaccccactggatccatgcaggtctccgcccgtgttcccgatccggctaactcctcctccgcttccgtctcattcgtccccataatcaaggagtctgctctttctaatatgacccaccgcaaacatcgcgagcacaaactcgattggtgctatctcaacgacgattcgtacacagacatttttcacaacgaggttaaacagcttgtggataaaatcttctcctctgatggccacaaccacgcatgtgtagtcacttgcggttccactagcaaaacccaccttgttatagggtccgatcatcaaccgggcttgctcactatggccatggagcgaatatttgactatgccaaacctattagggcaactgtcagtgtttcctcttatcatgtgcttcaagacagccatgtctttgatcttttggatcctaagaacaacgaggtccttgtgcgagaggatgctgatggaaggactcatctgaagggcctctctatggttgaaatcaattcaattcaggagtttcagaatttgtgttatgatagtgacaaacaccaaaatcgcaccaaagtttccaaagctaaaggacacaatggttttattatttttatttctaaatctgatcagaatggcaaagaatcctctgtatcaaaaatgcattttcttgagttggcagaccatatcaatgataagcaaaagagccatggtgaaagatttgttcaacaaaattccaagaagtccttatatgccgtgatggatgttgtgcaagctctaaacagccaccagagcttcataccctatagaaaaagcaaaataacccatattttgcaagactctttatccaagacaggtggtgctttattaatagcatgtttggatgaagtctcatgccaagatgcaatctctactctaagcttggcttcacgctcaagccaagtggtcaatgaacaacggtacaacttatccttaatcacaaaaggttgttcaaagtcaaatgtaaagctttcagtgaacaataagaatttgtcaagatcgttattgtcttctatccaacaacaaagtcccgtgctggagaagccatacaaaacccaagttaataacattgcagtaaaagcaacaagatctctcaatgccaataagagatctgaaacaagcacacattcagcaaaaaagactgtaaacttagtctctgcttcgattaatttgaaacactctggtgctaagtctattctaagggaaaggaacttctttattccaactactaattcatcaaaggaagataagaaaacttttgtgacaactgcgagcgatatgcaggagaatcacaatggcacaaaaaatattgtagtatcatctgaaatgcaagtagtaccttgcagcatgaaagagatagtatcaagtgacatgaaagaagaggatcattcctctccaggttttcttgcagagaacttatttgctgacttgggctttacatgttcatctaatgcagctgataaaacaactgaggaaaatccagccaccgttctccaatcttctccgaagataagcgaccaattgagaaagatatcaaattcactgaagcttcttaattctatggcacctagtatagtaaaacagaaaacagatatagttcgtccacaatcctttgacttagttgaagcagaaccaaaaactcctgaggtcaacttaaaactttggcatgctcaagatgcacaagaatcacttaaggctcgtagcacagggattaagaaatctctagctaaggagtgtttgttgtttctaaacagcgctaataaggagcagttaaaaagtttaaagggtattggagagaaaagggcaaactatatacttgagcttcgagaggagtcaccattgaaagagattgatgatcttaaaagcataattgggatgagcaaaagagagatcgacaagatgatgtcaaagttgatttcggactcggagatgaacgagtaagggttgtattgatctcttcccacttaggaaaggaggagaaggaatgtcttctctacgtataggttttatacaggaatgtcttgtctacgtaacgtataagttttgtttttaaaaaaagaatataatcgggtggaaggctttcaggtttgctgtattagacaaaaacctatcagttaccctgtcatattgtgagtgtgcatattgtcatattgttagaactgtgagaacaagatatgtttatttggctccgccaatattgcttagcggcaaagtatctgtatcgtca

SEQ ID NO: 30120 - DNA, 163 bp, Zea Mays
acaagccatgtgagacgttggcggcgtcgccgcactgactggaacgcaacggagccgcgccgggaatgcgtacacggcaggtggacgcaacgccgtgcctcggaggtgattttgccaggaaggatgccgcacagtggacaagacacgggagggagacgacttg

SEQ ID NO: 30121 - DNA, 263 bp, Zea Mays
accagtggaggaggacgtaggggtctggtcggtgtgaggagcggcttggcggtgaagactaatccgtcgagaaattccacccgcacggtcccgccttcacccacaatcggtgacgcccgcgttcagggtaccccaggaattactcaacgcgcccaccgggcacgtagggtggtactccacccgcggcgctcggcttacagacctctgtagtcgctggttatcgcggtggttgtaacgaggcggtggcacggggtacggcgaag

SEQ ID NO: 30122 - DNA, 1558 bp, Zea Mays
cacagatctgccgaaacggtctcacgagttcatccaccgggtccagtatcaggcctttgcgaattgcgacagcgagagcgggaagaggaaactcgaaactcggcgagcgggatggcaaccggcccggagcacgtggcggcggcggtcgaggagacgccggagaagaaggcggccagcacaaccgagctccccgcaccctcaggctggacgaagaaggttgctccaactcgaggtggacgatttgaggttatttttgtttccccaactggtgaggaagttaagagcaagagacagctaacccagtacctgaaagctcatcctggaggccctgcatcctcagagttcgattggggaaccagtgatactcccagacgctcagcacgcttgagcgagaaggtcaaggcaactgagagcccagagggtgagaagacccctaaacggggaagatcaagttctaagagaggcaaaaaggaggaaaaagaagacacagaggctgcaaatgaggctggagaagatggtgcttcggaggaaggtaaaggtacagatgtggagatgaaagatgctgaaaacgctgaagacgagaagaaagaggtcccaaatgcagatgctgcagagaagactgaggaaggtgaagataagaaagaggaggcccctgctgtagatgcagcagagaagactggtgagaaagaggtggcccctgctgtagatgcaacagaggagacagaaaaaagcaccgaaggccaagcacagcctaattatgttgctgccccagaatctgagtataaaggagacggaaagccaggtgaatccgaagcagctccccttgcatttgttgatgaaacagctccccatgtaattattggtgaagagaagaaagaggaaaatactgagaatgagaacagtcaggcagccgaatctgccgtgccttccctggcatctttagagggagagaagaaagagaatggtggtgcccctgaacaaccagccctgcctgtagctgagacgaaggcagatgctcctccggcagaggcagaaaagggggctgaaaattcaggccagccgaataccggctctcaagaaccgaaggcagcaaactgcgacgaggggcagattcaacctggtgcctctgctgtgaggtgcacataagggagcttgatctcagatgggactctgttgcgttatgtctttaggacgatacctcgcatttgctttgagaattgtaatcgtggttaacctgacagcgctgtgtagcactaggctgcccagcacgtagttatcctttcgtttcttttataacggtggtgttgcagcatgggtaatgggccggcctgtgctgcctcagccaccactgcatacccagtgtaagtgtaactcgttattagcgtggtcgacattgatctgtggagaggactgcaggacagtactgtcctcgacagctgtaacgttacgttttgtgtgttcccttgtgttattgaacttatattatgatccataaataaagccataagcgtggcagggtcattccctgaccaccttcaggcatcaccatttgttggcc

SEQ ID NO: 30123 - DNA, 3335 bp, Zea Mays
tcactccagaactacaactacgcctgctggacacaagcctaaaccgagcagtgcgtgcttatcgttcaagtagagcacggagctagagagtgtagctagcacgcacagaagcaaaccaaaactgccatgctctcatacctacaccaggtgttgtagtaagcctgtgaagtgaggtgacacaggccgggagaagagcgagcgagagagaggagaaaagatacacagatagctagatcgacatgccgcctgagctggagcaccatgagcagcagacagccggaggtggtggccaccgagcgcctcctcctcccccgaacagcatgcccacctttagtagcagcactccctcttctacttgtgtttctgccaccaccaacccctctggcggcgccggcgctgtccatcccaccacctccagcccggcgtcgtcggcttccgcccgccctgccgtcaactcattccctctcgtcctaaaggtatttaatttgttaagtaatatatgtatgtgtgcgtatgcgtacgttgcgtcttgtttccttgataatgtcgtgtgtcgagatcgagtagggcatggtgtgtgtcatggtgacgagacgtgtgcatgcacgtcatgcgtacgtgtggtgatgtcttgcttgtgcagttcgaggaggtggcgtacaaggtgaagctcgggaagccgacgacgacgacggccggatggtgcgacaagctgtcggcggccgcggcgagcatggcggtcggcggcggaaggaagaagaaggccaccgcggcggcggctgggtcttcgccgtcgtctccggcagcgttgcgggagaagacgaggaccatcatcagcggcatgtccggggtggtgcggccgggcgagatgctggcgatgctgggcccgtcggggagcggcaagacgacgctgctgacggcgctgggcgggcggcacggcggcggcgggcgcgcgctgctgtccggcaagatcacgtacaacgggcagcccttctcgggcggggtgcggcggcgcacggggttcgtgacgcagcacgacgttctgtacccgcacctgacggtggcggagacgctgtggtacgcggcggcgctgcggctgccgcgggcgctgggcgcgggcgagaagcgcgcgcgggcggaggcggtggcgcgggacctgggcctgggcaaggtggccggcagcatggtgggcggggtgcgcggcgtgcgggggctgtcgggcggcgagcgcaagcgcgtcagcatcgggctggaggtgctggtggacccgagcctgctgctgctggacgagcccacgtcggggctggactccaccacggccgcccgcatcgtggccacgctccgccggatggcggccgagggcgggcgcaccgtcgtggtcaccatccaccagccgtcgtcgcggctctaccacatgttcgacaaggtgctgctgctgtccgccgacggccgccccatctactacggccgcgccgccgacgcgctctcctacttcgcctctgtcggcttcgcgtcgccgctctccctcaaccccgccgacctcatgctcgacctcgccaacggtatcgcgccgcagacgacgagcggcgacgggatggcggcgctgctggccggcggcggcgagggcgagcacaaggaggtgcgcggcaggctgtccgcggcgtacgagcggcacattgcgccggcggtgaagctggacgtctgcgcccgggaggcgacgcccggcgggcagcaggcggcgtcgcggcgcgcgtcgaaggcggcgtcggagtggacgacggggtggtggacgcagttcgcggtgctggtgcagcgcgggctcaaggagcggcgtcacgagtcgttcaacaagctgcgcgtgttccaggtgctgagcgtggcggcgctggcggggctgctgtggtggcgcacgccggcgtcgcacctgcaggaccggacggcgctcgtcttcttcttctccgtcttctggggcttcttcccgctctacaacgccgtgttcacgttcccgctggagcggcccatgctgctcaaggagcgggcctcggggatgtaccgcctgtcctcctacgtggcgtcgcgcgccgccaccgacctgcccatggagctgggcctgcccacggcgttcgtgctcatcctctactggatgggcgggctggacccgcgcccggggcccttcctgctctcgctcgccgtcgtgctctacagcgtgctggtggcgcagagcctcgggctcgccatcggcgccgtgctcatggacgtcaagcagggaaccacgctggcctccgtcatcaccatggtcttcctcatcgccggcgggtactacgtgcagcacatcccgcccttcgtcgcctggctcaggtggctcaactacagcttctactgctaccgcctcctgctcggcatccagttccccgacggcggagggtactacgactgcggccacggcgcgctctgccccgtcgccgagttcccggccatcaaggccgtcgggctcaacaaccactgggtcgacgcctgcgtcatggcgctcatgctcgtcggctaccgcgtcgtcgcgtacattgcgcttgaccgcctcaagcccaggtgaaacaagataagagaagagaagagaagggatcaattagtttagtgctctatgcataatacaaccagaggggatgaaatgaatacgatacaaacctgcagcagctgagctctctgttttactccattcacaagggtttccagaactcgtaagctttccttcggctcctacccagcttcccacagccatcgccgaatctcattctccggaacaaaagctccgcgtcgaatagaaccgaatccggtcgagctccgcgtgaccgagactctagactctggtctctggtgccctacccaccatggccatgccttgcagctctcaaacagtgttacgacagggcacgaagagacaatgtaacagaaatagattttctttccgtacaggagaatgtctatatgctattcttctgtaaccgaaacatatgctgctagctgctctgctcttctcaactcccagtgataccacggcatctccttgacataatatggctatagatcttgggtcgatctgcaggacagaagcttcgatctgtcgttgttccgttcccatttccctcattcctacaaactgcttcaccatcagagcgtacagaggatcgatgggctaggtggtctttaaattttacactataaaatgtaagtatcggatcagatactattttaagacacgaacaatttatgaagaaattgttgagcaccaaattgagcgcgcggacggtccgcccctgtgggccggacggtccgcgcgt

SEQ ID NO: 30124 - DNA, 3579 bp, Zea Mays
ttctggtacaaccgaacaggcccttagtcgttgaccgtctcgctcgcctccccgtccgctccgctcccgtgctttcccctttgctcgctcgcggacctccgtcccggactccgactcccggcggcgctctcgcgccagcaagctcgaatctgcacgccgccgccgccgccgccgccgccccacgcccacggcgcctagaaccagggtctttctggtgtgcaggggtgggcgcttggcttctgagaacatgtaacgggtgttgatacgaaaataggttcctggaatagcgggttcattagcagtttggcacaactttgaagctgcaggggatttcaaatgccctttgtcatcaggtccacggttccactgagccagaggattttttattgtattttcaacttccctgaggatgtttgacagtactcaaaaagctcaatacatggatgggcacagagagaggtttattaggctggatgagtcaagtcctaggtcatctgtaccttctgaagtgggaggcaggagtacattgaggtccagcatgcctgggtttggttatggtccatttaatgcactaaggtctttcttgtctgggggctctggaagactgaagtcacttagacagtcacttacttctggtgctcctaagacagcttttgcggaagatcttaaatcatataagagaactatatttgatccccaggacaaacttcttttccgaatgaactgggttttcttctcgtcttgtctttttgctgttgcagtggacccactattcttcttcctacccatcatcaacgattcaaactgcattggtattgataaaaagttggcagtgacatcaacaataatacgtacggttattgattttgtctaccttatacgcgtgtgtcttcaattccgcactgcttatgttgctccatcttcacgcgtgtttgggactggtgagcttgtgattgatccgatgctaattgcaaagcgatacattaaaagttactttgcaatggactttgttgcattgctaccacttccacagattgttgtatggagatacctccatattccagatggcccagatgtactgactacgaaaactgcactggtttgggttgttttgatccaatacattccaaggttgcttcgaatattccctgtgatcacagatttgaaaaggacagctggtgtttttattgaaactgcttgggctggtgctgcttattatcttctatggtttatgctggctgggcataatgttggtactttatggtactttttaaccatagaacgtgaagatgattgctggcatctatactgtgacgatcccaactttggcttgggatgtaatagcagctacttgtattgcaataatcatcatcatggcagctatgatagttggcttacgaataatagtgcccaagtattcaacatgtgcaatggcggtcaagacaatcctttcaactttggcatttatgagcaagcactggtctctaaaatacttagtccaggaaatttcatctcaaaattatgttattgcttctggtggggattgcaaaatctaagtacacttggtcaagggcttttgacaagcacataccctggagaagtcctgttctctatagcaatatgtgtccttggactaattctttttgctctcctcattggtaacatgcagagctacctacaatctgttgctatacgccttgaagagatgagagttaagaaacgcgatgctgagcagtggatgcatcaccgttcactgccactggacatcagacatagggtgaggaagtatgaacgttatcggtggttggaaaccaggggagtagacgaagaaactttggttcaaactcttccaaaagatcttaggagggatatcaagcggcatctttgtttgggcttagtgaaaagggtgcctttgtttgaaaatatggatgaacgattgttggatgcaatatgtgagcggttaagacctgcactctacacagaaaatgagttcattttgagggaaggtgacccggtggatgagatgcactttattcttcatggttgtttggagagtgtaaccactgatggtggacggagtgggttctttaacaaggttcagctaaaggaagggtcgttctgtggcgatgagttgctcacttgggcattggatcccaagtcagctgctaattttccagtttcgagcaggactgtccaggcactcaccgaggttgaggcgtttgccctatgtgcagaagagctgaaattcgtggccagtcagttcaggaggctgcacagcaggcaagtgcaacacacattccgattctattcccagcagtggaggacttgggcagcctgcttcatccaagcagcatggcgccgctactacaagaggaagatggcagagcagcggcgcaaagaagaagaggcggcaagccggccaagtagtagccaccctagccttggggcgactatctatgcatctcgtttcgctgccaacgccatgcgaggggttcacaggctaagaagcaaggctgtccctaccattgtcaggctaccgaaacccccagaaccagattttggtgtcgatgatgctgactaacgagacaatcacactgtactcgcttgtaattgtactttacctcatctgtagattctgtacaagattcaacgacagctgaagaagatagtgtctgtaaaggtttgtaaccacgcacagacagaccataacggaggtatatcctgcttgacgtctatggaaatgcaaatctacttccttaaaacctgaagtgttttggagccacctccgcgcttccggggtacgggcgtacggcatcagtgtcacctgcggacgagtggcgggatcggatctaaaaaatttatccactggagttgtgggagatgtcgtgtctggtgccctctccctccgtcccgtgctgcactgcgctttcttctttgtgattgcttcgctcgcctcctccaccaccagacaccagcccaaactacctcgccagctccctctgcctccccctccctcctcccgtcgccgcagcacgcagctccgccggttttcacggcttggagcagatctgccacgccaccgccgcgtagaccaacttggtggagggatcccgtccgaatctgattcctattctccagctcgaccgctgtagcgagaggagagagagaaaggagcagtggcgacgaggtctatggcatcgatggcagcgtacctggcctggctcggcgggcggcgcagaagaagtgggtgcacctgctttaccacacggcgctcaacttccaccgccacctcttctaccaggaaatcagttcccccaatcctcccctcttcgcctcccttttgatctcgatctgccttcctgctcgcggacgggactggccttgtgttgtctctcccgcgcaggcgtcagatctcctcgacaagtttgagaccaactgccacgtggtttctttaggggtattcactgaaggcgacagctgatcgtcattcatagattgcaagcaataggggaaagtcacttcatccaaataatggtgcaagaagtccggttcgatcctttggccgattttggacgagat

SEQ ID NO: 30125 - DNA, 1478 bp, Zea Mays
cctatcacaacccttcttctttactagggcttgggacttgctatgttgagataacataggcggagttatttccttacaggagcatgctataaatttcatagaccaatttccttcgaaatttggtatgggctacgtccaagcatgacatctacctagtatcacattactcaattcgtcattggtcagcattgagtggtgtcgatactgaacttatcaacgtccaaggacacgtggcaccaagggagaagcatgcaggaagtttatcagagggtttttatcagactcaagttagtaccttggcagtcaaggacaatttactggtagctggtgggtttcaaggagagctgatctgtaaacaccttgatcgggaaggtattagtttttgctgtcgaacaacttatgatgataatgctattacaaatgcggttgagatatttaatacctctagtggcgctgttcacttcatcgcatcaaataacgattctggtgtgagatactatgacatggagagattccagctattcaagcatttgcagtttgaatggccagtgaatcatgcttctttgagtcctgacagaaaggtcgttgttattgtcggtgatgatcctgatggtctacttattgatgccaactctggaaagacactccattccataaaaggacatcgggactactcatttgcatcggcttggagccctgatgggcgaacatttgctactggcaaccaagacaagacatgccgaatctgggacgcgaggaatctctcaaaatccgtccatgtgttgaggggtaaccttggagccatccggtccatccgcttcacctcggatggccagttcatgtccatggctgaacctgctgactttgtgcacgtctacgacgtgaagagtgactacaacaaaaggcaggagctggacttctttggcgagatatccggcacatcgttcagcccagacactgacgcgcttttcgttggcgtgtgggataggatgtatggcagcctgcttcagtttggccgcctgtacaactactcgtatcttgactccgtgttttgatgtggaaccaaacggatgttggactgttgggtttggtgtgccgcggttctctgaatgttgtcagcatgattaggcggttatccttatatcaggattttaagttgacaaagataattgaattaataaatgttgtaccgtgcccgatgtgtatatataaaagaaatgtatacatatgcctattcagataccgagttgagatgtgacttggtctactccatgtgtgattgatgaattggttgtcgaagaggtttaaagctttcgacgcttgaagttgaacacagtgcgtgtagttccatgtaggttgtaagccacatgtagtatatgtttttgtcatgggactagtggtgataggaggtctattggctcattgtttgtgacatgataggaatgtaaggagaaagtcttttgtctcatggtatgtga

SEQ ID NO: 30126 - DNA, 318 bp, Zea Mays
ctggcctgagccgaaactgtgtgccgaggggggaaaaggagggagcagagggtgccgccaacgtcattcttggtctcggttggtgtaggatcttccacggagggtttgggggctccgctgtgcttcctggtggacgcctgtggccgaagaaggagaggtcgaccactggatggccggaatttcatcactgcaccgttgaattcgccgcggcgagcgggcagaccgaggtgcttccaggttcgtggtagcctcttttccctttcatcgtgcggctgttcactacgtattatcgcatcctgttcgaagttcgagtgtctg

SEQ ID NO: 30127 - DNA, 2345 bp, Zea Mays
ggccaagcaatttgaggccacgtgattggccggaccgccagacagagatgtcaggccatcctgcctcggcagccgtgcgcaccccacccacaccacacactctccgtctccgactacgaccatggcggtgtccgacgaggcgcgcgccatgtacaacggcgggcgggcgggcctcaccttctggtccccgaacgtgaacatcttccgggacccgcggtggggccgcggccaggagacgcccggcgaggaccccgccgtctcggcgcgctacgccgccgcctacgtgcgcggcctccagcagccctacgccgccccgaacggcggccaccgcaaccgcctcaagctcgccgcctgctgcaagcacttcacggcgtacgacctggacaagtggggcggcacggaccggttccacttcaacgccgtggtggcggcgcaggacctggaggacaccttcaacgtccccttccgcgcctgcgtcgaggacggccgcgccgccagcgtcatgtgctcctacaaccaggtcaacggcgtgcccacgtgcgccgacgcggcgttcctgcgcggcaccatccgcgggcgctggggcctggacggctacatcgtctccgactgcgactccgtcgacgtcttcttccgcgaccagcactacacgcgcacccccgaggacgccgccgccgccacgctccgcgccggcctcgacctcgactgcgggccgttcctcgcgctctacgccggctccgccgtcgccgcgggcaaggtcgccgacgccgacgtcgacgccgcgctcctcaacaccgtcaccgtgcagatgcggctcggcatgttcgacggggaccccgcggccgggccgttcgggcgcctgggccccgcggacgtgtgcaccagggagcaccaggacctggcgctcgacgcggcgcgccagggcgtcgtgctcctcaagaaccggcgcggcgccaggcacaacagggacgtgctcccgctccgccccgccgcgcaccgcgtcgtcgccgtcgtcggcccgcacgccgacgccaccgtcgccatgatcgggaactacgcgggcaagccctgccgctacaccacgccgctgcagggcgtcgccgcgtacgccgcgcgggttgcgcaccaggccggctgcaccgacgtcgcgtgccgcgggaaccagcccatcgccgcggccgtcgaggcggcgcgccaagccgacgccaccgtcgtcgtcgcgggcctcgaccagagggtggaggccgagggcctggaccggaccacccttctcctccctgggcgacaggccgagctcatctccgccgtggccaaggcgtccaaggggccagtcatcctcgtgctcatgtctggcggtcccatcgacatcgcgttcgcgcagaacgaccccaggatcgatgggatcctgtgggtcggctaccccggccaggccggaggacaggcgattgccgacgtcatcttcggacaccataatccaggtgcgaagctgccggtgacatggtaccatcaagactacctgcagaaggtgccgatgacaaacatggcgatgcgcgcgaacccggcgcgcgggtaccccggccggacgtaccggttctacacgggcccgacgatctacccgttcgggcacgggctcagctacacccagttcacgcacacgctcgcgcacgcgccgacgcagctcaccgtgcgcctctccggcagcggccactccgccgcgtccgccgcctccctcctcaacgcgacgcttgcgcgccccgtccgcgccgtgcgggtggcgcacgcgcggtgcgagggcctcacggtcccggtgcacgtggacgtgagcaatgtcggcgaccgcgacggcgcgcacgccgtgctcgtgtaccacgcggcgccctcgccctcgcacgctgcccccggcgcggacgcgcccgcgcggcagctggtggcgttcgagaaggtgcacgtgcccgcgggcggcgtggcgcgcgtggagatgcgcatcggcgtgtgcgaccggctcagcgtcgcggaccggaacggcgtgcggcgggtccccgtcggcgagcacaggctgatgatcggcgagctcacgcactcggtctcgctcggcgtcgagcagctcggggtataaccggatgcttgaacggaaggtggaggatccagagtaataattgtgatgtgatgtgttgtttcgggtggggggtattattggcttctgattgccggggtgcttgctgctgtctctgcaaaggtggagatgggagatgtagaaggcaccggattactgaaaattgctggattgaaaacgaaaacgattgaaatggaaggaagacagaagaatgttgtttccctcctcgata

SEQ ID NO: 30128 - DNA, 4136 bp, Zea Mays
gtccgtttgtgggaaccctcacgcactacgccgccgcgtcgtcggcttctccgctcttcacctgctccctctcgacgaactacgaagccatccccgcctccgcaaaccgccccgagcctccgacgtattccctggccagtaggccacttcccttctggccttcctactctctccacgctccacagctgtgagcctgtgaccctccgcttcgacgcggacgccgcaggccgttgacgatacaacgcaccccgccgaaaggggctgggactccttttccgtttccttcgcacatctcctcgctttccgccgagagaacttttttcagtcaatcataataataataataaaaaattcgccgttcggccccgaatttcccctctgtttctgcttcatctgacgcatctgatccattcccccttctcgacgcggatcgaatcacgagcgtgtggcggcggctgtggtggttagggacttagggttggagctcctggaggatggcgagccacggcgccggggtggctgctggatctgacgccccgcacgctgaggttgtcagtatgggtcaaacaaatctatctccatatcctctttcttccagtcatcattcatggtcctctgcaactgggtcagcaacggtttcatggaacaatacagtggacaaacttagccaagatacagtttactatgatccacaaagggatgtatcagattcaggagggaatcaaaatgtagaaagtagcgtgcctcatgttgcccagtcgagtagggggatggcagatgtagcccattctcacatgtcttactctagttcagatcaacatgtctataaccctgtagaatatgccaactattattatagctacccacaagcaacaaatgattcttctgtccagcaaggagcaaaccaacatccagaccgtgccaggatatggaagcagcagctactattatcagaacaacacatggaatggtggaagcacagggaatacttttgctcaatcataccagaactactcatcatctgatacaaatgcacaacaaagttctacttcagtgcctgccaattctttaccatatcagcagcagtataaccagtggccatactattacaatcaatctgtgccaagtgcttctagcaatccagttgctgggaacagtactacagataacttaactggtaacatgccttctggctattcatatcctagtagccagccacctccaccaggaacaacatcatggaaaagtaattcagttgcttctgttgcacctcctatgcaggttccaggtgttccaggacagcaaagtcaatatggcaaccaggcagaaggccattataaccagggacctggtgtgcaatggtctcaaaatcattatgcctaccagacacagccataccctcagaagactaattccaatcatccacaactaagcaaccatgaagatcaacaggagactgtatattctaacagtccaagcacaaatctttcgtcgaaccatgtttctgaaaattttaaaccaaacttgcaggattctgtgacaatggacacttccagcgaaggcaaaatacaggttcctataaatcctcaaattgccccaggtttctctatggtgataccaaagaatgagaagaaacattctggacttgatttatcaaagaaacctgcctatgttagtgtctccatgcctacgaatgatgctaaagcaactcaagttggtcttgatgctagattacccttttcactccgtaactatgctacgaggaacctcaatcgttgcaagaatgatgcccagagggaggcctgccgaagcataatgaatgagatcacaaaaaaagcttttgctgagggaacccttcttactaagaactgggacactgaaccactatttcctttgcctgaaagtactgtgggcatgactggaacaagcagtgtaaacaatttaagtcccttctcatcagtttccaccccaaggaaacgtgtgaaaagtagatgggagcctgttgtggatgaaaatgttaccaataaggtggaacaaatagcaaaaggattgatcggcagtaatgtccacagtacttcggaccctaaaaatagaatgggtagcagttgggatcataggaagtttctccagtcttctcaagcaccttcaaataaagtcaatcagaggtctgccaagaagcaaaaaatgggtagtaatttgagtcaaatacagaatggaaatgcttcaagtgacagtgagaaggaacatgatctaaccaaatattatgccagtgcaactgcactagcaaattcgcctgaggaaaagaaacgtagggagcatagatccaagcgttttgaaaagagtaaagattcatcatttaaatcaagaaatgtttctgcaaataaagatgctatgactaatttgcgtgcaagaagggcaattttgtcttttcgtactagaacctatgaaggcggcactttggctgttgaggatatggattgggatgcactgacagtcaaaggaacatgtcaggaaattgagaaaagatatctacgacttacagaagcacctgatcctgccaaaataaggccagaagatgtcctggagaaggcccttgcaatggttgaaacatcacaaaagaattatctttacaagtgtgatcaactaaaatctatccgccaagatcttacagttcagagaatccagaatgaactgactataaaggtttatgaaacacatgcccgattagctatgcaagctggtgatttacatgaatttaaccagtgccagtcacaactgaagaggctatatgcacaaggaatcaagggttgctattttgaattttctgcttacaatttgctgtgtgtcatgctacactctaataataaacgagacttgctgtcatcaatggcaagcttatcaaaagaagccaaacaagatgcagctgttaagcatgcccttgcagttcatgcttctgttttatctggcaattatgttctatttttcaaactgtacaagaaggcgcccaatttgaactcatgcctcatggatctatatgtggagcggatgcgcttcgaagctatgaaatgcatgtctaggtcatatcgcccaactgtacctgtgggatatgttgcacagattttggggttcatgagaactgatacaggctgtgcaaccaatggggatgatggattagaagaatgcgaaaaatggttgaaagcgcatgggatagttctttcagaaggcttcgtcttctacactttacatgccagagccagagaatgcggttgcacatggtgatgcatcacttgctgttgatgactttttggcacggactgacgggcatcttaaaaggtgcagcagcgatgagccaacggtggatactccgtagtgtagtatattggtgctgctgtggcagtcgtgccgagatgtggacgcactgcacttctcccgtagaaactgcaaagggggcatgaaatggagctgcccaacgaagctcgcggagctaagagagtcggaacaactgaacaaggatgtggtcatcgggttttgccacttgcgcaaattgatccagtcatccagagttgcaccgcgatgagcttcgttgagaagacagagaagaaagcagcattacccgacatgagcagaagtttttatgtcgtggtggtttgctcacaagggcctgttccgataggagtagattgaaggtattagaagatattaaatttcttagtcttgtttggaagtaaggggattggaggaactgaagatttgaaggggccaaaatcctagaaggggattttagccttggctgatttgatgacccctccaatctctctcaatctccttatcatcaaatcagccctgcctcgattctcttctcccaaacaagccagcccttactagtaaaaattgaatagaaaaaaagatttaatcctcctcaatctccttcaaccaaacaaggtctaacttgcattaagcgtagaaagtattgtgaaaaacagctacagctttgaagcatacatcatacattatcttttccggtgctctttttttctggctgccccttcctctgtgaagattgtgaattactttttcttgcacgtaaatttattttcctatcccatagaataatgaaaattatatactaatgttcc

SEQ ID NO: 30129 - DNA, 1077 bp, Zea Mays
acgcgctcgtcccgtctccttccctcccttggtcagcctcagccaccgaccgttgcaccagctcgcatggcgctccacgccgtctcccccgcggcggtctcctccccgctacgcgccctctcgcgcagcctcccccagcgctcaggctgtggttgtttaccaaagcagtccgtcacgatttgctcctctacgaactttgcgagaaaacttcaggatggaccagtggactttgctgctaggcgactggttcttggacactcggacaagagagcagttctgacgcatgccactattgaagaaattgaagcggagaaatccctcatcgaagaccaagctaaagaaaagatggagaaggcgatcgaaacagtccaaactaacttcaacactgtgaggacagggcgtgcaagcccggccatgcttgaccggatcgaggtcgagtactacggaactccagtgaacttgaagagcattgcacagataagcactccagatgcaacttctcttcttattcaaccatatgacaagtcaagcctcaagcttatcgagaaaactatagttgccgcaaatcttggtgtgacaccaagcaatgacggagaagtgatacgagtgactgtcccaccattgacatctgatcgcagaaaggaattagcaaagacagtagctaaattggctgaagatggcaaggttgctataaggaacataagaagagatgcaatcaaagcttacgataaactacagaaggaaaagaagctttctgaagacaatgtgaaagatttgtcagctgacctacaaaaagtcacggacgagtacatgaaaaatatcgattccatccagaagcagaaggaacaggaactgatgaaaatctagatcttcaacaagctgagctgactgtgtatgactgcatcaattttataaagaactgttccacccccttcccatggagggaggggttctttgtaaaattagtttctaccattggatacaaggtagatgtcacaaatttaaatatgcactcctttgaacaccggatacgttctcatatgtcggtgagtccagaacgcagcgatgggaatgctt

SEQ ID NO: 30130 - DNA, 1977 bp, Zea Mays
cgtaggcgtaggctgctgatgcgcggacgcgaaccagcccgagcgcccgtctctgattcccttttcttccctttaaaaacacgcaagaacctacccggtgacgctaccaaacgggcggggccgcaccgaccgaacctaaccgagagcacgagcatacccgtcccgactccgactgcagagcatcagccgaggagaaaagtcgggagaaacgcgcgtgacgtctgcccgcgtcgtatgcgccgcgctgccgtcgccgcgacgacgacgacgaccaggatggcagccgaggagatgagacgggcctccgcctcaacggccacggcggagatgccggcgtcgccggcgccggcgcaagcggggtcgaggtgggcgcgggtgtggccgcgcgcgctccggtggatccccacctccacggaccgcatcatcgccgccgagaagcgactcctcacgatagtcaaaactggatatgtccaggaacgagtcaacattggctctgctccacctgggtcaaaagtaagatggtttaggtcagcaagtgatgaaccaaggttcattaatactgtaacatttgatagcaaggagaatgcccccaccctggttatggtccatggctatggagcttcacaggggttcttctttcgaaactttgatgcccttgcaagccgttttagggtgattgccattgatcagcttggctggggtggttcaagcagacctgacttcacatgtaaaagtaccgaagaaactgaggcatggttcatagattctttcgaggagtggcgcaaggccaagaacctcagtaattttatattgcttggtcactcttttggaggatatgttgctgcaaaatatgcgctaaagcaccctgaacacgttcaacagttgattttggttggtcctgctggcttctcatcagaaacagagcatagctctgagtggttaaccaagtttcgagcaacatggaaaggcatgctaatgaatcgtctttgggagtccaattttactccccaaagggttattagacctgagcagcacaagaaggatgctcacaggggcctgcgcagaggttatggaggagtgtttgtcacttctcaagaagactaagtgatgctaaactcatgctgtgtcatgtcacaactttgaagctgcctaggggattgggtccttggggtccaggtctagtacagagatataccagtgccaggtttggtacaagttctactggtgaattactaacagatgaagaatcggcattgatgacagattatatgtaccatacgttagctgccaaagctagtggagagctgtgcttgaaatatatattttccttcggggcatttgcaaggaaacctcttctgcagtgcgcgtccgattggaaagtgccgactactttcatatatgggcagcaagattggatgaactaccaaggcgctcagcaagcacggaaggacatgaaagttccttgtgaaataatcagggtgccgcagggtggacattttgtgttcatagacaacccttcagggttccactcggctgtcttctatgcgtgccgtaatcttctatcagtaaatggagaggagggattcacatttcctgatggcctaatatctgcgtgaagtggcatgttcaacaagcttgctcaacaacagtttacataaagcaaagatatacgattgtggaaatcattgcccatttccaccaatttgcttgtatacggattatgctgtgtatatattacataacaaatgtattagtatcatttaatgcacgatttgtgaaagggcctgagtttgtatttagcgaattttaggttggtttttttccctttttcttctttcagtgcgcttgctagtcaatcccatactataagccgtgatcattttttgtttatgtctcataatataaggcacatctcactacacacgtttatcgatgcagtgatatatagggaattaaatacaatttttggtttttaaa

SEQ ID NO: 30131 - DNA, 1210 bp, Zea Mays
agacgaaaaaccgagcccacgcgagaagaaaaaaagtggctaaaaatggaggcgtccgcggaggcggcggccgccgccgccgctgcgcgaacgttgaggtgggctggccgcgcggggcacctgggcggcgtcccgcgcgccgtcgtgttcgccgcggtgggcgcgttcgccaaggcgtgcgcctcgctgctcaacaccaccacggtccacaacgccgacgcgctcctccgcctcgtctcggcgcgggctcccgggacgccgctcctcaccgtcagcaatcacatgtccacatgacccgcttatgtggggattcaagggttttccaacttcggatgcaaagcttggaaggtgggtgctgacagcagaagatatatgcttcaagaatgtagtcatgtcctacatgtttcgacttgggaaatgcataccaatcacgagagggggtgggatttatcaagaacacatgaatgaagcccttgacgtgcttagaaatggaggctggctgcatacattccctgaaggaaaaatagcccaagaagatcagccgattagaagattgaagtggggaacggccagtcttattgtccgagcacctataactccaatagttttgccaattgttcactctggtttcgaaaaggtcatgccagaaaactcgttctttggacggcgaccaccggtgccactctgcagtaagaagatagacatcattgttggagagccaatagagtttgacttgccaagcttgaagcaagaagcatcaacggtaccccatgactcatcctctgaacggaaggggtggccggccattacaccagatgggctggacgaggccgcccagagatggctttaccagaagatgtcagacaaggtccagtctgtgatggagagactgcggaaaacagttaccaaccttaagcagcgttgatcttcatctatcaggcaataccttgttgaactgctgattaggattctttaaccagcttgagttggtggatacagaaatggacaagtggtcgtcacacaagttcgtcaaagtattggtaataatagaattagagctcagattgtttcattttttagtctttttttagttattgttttgaaaggtttcttcattatttacaatcaactgttcaggttgcctgccagttttactgaggcatgaataaaaaaaggcttttgatattcagttgcaaaatcaccatccatt

SEQ ID NO: 30132 - DNA, 1079 bp, Zea Mays
tggtcgacataccacgcggtgcttggccaagtcgggttaaatggcaaatagagcaagatggatgatgaagtacgaaaagggtcttgttgatatacttcatgagaacaatacttcacattatcgtacccaaaacggttggagaacggaggggtggaggaaaatcgttagggatttcaatgtaaggatatgcccaaggcacggaagtaccaaagtaagagctttccattgctcgactcactagaactgttatttgatggtccaattcctgaagggggacagaaatcgccttccagcgtacctcagaatgttggtgaaaatgttgacgatggaggcaacaataccagcacagtcccagcaaacagcattaggacctcaaggcatagatgatctcgacacgctgcaaaaacgcggcgaagaggtgctggaacggctacagcatggcgcggaccgaaggctaccgagagctgatgaccaggcgcagtcgagttcttgtgtagaactgcagagggacaggcgcaagaagcggaaggccccggacgtccagcagatgatggagacctatttgaatttcaggatgaagcaagctcacgtcaaagaacaaagagcgaaggacgctggccagttcacgatttcaggctgtatcaaggctctgcacaccatggccgatgtgtcagacgaggtcaaggtgttagcctctgatgttttcaaggacgctgagaacagggagatctttctctcctatgaacccaggctgcgcagcttgtggctgaagagggaagttggcaagctactctcctgatagtggtgttttgtttgttacctgtgtcagtgagtcagtctgacattcgattctggagggagctattgaaggtctaggcttcattcacaaactctattaaaccatctccgtcagtttgagagaacactcccctttttcctaaaacctgccatatataggggaattaggtgaaaagagccgctccagcatatcctatctcaatcatctttttctatatttttcaatccatcacaacatctcctcaatccctaagaaatattcgttttaaccttaatccacg

SEQ ID NO: 30133 - DNA, 784 bp, Zea Mays
atggcgtcagagagcgttaggcttacttccactccactcgctgtcgctgggtttattatccacgaaaggagaaggagcggtggagaagaggagaaggtaccgcagccgcacaggcacagctcctgcggcatggcgcagtggagcagcgtggccgcgagcctggaccggtggattgggcttgggcttgggccatgccgctgcggctcaccgccggcaccgtcccgggcggcgatgccacggcgcgggcgtgcgaggaggaacggcggcaaggtcgtcggatgcgcgtccgtcccgcgggagcaggccgagctgccgccgcttgccgtcgacggcaccgagaaggcgtaggcgggtgcggagcgtgcggcggcgcggggtgggtgctctgcgacttctgccagggcaagaagaacaacgtcaagtcggagaccggcagccgggtgtaccgccgctgccccacctgcaaggctgcgggcttcatcctgtgcccaagatgcagggtgtacaagtgcgtcaccttcccagagagcactgaatcgtgagcgtgtcatggtggtcgcacgtgtttgttccaaatccatgtatgagtctgcagaagagatctgtgtgaattactactattatcttctgaagatatttaaaggagaattattatattctgaccgtgtttacagtagaacacctgtctgtgcacgtatacagttttaatttcacacgcagagatgctcgctcttccttcagacatgcttggtgcctgtttgtttcggcttctagcagcttctgg

SEQ ID NO: 30134 - DNA, 1284 bp, Zea Mays
cacctgcactgcaccgcaagtaacccaaccctgcttccagtgcaagtgactgaccccgtgacccggcccatcataacaaatcaaaccatcacccgacttgtttacccccgaaaatttgccgtcttctcatctcgctcccctctttgcgccgcccccagatccggcaccgcccgctgctcgaacccgcaccccacgcccgcaggtgttggcaagagttgcctcctgttgcggttctctgatggttccttcactacaagctttattaccacaattggtattgactttaagatacggacaatagaattggatggcaagcgtataaagctacagatttgggatacagcgggccaagaacgcttccgtactattaccactgcgtactaccgtggagctatgggtatcttgctggtttatgatgtcaccgatgaatcttctttcaacaacatccgaaactggattcggaacattgagcaacatgcctctgataatgtcaacaaaattttggtgggcaacaaggccgatatggacgaaagcaagagggctgtacctactgcgaaaggacaagcacttgctgatgagtatgggatcaagttttttgaaacgagtgccaagacaaacctgaacgtggagcaagtgttcttctccatcgcacgtgacatcaagcagaggcttgcagagactgattcaaagccagaggacaaggcaatcaaaattaacaagccagaccagggttccgaggcaccagctgcccagcgatctgcatgctgcggttcataagcagacgcacgatagccataatcattggttatttgacactatttatttcctgcttggcttttataggaagaatttgaggaagccacttatgatatactgatgatgtggttgtactcttgtttgcttccactcttcgaagcaagcacctcttgctgttgacgtagctattgcactctggacatccgttggaacaacctctctcctccctacagtctacagtgtgtgatggacgaattccatgccgttgggtttgcattatcgatcaatgcatggattaacgtatcgcccttgtgtggattgttgtgttttttttctctcatgttgctgttcctttagattgaatttgttgggaaggaaaatatattttccttttcttatgtatatcaggtgcatttttatcttttgtacctggaatgtatgtatccacggaaagcgtgaatcttcaatttagaaaagaagaaaacttatctggaaatataagaccagtgcatgcggtattgtttgaat

SEQ ID NO: 30135 - DNA, 258 bp, Zea Mays
aaatgatattatggttaaattcaaggttctgcttaggttatattgacatgtagatgaaactacatgcgttttttctcttaacagcttcaggtatcccaacaataatgtatctgccatcgttgcttcatgtatccttcaactgtaaatatagtaacacatatcgtttttgttttgtgatagttccacttttacacttacacagtgttgagtacatactccaaatttgcttttaggctgggtgagaagtacaaatcaata

SEQ ID NO: 30136 - DNA, 1236 bp, Zea Mays
atgccggcggcgacagcggcgggaggtccggctgctctgctgcgtggatcgtacgttggagccttggagggctggtggagctcgggggcgaagccggcggcccgaggaacctcgggtgcttcggacgggcgcggaggaaccgggaacgggctgggtggagtggataaaaccggaagcaccggcggtgggaccgtgggaggaagaggaggttggggcttgggggtcgttacatcacattatccttatgtattcatccttacattaccaacaagtttatcattcgcaccgaggacatcattgctatactcgatcatttcctccaagggtggtggatggctaggtcctcgtggtagcaaatccccaacaacatcaggtgacatcgctacccttggtggcggatggctaggtcctcgtggtagcaaatccccaacaacatcaggtgacatcgccacccttggtggcggatggctaggtcctcgtggtagcaaatccccaacaacatcaggtgacatcgctacccttggtggcggatggctaggtcctcgtggtagcaaatccccaacaacatcaggtgacatcgccacccttggtggcggatggctaggtcctcgtggtagcaaatccccaacaacatcaggtgacatcgccgccatggaaggaggcttcataggtccagcggatggcattctccatgatggtggcatcgccgccatgggtggaggatggctaggcccagacggaggggcattgactgaccaggacacaagcttctcaaataagcaagccaagttgctcaagacacagaagttcacgtccgagcttgaccatctggtggatacatcaaaggtcaagttggacgtgatgaaccctggattgccaagcgggtcactaagctacttgggttcgacaaatgtttctgatccatgcagagggtctttacttaatgagaaccccaactcatttaccattgtgataggaccaaaattcacgtccaaactttgcactacatctgctgcatgtttgctttggtgtcccgttccgatatgctgcatgcttagagtttcagacacgatgctcaagcaatgcactggcacacagagttgcaattgcaggcagctacgcttgcactacacatgcgcaaacaattccaacagaatatatagtactacccctatccaacacccgctgcaatacatggatgacattgtttcatcggttataaataccataagatga

SEQ ID NO: 30137 - DNA, 1772 bp, Zea Mays
ctcagatttccgctgaaattatattggttctaaacaattacaagtgagaaatatacttttgtatacttttcttggaccgcgtcccaccatccgatcttatggaccgcgtccaccgaaccgcgcagacaagtagtgtcaacaccgaagacacatcccgatacaccgcgtccatgcagcagaactcctttcccctccgcccttccctctccagctccctcccgccacgagccccttatcctccaacggccaacgatcaccccggcatcctcccgcccatgtccgccgcggccgatgaccgcgcgcgccgcgccgccgcgttccgccccgccccgctccctccgcctgcgcagaagcagcagctctccggcgtggccgccgccgtgctcgacgccgggggacgcctgggccgcgccgtgggcgacgtcttccgccgcctccgcatcgacgacaccttctactccggcggcggcggcggcggcggcggcgcgccgaatcggagctggcgcgacgccgggaacaatggcgggaggccggcggccgccggagccccggctgcggccagcagggaggaggccacaggcggcggcgcctcctccgggcggttcgcgcgggcgcaggggagcatgaacctgtcggcgacgtacgacagcaggacgcacgacgtggagagctcggtggtggccagaggcgacctgtggcgcgcggaggcgtcgcacagcagcagcagcagcgccggcgccggcggcaatggagccaataacaacctgttcctcgtgcagctcggtcctgtcctcttcgtccgcgacacgacgctactcttcccggtgcacctctccaagcggcacctcatctggtacggattcgagcgcaagaacggagtgcactcggtctgccccgcgtactggtcggcccacaagagatggttcttcatgtccatgctatgcctgaacccgttcgctttttcgttcatggacatgcaattcccaaacgggcaactgaggtacgtcgccggcgacggcttcacggcgcgtgctttcctgcccctccgtggcggggtcttgcaagcccacggaaagttcccgggggagaagaggctcagcttctctttcaagaacaggaatggcggcagcgtcgtcccgatggttcagtggccggataagtcactctcggtgggggtcgtccaggcgttgtcttggaggagatccggcctgatgctgcagccagcaacacagatcagcatatgtcctacgatcggcgggcgccatcctggggtgtgcgtggagctgatccactcggcggacgacaacgtcggcgtagtctgcggctactcccacaccgcttcttcccctgcttccgcatacgcctccatatcgatcggaaggtcgaagctgaacggcggagcggcaaggtcagggttagcgttcagagtagacgctccactactccacggttttggccggccatggttctcggtccagatgaacagcggcatcgagttctgattccccactgtcttgccgttgccatgactgaacgaacgaacttactgtacagtagttgatgttgtgtataaagcttgacgacgactcactgatgccatgagtatacgcagtaaacgctacaacactatatgtttggtcgctggctaacttatcataatatgtctattttttattgagaaattagacattttctaaattaaatttcgaatataaattatagataacagtagcagactagtaagcagtacatagaacaacactgcgtcaaaa

SEQ ID NO: 30138 - DNA, 286 bp, Zea Mays
ttcccttttcttggccgccaacccccccttttccccacccttggccgcccctcccccttccccttgcagccaccctccactacttcctcctctctctagatctccccccacgcagcaaggatcgagaagaggaggaacaagatggattgaagaggaagagaggatcaaggagatgttctacccccatctcttgcagattttctttgggaaaccctaggtaaggataggatccttgttcctccctataattatatgcttttggaggttgtggatcatgtggattgaa

SEQ ID NO: 30139 - DNA, 1045 bp, Zea Mays
agccggggctccggcgagctatcatgcagtcaccagctatgctaactccggcatccagatcctctccccggccgtgggcgtagcttatgaagaacttcaattatgatttaatctgtcagaaagaatgaggtgaagaaggtggtgtgcatcccggcgctaccacctccggcgagcagccgcccaggaggaggagaggtgattccgtctgatctttgggcgtggaggaaatacggccagaagcctatcaagggttcgccttacccaagaggttactacagatgcagcagctcaaagggatgtatggcaaggaagcaagtagagcgcagtcgcagcgaccccaacatgctcgtgatcacctacacggcagaacacaaccacccttggccaatgcaacgcaatgtgctcgctggctactcccggcctcacactgctactcacatgtcgtccaactgcaagaagaagaagaacagctgcagcgttgaaccgacgagttcatggccaacaacaacaacatcatcaccatcatcaaagaacggcaactacgagtgtcagcaaatgacaaacatgacgatggaagaaaatgcagcagcagggtatgttgcctacgccatcgatgacgaggagtgtgccgcgatgcatcagccgatcaattgcggtagcgtgcaaccttcagcagatgaggttttcgcagagctagaggaattggagcctacgactagtcctgtgaatgcaaacatcttctctaggggggtgacttatgagtggcacaagttctaatctatcaagcccaaggtcgtataaggaaaggctagctaccccatatatatacatggttctgatgaaaaataggttacaattaataacgcacagattttacttaattaattgctgtgacgacagatctttatataccttttgtgtgcttatgattaattcaaagataagatatacttaaaaataagaaaaataaaatatatgtgtataatatttcgtcgtacataaaaatttccacaaatctgcatggatcgtatttgttactagcata

SEQ ID NO: 30140 - DNA, 651 bp, Zea Mays
tatacaaaagccagcgaggacgccttttaataggcagatgcaagctaaggcgttcggagtagcgtggctgggttggcgagtcccaggcagcagccgcagctagcgtcatcgacgacggaagggcgacgggaacacatacgttgcgtttcgatcggcacgtgtttgttggtggcgatcgagagttgctcgcgttcgttgccgcgggggacgacagatcgatgagccgagcgccggcccgaccaccatgcatgccgcgcccgatgcatcaaggttccagcagccgcatgttccacgagacgacctcgcctttaatttgcagaaggcgactcagcgaaaggtcgtagccccatcatgatcgttcggcataggacggacttgggttcaccgacacccacgtcaactgaaaccttttaggcccagtttaagttgagaagaataccacatcagtatgatatattgtagggtcggagtcgttacaagttaagctctagtttcaggggttatgttgtgcaatctctagttgtctcttgtattttgaaaccgaatacatgcccttaaactatatatgatcacatatgtatacaggaaagggacacgaggttacaacaaactctatccatatactatagtaccctgctaatcaggtctcag

SEQ ID NO: 30141 - DNA, 2132 bp, Zea Mays
ccggagtccaggcgtcggctgcggattagtctgtaacggaggtacaatcagggcgaccagtacgtgccctgaattttcaggcttctctagctgctaaggatctccagatttccaccgcgtcaagtccaaggctgcattcctcttcaagtaccataagccatcacctcagattcaatcacctcaattgccatgaaaacaaggaagatggcctggggactgaaaatgctgaaacaagtggccttgaaagctcatctaggaaggctgtcatggttaggggaagtttcagtaatgaagctgttaatagtgatatgtcaggagaagggataagttttataggatcagagctggaaaatattcctagcacagtctccactaatgaaactggtggctcagccgctgaatctggtttgggcccctcattgatggcatctgaaaggatcatgtctgacttagaaggagaggtatctccgcaagggacctcatccacaactgccatgacaagtgaaagatcagatgtatctcaagctagcttaacatctatgtttcctaactcttcaattgcatcatctgtgattgtggaaccaatgccagatccaatctctaccagggcagatgtccccatattcagtgggccacatggtgagcctggagggagtatattacatgatgacatgatgagcattttctcaaatgacggtctaggacgctctagggattctagcagcagtgaaacaaggaggagtcacagaaggattctatgggacacgttttccaggcgtggctcaagaggttatccagaatttgatgctgatgacctcggattttacagcacatggctagaccttggtgatgacatttttgaagagttgggggaatcaagatattttcatcgcaggcgacatggttcgatcagaattagggagcatcgccgtgctgtttttgatagtggtaatgaacaaggcactgctgcatgtcctttggggattcatcaaactggccgatgcacatgtgattctttcttggttgctgaagaatctagtgcccgagcaagtatatcaagaattgtcatgttaactgaagcgttatttgaggtgttggatgaaattcaccgtcaacctgcatcactttcactttccatggtctctgttcaggctcctgaatctgtagtcaattcgttgccgtgcaagagctacaaaaagctagaggcaccccaacgcagtgatgatatggaacagtgccatatctgcctaactgaatatgaggatggagaccagatacgaattcttccttgcaagcacgagttccacctgcaatgtgttgacaaatggctgaaagaaatacacagggtgtgccctctgtgccgcggagacgtctgcgaagtcgcctcgtgaagaccttggcgctgccatcccttcctcacggcaccggcagatagcgcatcccccgcctgctccgttgttgaagctggtttggtcaggcaacggcgatcacgtcccgtcaatctgggcgtccctgccgaagagcgtggccagatcctgcgaccaatgcgtcgctgttcctgccatcaactttttaagataccgagactgtatatagctcttgtagcctctccgtgtatgacaacctgtacatatatatgtaaattctagattccaatgtccattattttgtcctacattcagatcttattctcgcagccctgatgctcaaactagctttaccagaatctgtcaacacctcttcaactataaaaaggtataattattgcagaatgaccccaaatatcagacgcttccgattaagagaattcgattcaaatctagaaaggcaacagctgaatcttttccaaataacagaattttatccaaatctagaaaggaacaaactgaaacatttgggtcacaaaaatactgatttattttggcaggggccgcgcggacgcgtaccccctcaatcacaaattatgacatccactctcccagttggggagatggtagatcagcgcatccaccaagtgcaatgtggaccactaatctagaccatgggtcttcttgaacacccatcgatcctgtccaggtaagtatgaaactctgttgtccctgggcgtccttatatagccaccccaaccttgc

SEQ ID NO: 30142 - DNA, 1373 bp, Zea Mays
aaaagtttagattgttttatcataatcagtggtagtggtatataaataactccaaactatatgtctatgtagattgtttttttaagtttttgaggagcaaaagaggtactgcgcctccgaaaacttgaccacgagatggaacccgccgcggccgccggagagtccgattcttcgccgcccccgcccccggaggacctttctactgtagagccttcaccctcctcctcgtcctccgccacggccgtcgttgctcccgaaacgcctccccctcccggggcgcaggcggtcgcggcggcgatggaggcggtggagcgggacgcggctgccatcgccgagagctacgcctccctcttcgcttcactccgcgtcgctctatcaaacgtcacctcgacgtcggcggagaacatggagtgcttgggggacgtcgtcggccgcttgcaggaatccggtgaggccgcaagactgttgacgtgcactagcgttctctcgattgttcggatttttatgtttgggcgtggggtgggagtgggagggggcacttaaatctctgatgttgtgaagtgtgagcattcaaaggttcatatattttagttagcagcattgattgcatggtttccataggttgatatgcggatttctgtaagctgtagcttgaagttgtatcacatatgatttcgttgcactgaaatgtctaaacatcaattgctttgttggtgctccagttatgatcactacctctactatattatgttttgcagcacttgaagcatcttcgaaaggaaataagtacatcaattcgtgcttgaggttgaatgaggaaatgagaggcttggaaagcttagctatgcaactgtatccttttgttcgctgctgacaaaattagttctattatattctgtggaattggtgagtggccatcttaatatgattctcccaatttgtgtactttccatatctagctgaacactgttcatttcggagctacttgttgaatcttaatattttgaaaggaagattctacggaagaatgttgattcactagatttggctgtcagtcaattgcttcgccttccctagtcaatggatactatcaatgaagttacaaggcaactgactgctggaaatatgaagtggcttatagcaacagaggactggacactggaggacttcccctttttatggcatgataaaacactactagttcttgatttgatttacgtttccatcttatctgtatttgtaaacaacacatttattgaaaacatctctatcttcttgtgatgcgtgcatgaagtttgtatgtaaaatgggtcattgagcccatggactatctctgtaaattggagggaaatggcaacagaagtttttctgta

SEQ ID NO: 30143 - DNA, 3744 bp, Zea Mays
gaatttcaagtcgcaaagcgcgacgtccgacgagagagagcggcctcagaacaggagcgaagggatccgccagagtccccctgagtccaaccaagctcggtccggcccagtcccaggcccaggcccaggcccgagcggtagcctgtaggtcgccggcgatgccgttcctgtcgacgccgtcgttcgacctatccgccggcgcagagccaaccctgggcccgcgctcagcggccccgccgcctccacccacggcggccgcgcatcatcagccgccggtgtccgaggcggcggcccggcggcttcgggaggcggaggagcggctgcgggaagccatcgaggagctacaccggcaccagggcggtggcgttaagggagatggggacgagcagcgggagggagagcgggggtgcggtcacgacggggagtcatgcgcggcgcacgccgcggggaacctgtgccagagcttcctgctttcgtacggtgtccgcgtcggcatcggcatcctcctccgcgccttcaagctcgtgcgccgcaggtcctatggctcgctcctcgaccttaaggtactcctcctgttacttcgcatcgtggcgtaattagatcggctgggatgacagattaatcggctgccggaattcagttgagagcttgggattggatatgcaaattcactacccttggtttcattggttgatttgagtagaattggcgattttgcacgctgatgaaaatgtcatgagaaggaattgagcgaaggacagattcatgctcacatgctgctactgctgatgttacagctttcgctttctcaattcttattagattggactatcggtgataatgaactgacaaaatttaaaatatttgagccagctgttgcagcatttgtagtgcatattctagtagccagtacatgccagagcagaattggttgctttgactgatatatgtctgcataatgtttcctagtatgcattgctttggtctatttcgtgccatgaggctgtccgcgccccattccaaacaaatactgttcggccactactatctgacctactggttcattgtttacaaatactatcccacaactaatgtctctccatgtccatgtttcgttatttaattaagtatatactcatctctatagactatatctatatctatctactatattaaagcaccagttttcctggttccttgttttccatcgtcgttgtgctccccacatttaaataaataaataatgctaaaattatgcacgaattcaccatggctgttggctttaaaccccacattcatacccacctagcaacagaacacacacacatctgtgtgttttatattctgtacctaattataaatggaaatcaaaacaacgtacaagcactttgctagtttgaataaaaaggacagacctagtgtcggagtctcccacatgagtggggtatagggaatggataaacagagcaagccttccctccgcaaatgcggagaggctgcttcgaacccgtgacctagtggcacagcgagacaactcttaccatagcactaggcctgcccatctatatactcatctgaatacattctgatttacagcaactggtttcggagaaagatcttatagtaagagaggaagcttgccgggtagggttgctttttggcggattcactggatcatatcatgcacttcgatgtttccttaggagatttaggaaaaaggagacaccattcaatgcgtaagtgcctatatgctatgactccttgcctatattttcaatgcagagctctggttttttagaagttttttttaagtatgtacctaaccttggttagtcactaataggtcgatactaggctattttctatatttttctcaaatcatatccatgactcaactgaagggcgtgatggagcagaatattagcaggttcggtggcaggattggccatactagcactggatgattcaagtaggaggcgtactctatctttatatcttctagcaaggctcgctcagtgtgcatataattctgcaaaatctaagaacaaatttcatttttggggaagccattggagacatggagatgcattgcttttttcattagcatgtgcccaggttatgtatgcttttgttatgaggcctgaaagcttacctaagtcgtaccaagaatttatccttaagacaggaccagtagcagaacctgtctacaaggttgtcaaagaatgctgcagaggtggtcctgtggatctaactgccctctcagcccatttatcaaacaagaggaatccggatttgataaatttaacaacaaatccatccattatcccatgttctgtgatccaccctgacagagcatcatgcttggctcaaaatgttaatgttgtttcatcaacattcaagaagacattccctctatatttctcattgacatttgtgccctttgttgtcctacgtcttcaaaagttcttggaatcgccaacgacaacttgttggcgtgctcttgtgggtgcagttcgctccaccacctttttgtctgccttcgtcactgtattccaggctgctatatgtttgcaccgaaaagttgcgaacaaagaccacaaacttgtgtattggtttgctggtttgatgtcgggtctttcaattcttttggaaaagaaagctagaagggctgagctagccctctatgtgcttccacgtgctggagattccctatggtatatattgatcaaccgccacctgctcccaaatattaaaaatgctgaggtggctcttttctgcatgtgcatgggaggaatcatgtattttctggagtacgagccagacacaatggctccattcctcagagggctcatcaggcgcttcctggcaagcaagatcagcaatccaagccccccgcctcccaatcggaatgcctcctactcgtaccttcagacgctgaatgctctggatcaatcaagaacccaaccaggggtggataacggactgacgacatcggagaaatacaacctcgaatcaattcctggactttagagacctcatctgtggtattagtaaattgggtcttgtagcttgggaagatcacgaaaactcgaacacccattacatgtgccatcctgtgatgggtttatactctgttatacgtgtttgtcttgagtgcaaaataaatggataagcagagatggtttgtgcgggagtatggactgatacgaagcaatttgctcgttcttgtacatgcccaagtccacaaggtcaggatttgaatcggtcaccaggggcacgaaggtatttttttcgttgcatcacaacgtcgaagacatgatcctgaattcctgacaaaccgaaaggtcgccccgagcagcctcgcaagggtgtgccgaagctcttgcaatttcgtttttatccctttttaattttgttgtgattttacctctgttctacaaacgaagctcagtcgtattcttgtgttgttacagttgacaatgttaaatctgatatgaaaaaacaaaaatttgcacacaatttattactattttactcgtcattgtattacgtatttgcgattttactcccgtaggatgcaccgtacagaataggagggtcgtttggatctttcgcatattatattttcatatttttatttttctaatcactaattatgatttttcacttttaaaatggatgcataaaatcataaagtagcttcgcttttaaaatggatgcataaaatcataaagttaaaaacag

SEQ ID NO: 30144 - DNA, 3797 bp, Zea Mays
ggccacaaacacccgcgctcgtcgctgtctcctcctcgccttttgccccgcatcgcgtctcgctgaaaccctctcggtcaccgccgctgtcgatcagacccggctgtagctcagggaccccgtcgctgcagtatcctccgagggtcgttggcgggggagtcgtcgtcgtcgtatttggctgccggaattcgatgcgccacggagcgggcgagaggacctagttgagttgaatacggcagcgacgggaggacgtgatgccgggggtggcgtccgcagcgggatcggggatctggtcgcgccggcgggacgagatcacgttcgatcgccttcagaagttctggaatgacttgcttcctcaagcacggcaggaactcctcaaattagataagcaaactctcattgaacaagcacgcaagaatttctactgctcaaggtgcaatgggttgcttctggaaagttttgcacaaattgttatctatgggaagtcactgcagcaagaagcttcagatattggtcatctgaggacagctattgaattaagaattacacatggagagcaagatggcgctcaggacccatcaatccatccctggggaggcctttcaaccacaaaagatggcttccttacgcttcttgactgctttataaaagcaaaatcattacgggtgcttcagaatgtctttgacaatgcacgggcaagagaaagggaacgggaaatgctttatcctgatgcctgtggtgcaggtggcagaggatggatcagccaagggatggctaactataggggtcatggaataagagaaatgtgtgctctacacactgcccacctttcatgtactacactggtggatttctggtcagcgcttggtgaaggaactagatcatctcttctgcggatgaaggaggaagatttcattgaaaaacttatgtacaggtttgatagtaagagattttgccgagagtgtcgaaggaatgttatccgtgaattcaaggatctgaaggaactgaagcgcatgcaaagggaacctcgctgcaccagttggttttgtgttgcagatactgcttttaagtgtgaggtgtttgaggatgctgtcgtaattgattggcaccagtgcttatcagagccagatgaatcttatgaccactttgaatgggctattgggacagatgaaggagaatccgatatttttggctttgaaaatgttggaatgaatgcacaagtccacagaaatggaatcgatcttgatcagtttgaggactacttcataacgttgcgagcttggaggcttgatggccagtgcacagagctgtgtgtaaaagcacatgcattgaagggtcaatcatgtgctcaccacaggctagtggtgggtgatggctttgtgactatgacaaagggtgaaagtattagaaatttctttgagcatgctgaagaggccgaggaagaggatgtacatcactcgtcatttatggctatgaagacgatgccatggacagggatggaaatgattttgatggtgatgatgcccattcacagaagcatgccaagagccctgaactggcaagagaatttcttttggatgctgctgctgtgatattcaaagaacagattgagaaggccttcagggaaggtacagcacagcaaaatgcacgtagtgtttttgtgacccttgctttaaaacttttggaacagcgagttcatgtagcatgcaaagaaataattacgttggaaaaacagaacaaacttcttgaagaagaggagaaagaaaagcgtgaagaacatgagcgcgggatgaagaggagaacaagagagagagaaaagaagaacagaagaaaagaaaggctgaaagaaaaggatcatagtaaaggaaaaagactagttgaatcaaagtcaccagacaatatttcatcttcagctccaagcaactccacagcatctatcaatgattattcgacaaatactctggactcaagagattcagtgtccactgcaatgcagtgacagaattttctccaatggacaacagtgacatttctacatcagatcaacccaagtctttgagacgaagtccaagatcaagagattattttcctcaagatcagtcatgttggtatgatgactgcggagatgagtctggaagaattggtgaattacgatggaagtcaagggaaaagacaagaggtactgatagaagttgcaacacagcatccacctcaaataacaagacaagagagaggcactcatacaatttttgcagctgtggccatccagaagactatggagttatggacagctgtttcttgccaacagttagatctgtcagagagatgaagatagcaagaaaatcaggagttgagaaacctaaggtgcagtacaacagatgctatacattggatagctttatagtgccaaaaggaaaccatgctggttgtacacagaaaaatgctatcccaaagcaagtatgggagcctatggatgctcgaaggaagactaacttacacaacacagttcatgattcaggttcaattaacgatgttgatccactgaaacatgtggtttttgataacagcggatctcataagttcagtgtaagatgtgaatcacagcctcaggcttctgaaagttccagggatgtttgtaattcagatcaaagatgtgcaaatggtgggagaaatcaaactacttcctgtgctagtactcttatggtaaataaacaaaattgttactcagaaaatgatgaaggctccaggcatgatgtagagctgatgacgaactctgctagttctgatagcacctcgtcatgcatgagccagggagatagggaaagcagctccagcagtacaacctcttcgagcgctcaaaatccggaatcatcttctgaatctgaggaatcaccggagagaataaacagcacagtaggtacaccatcatcaagagctgcttcacggtctttgcttgaagcatgtgcaggaaatggtttcagagaataccaacccaagacaacccgcccagctcacaatgacatgtttgggtacaatgtatcccctgtccaagaccagctgctgcattaccaaatcacgcatccacctcaacaaccgccaataacaatgggatttcatgaccgttcttgggctgcaccaacgaatggaaactttcaccatatacctccagagcctattcacaaggccgcaggcagctttagagccgtgcctctgtcactgccttttcaaaacggacatcggcaggttgctgagcatactcagagagacatgaatctagagaggcacccttcgaagttgactatgctgacaggcaaggatcccccagaagacaagaacaagtcgggactaaagtatctcccagaagacaagaacaaatcatgggaggcggatgcatccttctcgttgttccaattcaacttgccaatagcttcgcctgtaacaccatcatcgaaagataagagcggaaagttggctgcaaggacgccactggttgaggttcaacctcagctttgcttgagggaacaggcagatgtgaagcagtataacctcttctcctcgaaagataatggtatattttcgtttatgtagataaattaaaaactgtgacaaatctgttatccttcgtttctgctgtctcttgctgcacttcgtgaatgatttgtgttctccggagaaaaataaaggctgttggcattttcctcttgctgtctgtatcttcgtttacctttatgtttgttcccgtgtgcgctaaaagctagcaaactgtaatgctgctgactcttgattttttttataga

SEQ ID NO: 30145 - DNA, 1159 bp, Zea Mays
cgccgctgtaggctgtagcgtcggttggacgtcgtgagcgtgcagagcaattaagcaaagcagatgcaagttgatgctacacccaatcacacactgaatctgccccacagcacaccgaacttcagcactggggatttccctgcacttccaacagctgaggaccaaaatggtttcaatcagggtaatgtggatgtacttggcatgttcaatgggcgcagttcatctgcgatgcctactggagctggtgattttgtttcagccgttcgcaaacttgcatcgcagaactctggccagtggaagtttaaaaaaggtcctgagtatggtaatggcatttcagctctttctgtacccaagcagtacagttctagcactaaacaatcgtctgggaacaagtttcaaagcatcagcagtggaagagttgccccatggcttgagactggtgatgcagtggtatgtactcagaatcaaggggagaggctcgtgattttgctagggtccggaatacctgctttgagcaggctagacaggcttacttggttggcaacaaggctcttgcgaaggagctcagcatgaaggggcaggcctacaatgtgcaaatgaaagcggctcatgagaaagctagagaagctatttaccgacaaaggaatcctgtttcttcccaacgtgggggtggtgaccacctgattgatttacatggcctgcatgtgaacgaagcaatccacatcctgaagggtgagctcaccgccttgaagagcgcggcgagggcagcaggggagaggatgcaagtcatggtttgcgttggaacaggccaccacaccaagggctctcgcactgcgaggttgcccatcgctgtggagcagttcctgctggatgaaggcctccagtacacgcagcctcaggcgggtctgctccgagtgatggtgtactaacatctcttaggtgagacatcacggtgaggaaaaaaactccaaaaaaagagaaaagagatgtacgaaaacgcaggaaaaaaaagcgtcgttggagcacgcactgttattccgtgtagctgtatattaaaagaggcagcaggagaatagcctgacaacaggatacagtgtaaaattatacgtagcttccttcattcaattcacattccttttccatccatccgctgctgtgc

SEQ ID NO: 30146 - DNA, 3425 bp, Zea Mays
ctcggattccacaccgtgtgagaaaaagagagggggaaggaaaaagggcggcaggcgaaatgcgcaacgggacggtgtgaaaagagcggttgctggcaacccaaatggtgggacttggagagagaaaccgcagcagcacaactgccacaagcaaagcaagccagcctgcgctgcgagagggaggaccgaggagggagagggagagagagagaccggacaggcgggcagcaagcaacgggcacgaaccgccgccgacctctcacaggcggaggagggagggaccgagggagagacgctctcctctctctctctctcacacacacacgcacagtcccatggtcgcgcacgccgcagcatccgcatccgcatccgcctcctccctgtgagtcgccgagcgacgccgcgcagatgaaggtgtcgtccaggaagaaaccgccgccgcagcaacagcgggaggagacggaggagcaagggtcgtcgggggcggccgaggccatggacgccgccgcagccgcggccgttcaggaggaggcggaggcggaggcggaggcggaggcggaggggaggacagtgctggtaggcgtgcgcgcggacgccgagagccgggcgctgctcacctgggtgctcgtcaatgtggccgcgcccctggaccgcgtcgtcgccgtccacgtcgcgccgccgtccgccgccgaggcggtcgacttcgacgccatgctcgccgtctacgagggcttctgcaacctcaagcagatcaatctaaacctgaagatttgcaaggactcgtcggtgcgcaaggcgctagttcgtgaggccagcctgttcggggccgcaaaggttgtcctcggcgtcgccaagaagaggcgtgcgatttcgtcgtcgcactcagttgcaaagtactgcgcaaagaagctgcccgcgaagtgtgcggtcctcgccgtgagcaatggcaagattgagttccggagagagtcgagcgtccatccagatgacggtgagggtgacgccacgcgtgactttggcaccaagggaagtgaattggagaatttgtcaacggatcaggtcgagatcgacgcagatccttctagtacaaatgctgaagagtcaactgtcaaacagggagacgagatttccgagcttccaggtaagggtgccagtgtgctctactgtgttcttcctgagagaagcagcggttctgttgcaagtacatctagtaggcaagaccaagattcagtggatctgccatctgaaggggctggggagctatattgcttattgccacccaggaatggccattcagtcaggagcattggtgattctaagcgttcaaatgcgagccaaaaggatgataaaccagccaatccatcactggaaggagatggcgatctgtactgccggctgccgaggactggacgaccgggtaggaattctgggggatccaatcgttctgccggtataagaggtgcagttaggcgtagcagtagtttctccagcgatatccatctgagctcagagacatcacctattaagaaggatggctcggttagcatgactgccaccgaaaggagttcttctgctgtatccacagaagctgaggactcaccgaaatacaccgcacgaactgctgaaacaccctcgagctccccaatgtcgctgagacggatggtagaggggagatctgaccgctgtcacctccatagaagaatctttagacatcaaagaagttcatcttttgaatgggcaaagatctcaatggttcaatgggcgatgagacttccgagccgatacacttcggtccacccagatggcaaaccactgaaaccgggtgcaagtccaaggctgaactgtgattctgaaactgagtccactgcagctgttgagccagaatcaatgttttctttcgctttctatgatgtagcatggcctccaagtgaactggaatcactgcgagagaagtattcttcagtttgtaggatgttttcttatgaagaactgaagcttgcgacgtccaactactcacctgatatgttaattgggaagggtggaaccagccaggttttcaaggcacaacttgatggcggaacatttgctgccataaagattctgaaaccctcggttgatgcaatacacgagtttgttacggaggttgagaccgtaaccagcttgcagcatgagaacattgtagcactaaggggattcagcttcgagaactacaaccttgtgttggcatatgattacatgccccgagggagcttggacaaagctcttcatgggaagaatgatggcacagagtttcttgtctgggagaggagaattaagatagcaattgacatcgcaagagcactcgaatttctccatctcggcggtgtgacccagtctgtgatccatggagatgttaagtcttcaaatatcctcctttcagaggattttggggcacgggtacatggcgccggagtatttttcacacggggaggtcaacgagaagattgacgtctacgcattcggagttgttctgctggagattgtttcgggaaggaggcccatcacaccagggagcgcgaagggtcaagaaagcctggtcggttgggcgaagcctttgctgtccagtggcgggatcaagcacctggtcgatccgtttctggggaacgattacgactgcgatgagatggagaggatgacgctcgcggcctcgctttgcacgaggacgtcgtggcactctcgacctgagatgtcactggtcctgaaacttctccagggggacgacgagacgatgggctgggcgaggtcggccagcttcgacgggtcagacgaggaggccatcgcggcgggacctgacctgaacatgcagtcgcacctgagcctcgcgctcctcggggtggatgcggacgacacgctgtcgcgctgcagcagcacggagcgcacctcggccgacggctactggagccggtcgtccagtttcgactagcggtagctgcgtgatggaactgatgcggcagagtagagtagtggtagtgtggttacgtacagcaggcaggcaggcaggcgattggtatgcttggtgagatggatgttcatatcaggattcaggtggttggaatgtggacagctgctgatttagtttagatggcagtgttgctttgctgatttggctaggagtcgagttctgttggtagtatagatctgaatctgaccttacgatgcaattggtttcgtatttgtattgttatcttttttttttcctttatcaagtcttcatgcaagaataggctaccaattggttgttggataggcttgtctagcaacaagcctgtaagataagggacttggtaggaaagaatctgcaggatgaataaacctgtgaggattaaattaattgccgttagcccatggtggccagccagagccaacttgggcttcaaggcctttcg

SEQ ID NO: 30147 - DNA, 4671 bp, Zea Mays
ctcttggacccggacatctacaccgacggccggatctccgtgcagccgtgcagggcatcacccacaagaagaagatcaagctccggcgagtacctctttccatctcctgtcgctgcctctaccatatctatctaaaggaacaaatttgagcgcatcttctgttgacagtgactttagtttgctattggtgctccagtaagaaaaatagatgtattttgttgatggtggcttcacaatctggcacatgactcatgaaaagctttgtttgacaaactattgtgaaggaacaagtatactgtcttttactacttcagtttgcttgacaaactattgtgatgatggataaagtgtgatgtgatgatggataaaccaatttactatgcttcagtttactttgtttgatttttcctgattttttgaagtattatttatagcatcacatagctatggatgaaccattttctgatgatggataaagttctcatccaatatagtagtatagagttgctgctggctatgttttgggactaaaacagctttggactaaatccttggttgccaaagggtggcaggaaattatatcctagtggggaaaatcctccatggaaatcgaggtgccatttaaatctcattggtggattttttttccatgggttttttccctattgctgccaaaccagtcctcatagaaatttttctcatatggaacgaaaatagccaaccattaattgtagtagactcggaccatcattgacaataatacatattttgtatttcaaagatacttgtccacttttgacattctgaaaggaacctcctaaatttatatcgaaattaccaaatctgccattttgaaaataccctaaagtgaaccccctaaatcttccatctaaattactcacctatatcattgtgaaagatgatttgaactattcgctaaattttcatctaagttgccccaattttaatgttattaaaataaccaaaagtaagctaataattctacatctcaatatatatcccaaagtcctcctacatatgcttctaggttacccacttctacattgttgatatagaactaactcaaggtaaacatgcatgatacatacgaccattgcatcatgcggaccacatcatatcaatttccatgtcaaacacagctcaaactaaggtacggaggtgctacgcaaaggggaaagcacgtatggggatggaaaagcatatagaatagatggtacaagtccagaattgaataaagataaaagtatctatgaatatttcgtcataatatgaacgatagagagcagagatacgctattctgaatagcactaggaacaaattttatccacaaacttctaacaattatgtccttttaaaattattagcccgtgtagaagcaacacattgcttgatgggctagttatgataatcacccactcaaccaaaagctgaaggtatcacactgaagcgatcagattgcctcagtcaacactgtcaattcaagtccagttcaattggttcaccattaagcactactatactcaacaatgacatgtagtttaggcatgaaccaatggcacccaatactccaatatgcctacaagcacctcaaaacttaaaaggttctacaagctaattcacatatttacaggagatataaaagttaaatcttcagaagaaatttcgagcagcaagcatccacaagccctaacttacatctgataacatcaaattaacaccacatttcaagtaacaggcagctgtactacttttgtttcttaaacaataaatgtgaaaagtgaccacttcacaagtatagatttgtgaagaagctaaacattaaaattaatggccaactactgtatgttgcttatgatgggtacagtacaaacattacctgactgtagaatttctcaggatttccctcacggagattatgaatgtcaagggcaacttttgcatcacaaccgatacctgtcaccatagtaagctaaggttattcgacaaggagcgccgataaacgaagtttctgtgtacctaccgagatagttgttcatgtactttactagaagcacattctttgatttcttatcttctactgtcaccttccatctatcaaggatagtgactgctgcatgctctatgtcatgtaaaattgtgcaaaggccaccttgcttctcaacagcacctaggccacctccccatgataaaactctcgaaagatcattgccagtgccagctggaagaattgcaatgggtggaggtgattcataattttgcttatctatcgcgtcaagaacccaaccaacagtaccatcaccaccacacacaagtattctgaaatgtggtacctttctgaacaaaaataatcctgtttctggcccttgtgaagaacttaattcaaaaacctagatgaatgatatgaaacattagaaacacagaaatcataaatatctgaagcatttactaaggtgggtgctaaaatacatatgaaaacagaacattttttcccgaaaggccagcaagagttttactgaattatattagaaggatataagacaaaaggattgcaggcaaaccccctttgacagtatctacatgactgtaccccatggccttacaagccaggttggaccaaaaacacatcactagggaaagagccctacccgcagaaagaccacagccccatactccacggccttacaaggcaggttggaccaaaaacacatcactagtgaaagacccctacccgcagaaagaccacaaccccatactccacgcccttacaaggcaggttggaccaaaaacacgtcaactagtgaaccactacccgcagaaagatgatggcctggaggcccaacccagaaccaaaaacagaacactagccttcaaattccaagcacgttgacagcttctgttcagctgtgtgcctacgttttagtaggatggaaaacaagtctcctacacatgatccaacagcagaagatgtaggcaaacggtgttgcttcttcaaagggttcaagtttttacacactgtagatgcagtaaattatactaactgaattacctaacatccaaaaaaaaatctaggcttaccactccctctttaccatgcggttactacttactactgattagcacagagaagatggattttatttttaagtgaagccatcactagaaacatgacagaaggttgattatgatgatttcctcacataatatgaactgatccagcaccaagtggatgattttaagtaattgcatgcacccaactagtgatgcaatgagcatattctacaaaattgaatatattggtagcataccatgttgcctagctgagaagtgactcgacttaaagtaaagttttgtgtgagaagtatcatgacctgcaccggattcaaaagaaaatgtagcttgtgcttgagaagatctccgcgctgagccccacttttcttgttgataaaaattagaaggggtctggaatcagcaggcaattcagacaatgcgtacttaagtttaacttcaccggtctcatcattaccgagccttctggactccgatatgagttctctaccatcactctcactgctatcatgctcattctcaggactcctttgagcactgtcgccaattgtttttaattctccagccctctggtttgagttcaacgtggtatcacttgatgaatcatcgttgctgtcagatgaaaatctgttctgatgcttctcctttttagttcggtttaaacgcccccgcacagtggttgcaaactcatttgctccatgagttatagaactcaagatgctaccaggtttgctaatggcccggacaaaaagtggcgacagaataaggcgcttgaagggaccaaggtcgcaaatttcaccggtttcagtagccatggcagactggcaatcagcatgcaccaatcgttggcaccacatgcagcagtatatgggaggacctcccagaaaagactcactgcataactcctcacagtaactacagtactggccttcttcggattggtcagctatgtctgtccagagtacagtccattgatggaccacatgtttgaacccaaacattgagatgcatttgcagtctttctgagaatttgaagagcatattatgtgcgcagctgcaccgcaaacattgcagcggtgaaccatattttctgatgtcatcatctgcccaaggggctgagcaggtgagatagattccaagcatacacagcacatcattccttttgcacgaatcaatgattctgtgttccaaacatgttcagcagtaggaacctcatggtttctttcaaaattcttcctcttcgatctggcaattattttcatccagcttaaactgatctttcgccgccacactgaaaagaaatgaaaaaatgtccaaagaccgactaggccaacagtgaaccaagcagcaagtggtatccagaactctgatggagtaggggctctactgtaccagtggaacttgtgcatttccagctggtcttgcaaccagaccattatcacaatggatgggccaaacaatattttattcttgaatcgtggacatggaccataagaaactatagcctttcaaccatggcaatcttgatcagaacattagggacaaggtcaatcacatggaagcatgtgaatgtctcctgcaat

SEQ ID NO: 30148 - DNA, 185 bp, Zea Mays
accccctttttctcccccttggctggacgccccctccccctatggcagccatcctccattgcttcctcccccaagatctccccctacgcagcaaggatggagaaaaggaggggcacgttgaattgaagaggaagagaggatcaaagagatgttctttcccatctcctcttgaagatttcttgggg

SEQ ID NO: 30149 - DNA, 2705 bp, Zea Mays
atctcctggtgcttctctcaagccaccgacgctcaggctctctacatcctttagcaggcgccaactccctggagctcgccttcctgctggccgcccccagcaccgacgccccttctttttccccatctccttccttggcgcgctcgcccaggtcacgcgtgtccctgctcgcccaggccgcgacctcgccaaaccgcgcagtccctgctctccttccccagccgcgctcagcccagcccttcctccttcgcccttgtcgagctccctcagctcgcccccaaccacaactgcacgccaacctcgccctaggccatggagcagcaacaaccatggaaccctttcgtgtcgcgccctcgatgtgctcgacgaaagttggttcgatgaacgggttggctaatcgcgatgtgtggaggagacaaatttctaggatctgagggtaagagaagccaagacctagagcgatgatcactaggtgttcggtgaaaaggatgaaccggtgatcgtggttggtcttgcaaaatccgagttctattttatgttggtgttgtgcggtgtgatctccaattccatgttgctgatgtcttgctccatcatgaccttagggaaggatgttttcctctaaattatcgtaataattatgctgggtttatgtgttgttttagcatacattgtgaaagcatttcttgctcagcaggacaaggaggggctttcatgaaataacttttgaccacttatgttccttttccaaatataaatcagttagaagtgggtcttggcaataattagctcatgactatttgttgttggccctttggctgcaatttctgaatagtttgatgtgaagggaccttgctgagctttgtgtacttgatatttgaatagtttggagaaaggattaaaatctaccctcactaattttttagatgccccttaaaactgattttgaggagttattttctagggagctcttggagatgctcttattcctattggtacggagtaatatgtatattgtgcaattaaaatggcctttatatggtattgaacatttcccacaataatctgtaatctttccatgaattgttttcctatatgtggtattattaattggcagtgctcctagacactgcacatccatttcctgtgaaattactaaaagattgccgggaagtggcaatgggactgttactgatgaaattttatgagaattattgatttcgaagtaacttctttctggacttttttgccagccaacattgttttccatagaaaatggtttttgaatattcatggcaaaattttatggtttacaaaattccttcatttcatctacagaaaatcgggcaggctctactacctttacctggcgatgctaaaagccaaccagcactagcaacagcgactcaatttgctgccacaaacatctgcaccagcagaggccgctaccgcagaagccaccacggaatcagatcctgcaacgtccactcctctttcaccttatacaaattacccagattgtggtgcccgacgaggtggggcgtcgtttgagagggccgatgaggcgtcggagaagaagcagtcgaacccgatgcgggagatgaaggtccagaagctcgtgctcaacatcttcgttggcgagagcggtgatcgcctcacccgcgccgccaaggtactggagcagctgagcggccagtcaccggtattctccaaggcaaggtacactgtgagatcgcatgctatgtgacggtgcggggtgagaaggcaatgcagctgctggagagtggcttgaaggtgaaggagaacgagctgctgaggaggaacttcagtgacactggttgctttggatttggtatccaagagcacattgatcttggcatcaatgacacgaccttgacagtcaagatgctctttcagctaggcagagcatgttctatttacagcaggccagcagacaccaggcagtaaggtgatgtatgaatcaattatcaggtgacaaaatggttatgtttaatcatgcatgttttcttcctgactctctatgtttctttgaggcattcaactacttgtagtatcagtgcatcactgatgtatatatgtgttgatgttcatcatccaagatcaaatacatcctgctaggtcattacttgctaatgtgcatctgagtttgctgttgccaggatggaaatgttttttggcagctttctcagtgaatcagtatcaccgcagaacctttttggacacccagatgtcgagagatgcccatttctgaggaatatcaatggagctacaaccttttccctctcttctgctttgccagtagctgctcaaggaggcaagggtccaatttttgaggaagggtcaggctttgagtcagcattcaagcttttccatggccgagatggaatagttcccctttcagaaagatcatatgtatctgatgaaaaccacaatgagagcattgacgtcaagttatatacttagttaggctcaatttagagtacacttatgtagagtacacttatttatattgaaccgtcggagttcctacatatgtatcaagttatatacttagttaggctcaatgttagcatcaacagttgatgagcaactttaaatttagagtacacttatgaatgagttatttgacaatgcttatttatgagatattgaatgttatttatctatattatattaattatagtgtt

SEQ ID NO: 30150 - DNA, 1315 bp, Zea Mays
ttggtgagagggtttagggttttgatcctccagcagatccaggaatatggcggggaaaaccaagggtgggaagaacaaaggaaaggcgcagggcgctggtcagtccgcctctgctgagccagaggtgccggcgactgacggagccgaagtggtgaatccagagaatggggaagtaaacgaaccccccgtcacggaggatggtgtgaaaaatgttgagaaaggagacggggatgccctggaggttgtgcagcctgcaagaaagccagctgaaggagagcttcatctatacgctgttcctgtcaggacacaatcaggtgaaaagcttgagctgcagctaagcccaggagattctgttattgatgttaaacaattccttttggatgctcctgaaacatgcttctatacatgctacaatttgatattgcatactgaagatgggtcagctcatcagttggaagactacaatgaaatatctgaaatagcagatataacttctagtggatgttcactggagatggttgctgcaatatacgatgagaggtctattaggtcacatctccgacgtgtgagggagctactatctctgtctagtctttatgtttccctatcaacatccttagctctgcatcaggagtctgctcaaggaaaatctgcaggtcctgaaaaaggccctattcaggagcttgatggtttaaatttcatggaggatagtgctggcgctctcactaatttattggcttctgcaccagcagagataaaatgtgttggaagcattgttttttcgtctttcaatcctccgcctagttatcggagtagcaaaggaagtatatttgactcgaaacctacaaaacaaggactggaggccagcactctcataggcctactacagaagatcagtaccaaatttaagaaaggttttcgtgaactcttggatcgcagggcatcggctcatccatttgagaatgttcagtctttgcttccagtgacttcttggttaggagcttttcctgtgccagagcatagaagggatgaagccagggctgaggactcggttgtgttgtcgtatggcaccgaattaattggcatgcagagagactggaatgaagaattgcagtcctgccaggagtttcctcatggcaatcctcaagaaaggatattgcgtggcagagcacgctataaagtaacatgtgattttgtggatgctgcagtaaaaggtgcagttggtgtcattaatagatgcatacccccaataaatccaactgacccagaatgttttcatatagtaaacaatgtcaacaggttctatgttgcatga

SEQ ID NO: 30151 - DNA, 2478 bp, Zea Mays
atggtcatcctatcaccaaagaaaggcaaccaaaacaataatttcgcaatcaaggccatcctttcaccaaagacaggcaaccaaacagtaacaattttgccaccaagcaattgccggttgcattacttaacactggcttgggctgacctcgtcagagatcgtctacttcgtgaagcaacgggagatttgacgcatctccgtccccaagcccacctcgctccttgcatgcatatgcagcagcagtcacaggtgaaaaaaaagagagcatgtgagccgagagagaaacaggaaaggagcaggaaaaaaaaagagagagagaagaagccgcaggggctggcctgacggtacggacagccgcctgcctccagcagtatccagccgcgaaagaattgagaagatccagaccgagctcgacgaggggaggcgcgacaaagaagtatcgccgccacggaaagatggaggatctgaagaagttttatccttctttctggaagcaatctagcagttcacgaagtagcctgcactcgatccgtgagcataagctgatggatttgggttcgaggcgcaatcaaacccaagaagtttccaccaatttcaataaacgcaaaccgttctccgaatctgtggaactgacttcagatgttaggacttcagtttggagaaaatccgatgcttatcacggagtgattgacttggagaagccatcgatttctggtgatgcgattgaagctattggttgttctggctttggcaaccctgccaaccaaaatggcaagtctcaggatggttcatgctgtatttcaccagagaacacctcacttgcagagtcgcttcagtcgtgtagagactggaacatatcgcgtgtaagcgttggttcagttggatctagtgacactccggattgccagtcccctatcaaaacaagtaacaatgaagcaagacattcactgtttgacctgaatgttcctcaagaagaaagtctttttatgtcttctactctggttccttcttcttcaacgtattgtggaattttttcagacaaccgtagagaaacttctgagaaagagcatatcgctggtatcagatcaatgaaaggatcttccatcactgtggtcacccccaactcagttgcagacagttcaagggatgtggtaactgaatcgccagttcaaccgaagtttctttttgaccttaatgtgtcacttgaaaacaccgacatgccatcagaaatctgtgattatagagataaggatgtaaataatgatgtaagtaaaggaacagcaccccgtcgttctttctccaataaagatagtctgcatgcagaaacttccacaaaacatgcggttcttggacatgatcatatgttggcgcacgaggatgatagtaaggtgcttctcacatccccaacagctaatggtatcaataaggttcagttgacacagtctggaaccattaacaaggagtttttgatccctggatctcctcttgttgatacaagtttccctccaagacttgagatatccgacaatggagcatcgaatattcaagagttaagcatgcttcaagacaaggtcgatggtgatggcacaacagctgatactgcagctagaacccttctttccattttccagcatagttctgaacgcattgctcattgctttggaagcagcaaccagacagcagctcagaacgtgaacgatgagcctcagccttcattggactcgttcgagcaaaccgtgttgaacttagaggagatccaagatgacggtcaatcgatcaatgtggcaccaccctatatcgaaggaccagcatgtcggatcaagctaaagagagggaggggtatgagaaattttcagagggagatcattcctggcctccttctagggaggcaagagatatgcgaggacttggaagttataggctatgcgccaaagaaagctcggtccaggaaaccccgcaagggtccaggcgcatcctcagctcaaccgaggccgtgcaaacgtggagctgtcaagcgctgaccaggagcatctgcattccgtggcagggtgccataaggcaggcgattcagaacaggagagtccattctaaaccatgtgaatattcgtgtgtatcaagcctagcttcaaactctggtttgctggtgaccatttagttggggatattctttcctttcccctcttgttatatctttcctggagtgatcaggttgttagattcaagattttttttttttgcctttatatttgaaagtctagcggcgaagacagtcatagtgccacaatgatcagtctcgaaattccaggcttagatcagagtcgacgaagaaggcaagatggttgttcctgatgataacctagcactttctatcttgggttataccttggattaatgcgaaaacagtatacttgcttagattaaatttatctgggcctgttgactgctgcatctcaacaacaagccctcacttcaatccag

SEQ ID NO: 30152 - DNA, 6266 bp, Zea Mays
atgttttcttttcgggacaaggtacctatcgtgcggcgccgggttaagctctgtctttaccggcagtaacagtagcccacgaagccatttttgcccttttgtcggctagaagaacagacgatctcaatctccgaacaattattaatcgtgttcccatccctgcttgctgctgctgggggtgttcggattcgtcagataaagagacccacggcactggtcaccggcggcgatggattccggcgcggacaccgccggcgaggcgttcgacgaaatgctccaagagaagagaccaagacttgacgccgagcgcgacgagtcgccgtggggggcctccacccggacgccctgggcgtcgtgctccgcttcctcccgtgcctcgccgaccgcgccagggtgcggtccgcgtgccgcagctggcgcgccgcctcccgcggccgcggcgtggccccgccgctgcccctgctggtgatgcccaggttcaggttcgccagcatgacccccgggggcgtgctgacggcgacggcgcggcgcgcttggatgccgcaggaggtggatgccgactgcgtgggatcttccgacgcgtggctcgtgggcgccaggcaggccggcggcgagtgcttcttggtgaacgccttctcccacgaggtgcaccacctgccacgcctgggcgattccgatctcagccattccgcctgctcgcttcgcaaagtggtgctgtctggttcacctcagtcgggacccgagtgcatcgtggccgctttcgcgttctgcaggtccaagcctgaactggcgctctggagacccgggatgaagtcatggtgtgtttggcagcactctttgattgccgggcacatcgacatggccttttatcaggggaggctgtacatgctctggaggttcacgccgtccctcttcgtctttgaaatcgcggaggatgggcatggggtcaagttctctcgcatgaaggattgcctgctcgagaagctcctcgctacccctcttgggtccagtcatgtattgagctgcaacatggtggagtggcacggaaggctgctgttaatcatccgatactatggcggttaccaagtcagacacagagttctgaaggtccaagtgttcgcgatcgacctgaacacgaagccaaatagcctcactgagatccacagcttcggtggcgactgcgtctttgttggttcaggcggctgcaagtcctttcctgctggtcagtaccgtggagttgaaggtgaccttatctactttgttcctgaccattacaaccctcacgacgcgttcgtgtacaacatgatggatggcaagacaaggttcatcgccgagccattgccttgcagcatttctgcaccagagcagagctccggtttcccggtgtggttgtttccgcccgagtgatctccgtcagtcacaaatctgatctgaccagctggtggatgctgcagtttgctgtcaaagataatgtgtgttgtcatgcattctgtatcgcaacccaatttgtatgagaaagttgcatctcgttcccagtttcctgcctgtatggtgagggattgcgcacttgcagaagaactgagatcagatgcctggttcaacaacttcaaccaagggacgcatctaccacgagacgtatggttgccaaatgaatataaatgacatggagattgtgctttctatcatgaaaaatgaaggctatgatgaaattgtccctgatcctgagagtgcagagataatatttatcaacacctgtgccatccgggacaatgcagagcagaaagtctggcagcgtctcaactacttttggtttttgaaaagggaatggaaagctaatgttgctgaaggtagagcaaaatctatgcgtcctccaaagattgctgtcctggggtgcatggcagaacgactgaaggagaaaatactcgattctgataagatggttgatgttgtttgtggacctgatgcatatagggatttgcctaggttgcttcaggaagtcgattacggccacaagggcatgaacacacttctatcactcgaggaaacttatgctgatatcaccccagtaaggatctctgacaattcaattacggcatttgtgtcaatcatgagaggttgcaataatatgtgctcattctgcatagttcccttcactagaggtagggaaaggtctcgcccagtgtcttctattgtccgtgaggttggtgagctatggaaagttggtgtgaaggaggtaatgcttcttggtcagaatgtaaacagctataatgacacttctgaagtagaagagttggagcctggcaaaaattggcaactcagtgaaggattttccagcatgtgcaaggtgaagaatatggggctgcgttttgctgatctcctggatcgattatctttggaataccctgagatgcggttcaggtttacctcaccacacccaaaggatttcccagatgagctactgtatttgatgcgggataggtataacatctgcaatcttattcacttaccagcacaaacaggcagtacagcggcgctggaacgaatgcggaggggttacactcgagaagcatacttagaacttgtccacaaaattcgtgatgtcattcctgatgttgggctaagcagtgatttcataactggcttttgtggagagacagaagacgagcacgccgagacccttagccttgtgagggctgttggatacgacatggcctacatgtttgcatacagcatgagagagaagacccacgctcaccggaactacgaggacgatgtacccgaaggtgtgaaacagaggcggctcatggaactgatcaacactttccgcgagaccacgaagaagaactacgactctcaagtcggcacagtgcagctcgttctcgtggaggggcccaacaagcgtgctcccaaaacggaagtgatagggaagactgatcggggccacaaggtgtcgtttgcccgcgtccctgtcccgcacacgttcgaaggcgaagaagcacgtgagccggcagtcggtgacttcgtcgagccaaatttctgtgcggtgttggtcctcccggaacaaattctgtgcagtgtcgcgaaaagcagcatacgcgcaaattcaaaaccacagattcacagcactacgctgcaaatcaaaacaaaactgaacgactcgagggagccctcgactgtcgaccatctccagccgtctatccgcggtcggacggtccaaacacgcatcaaatcaaacggacgaaaatatccccaatcccctaaaccccgttcgttgcccaccaacgccaccctctgtcatccaccaccatccatggccatggcgtcctccccggcctgccacttccgccacccgccccgcctccgcctcctcctcccgctgtccacctcggccccccacccgtggctctactcctggtcgcacccgcgccagcgcggccgactccgcgcgccgcccgccgcgctcgacctccgtccggagccgtccccgtcgtccgactccgacgatgaggacgccgtcggtgccagccgctcctccggccgctccaccatgtccctcatcctcagccgcctccgccgcgccggctactccggcgaggacccgcgtgccgccgccccaccgcacccgccgcgggggtcggtcgaggacgtcttccgcgccgacgatggcgtgctccccaacgcgcgcggcgggttcgacgccgacgacgaggagcgggcgctcggggacgcccgcttcccgtgggagcgccccatgccgccgcccgaggccgcgccgcggtccgcgcggtcgcccacgtggatggcggagctgacgctccccgccgcggagctcaggcggctgcggcacgccgccatcaggatcaagtccaggaccaaggtgggcggggccggggtcacgcgcgagatcgtggagaagattaaggagaaatggaagacggaggaggtggtcagggtcaaggtctctggcacgccggcgctcaatatgcgcctcttccacgagatactcgagagaaaaacaggaggattagtaatatggagatcagggacttctgtttctctgtaccggggagtagattatgatgaaccagaacccactaagaaatcaaagaagaattcacagtctcttgctatggatttcccaattaaggggtcttctaatccttccttactaccaactgagacagcgaacagtgtacgagacagcaatgtagctttagtttctaatgctgcgaaagaggaactagttgtacaagcaccagaaatcaagtatgaagatgaaattgacaaactgttggatgaacttggcccaagatacactgactggcctggatctgacccgttaccagtagatgcagatttacttcctgcaaacatgccaggttacaagccccctttcagagttctgccatatggtgttcggccatctcttagccgaagggacactaccaatttacgccgtcttgctcggggactgcctcctcactttgctctcggacgaagcagacaactccaaggcttagctaatgctatggtaaagttgtgggagaaaagttctattgctaaaattgctttgaagagaggagtacagcttaccaccagtgagaggatggctgaagatattaaaaaattaacaggtggtgtgatgctttcaaggaacaatgaatttatagtcttctacagagggaaggatttcttgtcctcagaacttgcagaggtgctactagagagggaaagattagcaaagtcacttcaagatgaagaagaagcacggcgaaaggcagcgtcttatttttcaagtgctgagacatatgcacagcccactgtagctggtactctaggagagactctggaggctaactctaaatatggaactaaacatgatgagaatcatgcagacaaaatggcaagaactattgaagctgcaagacatgctgacctcgtaagaaagctagagtggaagctttcacttgcacagaaaaagatggagaaagccgaaagggtactaggaaaggttgagacagccctgaggccaaccgaagattccagacctcctgaaacaataacagatgaagagagattcatgttccggaagcttggtctaaggatgaaggcatttctgctccttggaagaagaggagtttttgacggcacaattgagaacatgcacttgcactggaagtacagggagctggtgaagatactagtgaaagcgaagtcttttgcagacgtgaagaggatagcactgtcgctggaagccgagagcgggggaatcctagtttcagtcgacaaagtctccaaaggctatgccattgttgtgttccgagggaagaactacagacgcccttcctcgctcagacctagaaatctcctgtcaaagcggaaggctttggccagatccatcgagctccagagacatcaggccctgagtcgtcatttcgcaaagctaaacaggaaggtggagcggcttaaggcagaactggtccagatggaagacgtgaaggagcaaggagacgaggagctgtacgccaaactggatgccgcctattcgagcgacgacgaagacatggaggatgaggacgacgaggcctacctcaagcgctttgacaatgaggtcgccggtgctaccgccgacgacgatggcagcgacgactacacctccgccgccgacgaggccgattaccccgactcagacgacgaagctggtgattgctccgaagacgaaggcgaggacgacgaagatgaggcggctgccggagtctctgacgctggcttccacggcgaagtagtaggtttcagttccgacaccgacagacgaaaccacgacgtaaatgagtactagaacagtgctggttgtttgatgcatcggcgtcagcgcttcacgtggggttcgtcaggcttcgctggctggaatgcgcgtggtgtaggtggaaggccctacgctgcttggcggtgccggtgctgctgggggcgcatgaacgatgaatcctgcggctgacgccctcgtttccggcctcgggcccaatgcatcgagccaggaaggtgtccgctcctcaccgcgagagcaggcagttcgactttgcgcgtaccgtacgcaaccttccgtgttcctttgcatggtgactggtgaggtaatgccaaaacatcacagagcggtgagcactgcactttgtacgaaacgcgcaggacaatccactgtccatacccataagacataaaatacgtactccttctgtccacataaattagttattttaggtttgttctaa

SEQ ID NO: 30153 - DNA, 1395 bp, Zea Mays
gtcttctggtatgaaaacccatcttggagaccagattctgaatcatgggaacaaatgcttattctggttcgagaagcggtatgaatgtgaggagaggattagattctgtttcatcagacaataggatggcaagaaatgaacggagtaatgatcaagcgggtcctcggagaggttgggacaaagggcagggaccctttaggttcggtgagggtccttctgcccgaagtgcatggcgagcatcaaaagatgaagcaacactggaggctattagagtggctggtgaagataatggaaattcgagggccgctgcaagagttgctattcctgaactggatggagaagctttgaatgatggcaaccaaggggacgaaagaggcccactttgggaggcctggactcgtgcgatggatgctgttcatcttgatgatatggactctgcttatgctgaggttctttcaactggtgatgctgaattacttgtaaagttgatggaacaaacgggaccgattattgatcaactttcaaatgaggttgcaaatgaagtcctacatgcagtgggacagtttctcgtggaagaaagcttctatgatgtagcattaaactggcttcagcagaatcctggcttttcatttggtctagaatgatggtccatcagttttactggattgctcaaggttgaagggggaaactgtagtgaagtatgtgataaatattgatactttctttgtcgaacacatgggttcttatttggtgaaacttgtttttacgttctcctttgtttgcccaatgataattatggtttccacctggagctggacagcagttgactgacctggtaatggaaaacggctctggttatctcggaatacctctggatgcaaagcgggacctcttactgggacttcatgaggctaccgtgattgagctttctgatgattgggagggagcaacacccgtacagataatgaagcagctagcttcatcctggcgcatcgacctgcagcaacttatcaattagggttacattgattgtcgatatatgggttaatttgaatatttgaattgttcgtttccctctggttcttgtctggtctttagctattagtattaggaatattatattgggtggggtggaagtggcactgtgttgaaatggattggttgtattggaaaatatggtattgatgttgtctcaccttcattgaggctagggagcaacgaagaaaaattctaggttgggttttagatctccatcctcgtcctggtcctggtgacggaaaaagtttcctgcggggatcccataaactcttgcccgtatttctttcccatttccgctccacgcggggataaatatctgtcgggatcctggtctccgcttaaattataatcgtgaca

SEQ ID NO: 30154 - DNA, 934 bp, Zea Mays
ccgctgttgctttccgctggtcatccatcccaccaaacgcccagcatttttcttttcttcatccaaaaaaaaccccaacccgagactcgggcagattcacgggggacgaccacgaaggggcgcgcgcacggcagcctggctataaaagatgaagatcacggtgcgggggtcggagatggtgtacccggcggcggagacgccgcgccgccggctctggaactcggggcccgacctggtggtgccgcggttccacacgcccagcgtctacttcttccgccgcgaggacgcggacgggaacgacctggcgggcgcggacgggagcttcttcgacggggcgcggatgcggcgcgcgctggccgaggcgctcgtgcccttctacccgatggccggccggctggcgcgcgacgaggacggccgcgtcgagatcgactgcaacgcgggcggggtgctgttccaggaggcggacgcgcccgacgccaccatcgactacttcggcgacttcgcgcccaccatggagctcaagcgcctcatccccaccgtcgacttcacggacgacatctcctccttcccgctgctcgtgctccaggtgaggaaaatcgatccatccccacctaacatcttcgggcttcagttctctgcatttcactagagttttgacgatttgatcggggtcggggaagggttgaaacaaagtggtgggcttcggttatctgagtcgccgccagcgcacaacgtctgggtcaacgtaggtagactcgtcacaattgttgggtgcatgtgcggcgtgtgtatagtatacatgggctggcgccgacgcggatcgatgcgcgtggagacaacctgtcaggcctgcatccgttgttcagctgactagccgaggtgtggaggacgatctccagatcttcttacatttatgaatgaaagatgtggccaa

SEQ ID NO: 30155 - DNA, 2355 bp, Zea Mays
ggccgctggtgcagctgcagcaacacagaacgatattttgaagatacggaaagtgtacgattcatttcttacggaattccctctttgctttgggtactggaagaaatatgctgatcatgaagcgagacttgatggtgtcaataaagttattgaggtgtatgagcgagcagttcttgcagttacttattcagtggacatttggtataactattgtcaattcgcaatttcaacatatgatgacccagatatcgtccgaagactgtttgaacgtggcttggcatacgttggaactgattatcgctccaatattttgtgggatgagtatattaagtatgaagagtcactggaggcatggagtcacctcgctgttatatatacaagagtattggaacatcccatccagcagcttgatcgctattttaattgcctcaaggaattggcttcaaagcacagtttttcagaaatacttactgcggaagaagcctcggtgtatgttgtcacgtctgagaccagtgctcaagcgcctgatggtgacacacatcctgatgatatcgataaggctggtcaaccagaactttcatctttggcagatgcagaaaaccttgcaaagtatgtctccatgagggaagagatgtacaagaaggctaaagagtacgaatctgagatcattggttttgagctagctattagaaggccatattttcatgtcaagcctcttgacaatccagagcttgaaaattggcatagctaccttgactttatcgagaaggaagaagacattaataaggttatcaaattgtatgaaaggtgtgtgattgcatgtgctagttattcagaattctggatccgctatgtgcaatgtatggaggataaagggagtctagacctagcaaacaatgccctggctcgtgctactcatgtgtttgtcaagaagcagccggagatccatctatttagtgctcgctttaaggagcttaatggggatatttctggagcacgtgcagaatatcagcatctttactcagatttatgtcctggctttctagaggccatcgtgaagcattctaatatggaacaccgactgggagataaagaattatcttgttcagtttatgaaaaggccatcgctgctgagaagggaaaggaacagagccagctcttgccgacgttgcttattcagtactcccgtttcttatttttggccatccgagatttggagaaggcaagagaaatattaactgtgctgcatgagcagttaaatgtaacaaaaacagtgcttgaggctgtcattcatctagagtcaatttttccatgcgaaaagcgtattgattttttagactcacttgtggagaagtttgttacacctgaatcatctcagggagaggtggcaagtctagttgacaaagaggaaatatcttccatatttttagagtttttggatctctttggggatgcaaagtcaatcaagaaggctttaactcggcatacaactcttttttcatgtaagagaagcattctgccatcaaagaaacggaaagcagatgacactgttgtctcagacagggacaaatttgctaaaactgtggttactcagtcagccacgggaactgatccaaatgcttccaatcctcctgtttggcctgcaacttctgaagcatctgggcaacaatggggagcttcttatgcacagcaggctgcatatcctgcatatggaacttacgactacagccatcaaatgccccagcctgctcctcaagcagctgcctatggtgcttatcctccaacatactctgcacaggcctatacacaacaaagctacccacagcctgcagtaattccagcagcaccagtaccagcacctacagcgccgtcagcttatcctcaacaacctgcggcagctcaaccttattatggcacaacctactactgataagtagagtagtcgtggatggtgatccgatgagcctgttaatctaccttttcgcatgtgtggttgctctgtactgccattgtttagctcgcctttagacgaatgctagcgacgagatgatcacttgagaacaaatctgagattcgtacaatcagcatttttgtcgctaggagttgccattgttttcatgcaatagcataatctactttagacgagatagcgttgttaaccatgaatatgaacataatcgacataattcagtgttcatgcctcctttcgtactgtatttttaccccaccagtggtgatggcgggattcctgtcaagcacgctcactggtggagccctccgaacaaattgtcagctaatggctcacgatctgcgactacgcagttgactaatttatactgtgtcaatgctcaacag

SEQ ID NO: 30156 - DNA, 1610 bp, Zea Mays
gacacgaggagaacttcatttctattacttttataacaaaaatatattattgttcgtcgaaactaaagttttgcagtcagaagcatgaagcaaactgtcagacgacctcgtagaccgaccccctgattcagagagccagcacacaggaaagcccaccaacagaacaattaaccagaggtccagagctactacccaaaagccctgttttcataatgatataaatccatatttgtcccagcgaaggcacacagccgccgccatttcttcatcctcccatctcctgatctccatctccatcttcttcgcagcgccggcgatccatcttccgctgcctcccttcctcgcgctcgggctctcagtgacggcatcagcggtttcccctcccgcctctcgccagtcgcatcacgcccccgcctccggtccaccgcacaccggccggtgaccctacatggccgtttcttttgcaaatgtcaacgccgaggcagggctgaaaaagcttgatgagtaccttctcactcgcagctacatcactggctaccaagcttccaaggatgacctggctgtctactcttcatttttggctgatccctcatccaagtatatcaatgtagcaaggtggtttaatcacattgatgcactcctgaggctgagtggagttaccgcagagggcctaggtgttaaggttgagccatcagcggttccttcagcttcaattcttgatgttgctgatggacaggccccagctgctgacgaggatgacgatgatgatgttgacctttttggcgaggagactgaagaggagaagaaggctgctgaagaacgtgctgcggctgccaaggcttctggcaagaagaaagaatctgggaaatcgtcagttttacttgatgtgaagccatgggacgatgagactgacatggccaagctcgaggaagctgttaggagtgtccagatggaaggactgctttggggcgcatccaagcttgtcccagttggatatggcatcaagaagctgcaaatcatgatgaccattgtcgatgaccttgtctctgttgacactctcatcgaggaccatctctgcgctgagccagtgagcgaatacgtccagagctgcgacattgtcgccttcaacaagatctaaatttccttgtgatggtggcaatggtggttggtgggcactgtaccagcctaatttataattttccatgagcatcttcaagagtttttctaaattatcatttggagtcatttacataaaaagcactttctatatctttttaatctcaacaacttttctatatcttgtttgcaccctggagagctatttacgttttctatctttagctagcgagaaacctggatggctggaatagaagataactatatttagacaatactttaaataagctgttggaagatagtaattcttgtgtgatcggatgcataatgccttggtctggctggttggaggtgtatcactctggagcatgttcggttctgtttatttcagctttttttagcttatgcctatcaaaatctgccacagaatgtcaaacgttgagctttttcaggtaggtactataaaaatagatttagtaaagagcatctaaaat

SEQ ID NO: 30157 - DNA, 249 bp, Zea Mays
tagcactcctcaggtcctatgttcgactcctcgtgggagcgaatttcaggctgtggttaaaaaaatcccctcgtctgtcccactccaaagcacaggtctaaggcttagccccggtcgtggtcgttctcacatgtacttcgatgccgctgtgtatgggtggggcaggggttcgggggttttcttgacctgtgtgagaaggtcttcttcttaacacaatgctcgggggctgtcttacccccgcaggtcaag

SEQ ID NO: 30158 - DNA, 204 bp, Zea Mays
ttaggccataaaaccaaacccaaactaatagaaagtccctgaggaatcaaatacaatggttcggtgtcgtttcaacgatcatatagccctaggaaattaccatatcaatgttttcatgtccactgcatatctggtcagtgggcaacaactccatcccatcctcttggtatatctattgtggacaaaagagatacaagaattaaa

SEQ ID NO: 30159 - DNA, 2385 bp, Zea Mays
cctctgtcctcccccactcgctcccgttctcccctgcctcgccgcctctctccctgtcgtacccacctgccccctcgcggtctctctctccttcctgattggatcaatctggcctcgcggctccgactgatccgtggcgcctcgctcccgagcggaaccaccacctgatttgacgagactagcagatactgtcatggctcaggatgaagctgtggctacccaaaagactggaaatacaacatctccttctaaggattacccaactccttctccatatcctgattggtcaaccatgcaggcatattatggccctggtgtcttgccaccaacatattttactcctgcaatagctccaggtcatccaccgccatatatgtggggtcctcagcctataatgccaccccctttcgggacaccatatgctgcagtatacccacatggtggagcttacccacacccccttgtgcccatggtaatgatgcctatggacattttttgtttaattaagcacactatatatgtccaaacttggctgatcaagtgaccaagccattcaatgtaggaaatggaaagtaaaacttgattatagttggacaacatttctactcttttggtctgtagttcaccattgatgcacagcatgtagaatgttgtccataacctgtaattttgtagcctcatcagaacaaaggatctgcactgtgcatctagctctattttatattagctgcccgaggcttgccctaccagcagaagatgctgcgcacttattaatcatccattgccgctactccattcggatctgggacaagatatatgcctggcttgcggctgttttggagcctcgtggggtatgtgaaaattttatatcggtgacagagtggtggaatgaggttgtacactcaaaactcaaaagggtgtcctagaaaggcattttgttcgatcccaattctgtaacctgggaaatctcgaaggagcgaaatgcaagaatttcaatcggagacactctttggcaatctatcttgtgacaaagataaaggagcaggccacgacttggggcagtgcaggtgcaagacaccttaaggagatcctacagagcacttagctttttgctgtaaattcttatgtcaactccaatgagcgtggagccagccaaatctacaaatagcaaggagaaaaattccaataagaaacttaaggaaatagatcggactgcagtgtctgctggcagtggtaacagtaaaagaacagtgtcatccattgaagattacagtgcagaaggctcaagcgatgtaaacgatcagaatgtgaacgaaacgtccaggaagcggagctcagatggtggacctggcgcagaaaccaccacaggtggaaacacggaatgtgttttagctcctaaccatacgctggggaatgctaccattttgccacaacactgcttttcagctccagtaattaagcccagtgctacaaatgtcgcgaactcgagggcgataggcacagcattatctccaccacctggtgtgatggttccagttcataatgcagtaccatctgacttatcagttaaggatgagagggaattgaagcgcgaaaagaggaagcagtcaaatagggagtctgctagacgatcaaggctgagaaaacaggctgagacagaggagttggctacacaagtggagtctcttgcagcagagaacacgtcccttagatctgaaatcggccagctaacagagagctcagagaagctcagactagagaattcagctctaatggtgaagctgaaggacaccgcagaaccgtctccgattaaagcatccgcatccccgtcctctccccgtgcctccgcggagaacttcctttccatgatcgacagcgccaacgcgccgagcgtcagcaggcacacggagcacggcggtcccaggctccggcagctcctggactccagtccggcgacagacgtcgccgccgtaagctgatgatgaagccggtccggcaaatacgccacagcacatgcatgtgtcctggggattccgcaggctcatgctgctcgagtgctcgtcagcgttacggactcggactctgtactccagtttaggcactgattccagtgaagtaaccgagggtaccggtaattttatctgctctcgcgccagagtgccgggctgccttgcctgcgaccactcctgtcctgtgtacccagagttgtaacgtagtagggtgttgtgctgcatgccgaccttttgaaactttcgagaccgtcatttggaccatttttttcgtcgcagtaacacaatacagatcggagtttgtacaggacggatgctgcctggtgtgcgcaattctctactgcaaaataccgacaaaaattctgtttgttttttg

SEQ ID NO: 30160 - DNA, 2041 bp, Zea Mays
cacgaactcacgactccagatctcccaccgctcgccatggacctcctcgacgcgaggcaccgccacacgccggattcgagctcctccccacatgccgcctccgacatgggtctcccgctcgccggggctgcctaccagccctacgtctctgagctcctctccttctccatcgagcgcctccacaaggagccggagcttctgagggtcgacgcggagcgagtgcgacggcagatgcaggaggtggcggtggagaactacggcgccttcatcgccgcctccgaggcgctctccttcgtccgcgcgcagctcgagagcttcgatggccacctcgaggccatggtgtatacggaatgggaactatgatgaagcacttgatctagaagcttttgtgagcaaaatatcgaagttgcacccagatttacctgttgtccaaggattagctgctgaagtaaagaagacagtacaatcattaatttcccagcttctccagaaactccgatcaaatattcagttacctgagtgcctccgtattgtagcacatctgcgtcgaattggagttttcagtgagtcagaattgcgcttacagttcctgaggtgcagggaagcttggctttctggaattcttgaagatctggaccaaaggaatgtttatgattacctcaaaggcatggtgacttgccacagggtacatctattcgatgttgttaatcaatatcgagcaatattcaacaatgataaatctggaaatgatgagaactccgaaggtgggctgcttttcagctgggcaatgcaacaagttagtaatcacctcgctactcttcaagttatgttaccaagcataacagaaggtgggtctctgtccaacattcttgaacaatgcatgtattgtgcaatgggccttggcttagttggattggatttccgtggcctccttccgccaatctttgaggagtaattggtgtttaaattattgaattttatcactgactctaaaggggctttgttattgatgctgttatctgcattttgcagcgcggttctaaatttattctcaaagaatatgagtatggcggttgaaaattttcaggttgttttggattcgcaccgctgggttccgatgccatctgttggctttgtagcaaatggtgttgtcgatgacacttctgatgatgtgactccaccttctgttttaatggagcatccacctcttgcagtgtttgttaacggtgtttcagcagcaatgaatgagctaagaccgtgcacaccattgagcttgaaagtcatccttgctcaggaggtggtcaagggactacatgcagtctctgactccctagtaagatacaaagctatgcggatgcttcgtggaaatgagtccgctcttttcctgtcactctgccaggcatttatcgaggttgtacatccttattgtgccgcatgttttggtcgatgctacccgaatggggcaacattgatctcagagtgtcaaggcacactggacgctgtccgtcagctattgaccatacctgcaagatctaacagttccagtatcgaaagaaagcagtcaggagccattgaaagaaagcaatctgttgagagccctgggacagcagtcacgaataacgagctgtcagccgatggacctgggctagagatcaacgatgctgctacaaccaccaccccaccggtagaggacgacgtgagtacccatccaccagcaagtaagtagcttggacctccgtttgaatttgttaaagctctttatcaaggcctggtttagtcaaccagagaagaaattgctgcaaacattatattcatcgataataattcatagttttgctccagttctacagtgtacacaatacctcactggatatttgtatcttattttttttatcactcattaaatttttagctgttcattgttatagtcaatacctagatgttgtagagtgtgtccaacctgaacattcagtaatatgatgagtacaaacggtgttcatcgtgttgactgcacacttctgaaataaaagatctgattcat

SEQ ID NO: 30161 - DNA, 4341 bp, Zea Mays
ccgacactccaccatcctccatggccgttaagcccacatccatcatcgccgcctccgccacagcacgccatggagaccagcaagtcgccaccgctctactcggcgccgcgggagccctctgccacgacagtgatgctgtgtccgtgcctggcgttcttcctcctcgctctcatcatcacctccatcgcactcactgtccactttcgcctctactgccacactcctcttgcccacctcatctccccgcaccgctgcccccaccacatctgacctccgtctccgcccgcatcgctggcgtggtcctgcttcccagaggcgtgttccctctgctgccgccgagatcccgatacgttatgggttcccctctcctcgcgacgccggcatgcggggcttacgacgtgctctggggcttcgcagccggaaggttcctctccatcttggctgcctccgacgaagatcagggctcgtcggagcaggaggcggctgcgagcaacccggagggcgtggaccgcgtctgcgcggccatcgcggacgtcgtcgcctccggtgccgacgcgaacctggaggcggcgctatccgcgctctcgccaccgctctgcgaagcggtcgtgctcgctgtgctccaccgcttcaagcacgcacataggccgtcctaccgcttcttcaggtgggccacagtgtccggtggctttacccacaccaccattacctactgcaagatgttacacatcttaggcaagacgaggcagttcgagtcgatggttgcgatgatccaagagatggggaaggcgggggccctgtccatggacgccttcaaggttgccattaagtccttcgctgcggctggtgagatcaagaatgcggttggcgtgttcgagttgatgagaaagaacggtttcgatgatggggtggaatcattcaattgcttgctcgttgctttagccaaagagggattaggtagggaggccaggcaggtgtttgacaaaatgcatggccagtactctccagacctgcgctcttatactgcactgatgctggcatggtgcaatgcgaggaatctggttgaggcggggcgggtttggaatgagatgctggagaagggaatggatccagatgttgttgtccacaacacaatgattgaggggttgctgcgtgggcagaggcgacccgaggccgtgaagatgtttgagctgatgaaggcaaaggggcctccaccaaatgtgtggacttacacaatgttaatccgtgaccattgtaagcaggggaagatggacatggcaatggagtgctttgaggagatgcaggaggctaaatgccaaccagatgttgctacctatacatgtttgctggttggatatgggaatgcaaaacaaatggacagagtgactgctgtgttggaggagatgacacagaagggatgcccccctgatgctcggacttacaatgcactgattaagttgctaacaaataggaatatgccagacgatgctgcaaggatatacaagaagatgatcaagaagggacttgagcccacaatccatacttacaacatgatgatgaagtcatatttcgttggtgatagcaactatgcaatgggttgtgcagtgtgggaggagatgcaccagaggggtatttgccctgatgtgaactcttacacagtgttcattaatgggcatatacgacatggcaggccagaggaggcatataaatatatcgaggagatgattaataaagggatgaaagctccacaaatagactataataagtttgctgcagatttctcaaaggctgggaaaccagatatattgtttgagttggctcagaaagtgaaatttgctgggaaattagatgtatctaatgtgttctatcagtgggcagatagaatgaagagtcgggtgaagagaaatgtaccttcagattggtaatagaatgttctaagattactatgctgccagcaggaatgtggcatgctgtgatggtgcttgaaatttgattactaaggagaactgctacctttttcagtttgccattgtacggtcaactttaatataattgtgacctgacattcaaaaaaaagtgcaagatgcaaggcctaccatgtgcttatttacggttgatgtcttttaacaatcttcaaggcaaacctgtgacatgcaaaatctttcttattatcactcgttttgacttttgtgattgatgcatttatcacatcgtgttaaacatagcttgttattcacatgttgatatgtgtagctccttccttcttgtttacgtttgtttgtttctttgattaaacaagttatctgagctatttctttgtatcttttttgatgccatgacatagaaaacactacattatcaaatattcaaatgcgtagatttggtaaaagtttgactatgatattgatgatctttcgtggtctgagtggtggagtttttgcagctattcacaggctggaaagttcatgcactgccctccttgtggatacactttctgttaacaaaatgctatacagtttctttctacttaccttgtgattttgatggagctctgttcctgtggttctttgacatttgttggtctcttgagcattagttctgcaatatgcattatgctcctctattgaactctatagcccatattgtggagatcactaacatcacatgcaaatcttttggtctaccatgtgctgggtgtttccagcatggcactctgctggtatgaggctaacaaatatctactattgagtttgttagctcccgtgactctgggcactgcttcaccattttgtgactttggtatggttattatgtttggtgaactcaattttctatgttccaatccctgctcttagttaattcttatatctgcagtctgcaaatcttgttttctattgcttcgctcataattaatctgtttggatcactagattagtaggataaaactgaaagaaatgagaatgacatgactctgggcctgaattttgcacaagatccgactgttcatttggttcgaatctttgcgtctgaactgcatctgctggtcattgagttctttacttcttttagtactcccgtggtccttcgacagactgcacttgtgtatttcacgtgaataaatacataagcatgtgaaacctgacctggattaatgtattatcctaatttatgtcaaaaaatatctgacatcctggacgcatgatttttctaacacacagaaactgtgtgtccagagtacaagcgagatagcagtaaattgtttcttccctgtataattgactgacatcattttattatttgaggttgtcatcttgcttagtttctccacttgccactggaatggagatgaagcacggtgctctattagttatgtttttcttttcttcgttccttgaggttatattaggattttccctctaaattattgacttgctagattaaaatcatctccttgataccaccaatatcatctgtgaaaaattgataaatatgaatgtgttaacttgactccattttatcttctccttatttgagcctatattcttctttttctactgagaaaaaccaaaagcaaataagtgtaactttacattcttattgaagatatgcgataatgttctgtttgaacattccctgcagcacctacatagcaagggatattttttttcatgcaacccagaatctgaacgccattgcgaaaagcagggataaaatgctgctgtttcactgcaccaactaaacagagaaagaaaaggagatgagaaaactcagcatgttttgattcgactacagtctgcgcccccaagaaaccagggaacaggagtcaggactaacctccagcagctgcaaccggtactgcctctgcccactttggacgacgccaatcattcgcatgacaaggtagagcggcagcaggataccagcagcacgaaccgtcgccactgcaaccagatgccatgcgagcgtcacaatggtgaactgcacaagtcagaatccaggggacagcatggatcaggactcgtcctaaaggatggctatttttcaattcgctgcatgacttagaaccactacataccgtgatcgccagcgaccggcaccatgtggcgcattgatctgcggcgtaggagcacctggtgtaatctgcaccgtcaaccaagccctccggaggttccaaatgttgcatgtcctcgtgttcactgcacgatcacttgagaaaatttagatggttgccaatttgactggaacccagttacaagcctacttgaaagctttttttattttagattttctttccgaactttatgaaacttttgcaggttaacggttttttttttgaaagaa

SEQ ID NO: 30162 - DNA, 2593 bp, Zea Mays
atatatgccttcgttcctcgatcgtcagccgccgccagttcctttgccggttcgcgcaccacgcaacgcaagtgctcttcccttcttctctctcggttctcgccttctcggccctcctcctctattcttccctctcgtccacggccacaggctagccggccttgagcgcctgtgacggcgcaggttctggggttgcaacacgcccctccgcccttccggcgcatctgctgaattccactctcctcttgcccgccggcgtcgcctcttttctttgctatcgtcggcctcggaccccaaagacgacaacagcaggagggcagcgcacctgtgaaagcggcgcctctcttgccgttaaatttccgcgtcgcctggcttctcttccgcactctgctttcaagcccctctgccatgaccgtgcccaccaaagacgacagccaaagcggcacggtggccgacacagtgccattaccgacataccgttcgttagcagcgccggtgaggaagcctgtcgacaagttcgcgctcctcccggccttcctcaaggttagagggcttgtgaaggagcacatcgactcatttaactactttgtcaacaaaggaatcaagaagatcgttgaggcaaacaaccgaattgaagcgcgcaacgatccatccatttaccttaggtaccttggtgtgcatgttggcatgccctcggtacatgtagagtataacattgaaaatatcacaccacatttttgccgccttactgaccgcacttactctgctcccataaaagttcatatcgaatacactgtcggaaagcagcatgaagtgagaagaaagaataactttatcattggctacatgcctattatgctaagaagccatgcctgtattctgtatgaaaaggatgaagctgaactagcaaaatatggtgagtgccctcttgatcctggcggctactttgttgtcaaaggaacagagaaggtcattctaattcaagaacagctagcaaagaatcgtattattgttgacactgatagcaaaggaagggtgatcgcatctgttaccagtagcacgcatgcaataaaaagcaagacggtgatttttatggataaggggaagatttatttacagctgaatcagttcaacaagccaattcctattatagtggtgatgaaagcgatgggaatggaaagtgatcaggagactgtacaaatggttggcagggacccaagatacggagatctcttatttccatctattcaggaatgtgcttcagagagaatatatacacgccagcgagccctgcagtacatggatgagaaggtgacgtatcctggtgccacaaatcagaaggaaggtcggtcatactcaatcctccgtgatgtgtttattgcccatgtgccggttaaaaatgggaacctacgaccaaagtgtatatacactgccttaatgttaaggcgcatgatggacgcaatcgtaaattctgacacctttgatgataaggattatgttggaaacaagagatttgagttgtctggccaactaatatcccttctttttgaggacctattcaaaacaatgaattcccaagctgttgagcgcatgaataaaaatagtgacaagactcactctagtcctttggattttagccagttgataatgcaagattccattacctttggtctggaaagggctatttccacaggaaattgggatattaaacgttttaggatgcataggaaaggtgtatctcaggttctttcgaggctatcctacatggcatctttaggctatatgacgcggataacaccccaatttgagaagactcgtaaaacaagtggtccacgtgctttgcagcctagtcagtggggtatgctctgcccatgtgatactcctgaaggagaagcttgtggattgacaaaaaatttagctttgctttctcatgtcacaacagaccaagaggaaggcccactgatatatctgtgttatagtctaggcgtggaggatttattgtctctctcatctgaagaaattcatacgccgggttcatttctggtcatgttcaatggattaatactggggaaacacaaagatcctcagaggcttgttattgatttgaggaatttacgtcgatctaatgtaattggagagtttgtaagcatttttattaatgagaaacagcattgcgttcacattgcctctgatggtggccgtgtttgtcgcccacttataattgctgatatggggatatcaaggatcgatgagactcacatggaaaaactgaggcatggaacttgtggttttgatgatttcctgcgtgatgggttgattgaatatcttgatgttaatgaagaaaacaatgcactgattgcattgtatgagcacatggatcaagatgatgttgaaagaagcagcatcacacacattgaaatagagccattgagtatcttaggggttgtatctggacttattccatatccacaccataaccaatctccacgtaatacttaccagtgtgcaatgggtaagcaagcgatgggaaatattgcatataatcaggcagcagatccgacaacaacacaacaagttcttagcagtggtagag

SEQ ID NO: 30163 - DNA, 2846 bp, Zea Mays
gctgttcccgtcgaccggattcggttcggaccgcagctccccacagcccacactcgtccgtccgcccgtcgaatggcggctcccaaaccctaagccacagatcccttcccctgcctcagcttcgaacgccctcgcctcgccgccggtctttgtgtactgccgctgtgtccgtcggcgcggatcaagggtccgctccgctgcaccccgcggggagaaaggggcgggcctcggcgtcctccgctcgtcgcccgagtgtctgagtactatcaggtgcaagtccagccgaactgattgcatgacatatgaaatagcgagcgtcgaatgaccttctctatggatatggatttgaacgcatcaccggtgcctgacgatgatgagcagcagccttacaatgaaccagtggaggctgagtatgctcaggaggaacatgttgaatctgctgtcgcaacattgcgccgggaacgtgaagaaagacgcaagagactaaagagagagcagcaggatgatgggtcaaggctacattcccagcagattagggttgattatgctcctcaacccaaaaggcatagtcgcatcaaagaggcacctcagggctggttggactgtcctgcatttggggagccaatagataaaatcataccatctaaagttcctctcgatgaaacattcaatgagtcagtgcctcctgggaagcgatactcctcaaagcaactagttaacaaacaaagaaaagctggtcgtgaaataggtctggtgattgatttgacaaataccaccaggtattattcaccagctgaatggacgaagcaaggtactaagtatgcgaagattgcatgcaaggggagagatgcggtacctgacaatgaatctgttaataagtttgtctatgaggcaatgatattccttgatcgacaaaaacattcaaagaatcctaaatatattctggttcactgtacccatggtcataatcgtaccggtttcatgattattcattaccttatgcgcacacacgtatcttgtgttgctgaggcgataaatatgtttgctcaaaggcggccacctggcatatacaagagggactatattgaagcactatattcattttaccatgaggtccctgagaatatgatgatagcatgccctccaacaccagaatggaagagaccagatgatctcgatttaaatggcgaagctaagcaggatgatgacgacgacaatggtgatccagaaccaccgcgtaatgaatcagaggataaaatcatcaccaacgacgatgtgttaggggacgaagtgccatatgaccagcaagaagctttgcgtgtgctatgttataagttgcttgaaatgccccttataaggggacattcacaatttcctggatcacatccagtttctcttaacagtgaaaatctgcaactacttagacagcgatactactatgctacatggaaagctgacggaacacgatatatgatgcttataatgagagatggttgtttcttgattgatcgaaatttttgctttagaagggttcagatgcgctttccccataagagccttgaaacacggtaccagattcaggcttgaagagaaggtacttggcatatgatcttatggcacttggtgcagtgtccaaaactaagttgccgttttctgaaaggtggaaaatgctggaagatgaaataatacgaccacgttattatgagaaaaataaatttgagagtggttctaagagcaatccgttgtacaaatatgacatggaattattttcggttagaagaaaagatttttggctgctctcaacagtaaaaaaggttcttaaggtgttcattccatccctttgccatgatgctgatggccttatatttcagggctgggacgatccatatgtaactcgtactcatgaaggtctcctgaagtggaaataccctgagatgaattctgtggactttctgttcgagcttacgaatgataatcgtcaactggttttcctttatgagagaggaaaaaagaaactcatggatggtgcccggatagcatttactgacgatgtagatccatcctctatcgccgggaggattgttgaatgctcctggaataaggaagaacagtgttggtcctgtatgcgtattagatctgataaatctactccaaacgacatcaacacataccggaaggtgatgaggagtatcacagataacattaccgaggaaaagcttctcgaagagattgatgagataagtcttctcccgatgtatgctgataggatgcagcaggctcatacaaagatggcacaacaacagcggcggagattgccaccacagtgctagccagtgctggggcgctctcctaccgccctagccagctgctggcttccgtagctgtgtaattagtagaggtttcagtagccccatatgatgatggctggctgggtctggcctgccaactaattctttgcacctcatttgtgtcttctccctgccctcccacccacctgtataggcgtcgccgcagagtagtttccctgtaaattgtgtactctatgttctcccatattctcccctatggttttatttttcatgggtgtagaatagcgtttaacaagagggtggtgttctaggtacattagtgtacgcgttactatctctcggtgttgcggttgccttgtgctagaataaatatggttaccatctgttgctgatgggtcatgtggttcccccggcggatatcatgtggttgcgtggtatgggttattttcgtcttctgttttgttcgcacctgatccgatccgatcttttgttcaatgaagaagaaaaaaattattggtaaaacctacgtgtttatgg

SEQ ID NO: 30164 - DNA, 1034 bp, Zea Mays
ggcctgatcagggcccggcgtgcttcatgtaagctccggcccgatcgatgagaggagtcagacggaggcaaggccggggtcggcagcagaggggagcagagagatctcattctccgatccgcccaggccaccatggcggaggatgctacgagcagccacccgtcacgctacgtcaagctcaccaaggaccaggacgcccccgccgaggacatccgccccggcgagctcaaccagccagttcacgtcccgcagctcgaaggccggaggtgtagcgagtgcggtcaggtcctgcccgagagctacgagccgcccgccgacgagccctggaccaccgggatcttcggatgcaccgatgacccagagacctgccgaactggattgttttgcccctgcgtgctgtttgggcgcaacgttgaggctgttagggaggacatcccttggacaactccttgcgtgtgccatgctgtattcgttgaaggagggatcacgctggcgattctgacggcgatatttcacggtgttgatccgaggacgtcattcctgattggagaaggtctggtgttcagctggtggttatgtgctacctacactggcatcttccgccaggggcttcagaggaaatatcatctcaaggagcatcgcgagaggacgggacggcttgcagagaacaacgcagtgcccatgacggttgtgaacccgcctccggtgcaagagatgagcatgctggaggaggtggaggagaagggagcagagaagagtgaacacgatgatgtggaggtcattcctctatagataatagggtcggagtccgagtgaggatagcactagcagcatcagatgacgatcacaacttctggtcattcctctatagttagttagttattgatctttcaacaacaaaatgtggtggtgtggcaactgtccatttttattatcccaaataataatactgtactacgttacggcccacgcccaatttttctttcaatctttcgcggtcagaaggagaaagaagaacatatagggcctgtttg

SEQ ID NO: 30165 - DNA, 2411 bp, Zea Mays
tcagaatgacattttctctgaagagaaacatcctgtcattcttcgttagcagctctgcaactattttgaagccttttttttgcagatgatgcgaatcaactttgtatagttagtttcgttgatgtacgcctgtaccatgttgtagtaaatgataaagagaataggagtcctcggatcatctgctcgtttgaaccattcagtcatcagccatcgaaaatagctgtctgctatattttttttcgtcagcgacgatctgtcagggtcagggacttttcattgcaacgagtgggacgaacttgtccactgaaaatgatgaggcccgacccgaagggacgcatcaaatccgaatgagcctgtgaagtcaagcactcgaagccttatctgggaaacaaaatgctattcctgatctgacggaagcatccaccaatacagctagtttgggtacacacgctgaaccagctagttcgcctgggagaggtctctgtcttgtttacatgccatcgtctagaagttgtctcggaaaaattttaagcgaatgttgcaatgaacagagttccttttgttgctgtgatttgtcattggtcgaagaggactaactgcagcgtttgtctacctacaatacttgtttctttgttgttgctgtcttgtagtgccagcagcgatgcctccttgttcgtgctcggcaagtcggccggtgtgagcaaaatccgtacgtcatcgtctccagtggtgccattctccgtggctctgcacacggtcggggactcggcggccttgctggatcatttgtgccgccaaacgggtttacctgctccgcctccgcccagccagcgccgccgccgctgccgctagcgctcccctcaggtaaggaaggaggcaggcgaggatgtcgcaccgtaaattcgagcacccgaggcacggttcccttggcttcctccccaggaagcgatcctctcccgccaccgcggaaaggtgaagtccttcccgagggatgacccaaagaagccctgtcacctcaccgccttccttggctacaaggctggaatgacacacattgtggtgaggtcgagaagcctggctccaagctccacaagaaggaaacttgtgaggctgtgactatcattgagactcctccccttgtcattgtcggacttgtggaatgtgaagaccccccgtggcctacgaaccctcaactctgtctgggcccaacaccttagcgaagaagtgcggagaaggttctacaagaactggtgcaagagcaagaagaaggctttctccaagtatgccctcaaatacgacagcgacgcaggcaagaaagaaatccagttgcagcttgagaaaattagaaagatgaagggtttgaagcagaagaaggctcacctcatggagatccaggtcaacggtggcactatagcagacaaggtggactatggttacaagttctttgaggaggtccctgttgatgctgtgttccagaaggacgagatgatcgacatcatcggagttaccaagggcaagggttatgaaggcgtggtcactcgctggggtgttacccggcttccccgcaagacccacaggggcctccgcaaggttgcctgtatcggtgcatggcatcctgctagggtgtcgtacactgttgctcgtgctggtcagaacggataccatcaccgcactgagatgaacaagaaggtttacaagattggcaaggccggacaggaaagccatgacgcctcaactgagtttgacaggaccgagaaggacatcactcccatgggtggtttcccccactacggtatcatcaagggcgactacctgatgatcaagggttgctgcgtcggccccaagaaaagggtggtgactctccgccagtctctgctgaagcagacgtctcggttggccctggaggagatcaagctcaagttcatcgacacctcgtccaagtttggacatgggcgcttccagaccacagacgagaagcagaggttctttggcaagctcaaggcctgagttgctgatggtgtcaagcgaaatggaaatgtattaccagatagttttttgtttttcagattcagctttgttggagatatcataagaacatgtttgatttgctagtctgagttgattctattgcgggcggctgaagttatattacctaatgaactcgaaagtcagcttgctagttgcgtgactttacctgcgctagcacttgccaattttgatggaatctcaaatcttcccgcacgcaatatgctcttgctcaattcagccgtttttttactgtaatcgttgtcagcacatctgtctacagtgaattaacgctgtaattgttctgaatttttaaaacaattatcttattattccataaaaagtgcaaagtgcttcatgtatgctccctatcgcacctccttcct

SEQ ID NO: 30166 - DNA, 3860 bp, Zea Mays
atgaatgaaaaacgattcgtcgtcgctctctcccaaacgttggttcgaaccgggacgaaaccccagtcccctatgcgaccgcggcaaaggttcgaccgccgcatcaaacacgcaatcgccgccagctcggtctgcggccccgcaccggtgttctaccgtttggatgccaaggtgaacgccggccgccatggcctccatcgagccccgcaatcctacgccggcagaacaccggtgcggggccgcggccgccgctcaccaaccggcccgcgacttcctcgcccaccgcgacggcgtcgacaagctcctcaagatcttccgctacgccacgcccctcgcactcgccgctggggccccggcgcctccgcccgcctcaagtctttcgagtccagcgtcgtcctcagccgcaagggtttccgtctcggcaagttcgtgcagtccctccgcgcccacccgcaccttcccccggcgcttgcgctactcgcctacggcagtgagggcgtctactacttcgtcgagcagttcgtctggctcgccaaggccgggatcctgcctgcgcacctgctcgccaagttattgttgaagcctgaagggatgggcactggagaggggtcgccgccggcgaggcggggcatcagcggtaggcgccgtcgatggccggacgaggacgacgacgagtatgtgctggaggaggaagaagaagaggattatgtggaggagctctccgcctcgagcgccggcgaggagggggtggattcagacgccgagtaccaggaggcagaggaggaggacgagatcgagaagccgcgcccaaagcgaccagcgaagggcatcacatcgagcgccggcgagaggggattggattcagacgccgaataccaggaggcagaggaggacgacgagatcgagccgccgcgcctgaagcgaccggccaagggcagcacatcgagcgcgggtgaggaggggttggattcagacgccgaataccaggaggcagaggaggacgagatggagacgccgcgcccaaagcgaccggcgaaggacagcacatcgagcgccggcgaggatgggttggattcagacgccgaataccaggaggcagaggaggaggacgacgacgaaatcgagacgccgcgcccgaagcgacgggcaaagggcagcaacagagtacggaaaggaaaggtggatctggccgccgcacgatctcgacgccggaagtatgaggaggacgaggactacgaggaggaggttgacgaagacgacgaggtggaggaggagtaccatgatgaccttgaggaggtcgaggaggaggaagaagtggcaccacagcggccgaagagcattgtgaaatgcggtgcccgtggccggaatgtgaagctgtctctggcagcgaagcgatctcatcagcggaagcaggaggatgatgaggatatggattttgacccagagttggatgacgaggaggtcgagatagatgaggatattgattttgatcccgatgtcgatggtgacgaggaggatgagtatcaagacgaggaggaagaggaactggttcctgcccgtgccagaaaggtaactgtaaagaatccggtgaagcgaaagtccatttcaaagaggcgaacaccaaagaagaagaagaaaaataggggatctaaggtttctaggcggaagggggcttcagctaaagtgaagaaatcagcacctgttaggaggcggagaaagcgttcagtgatagatgattacgaggatgaggatgtggatgatgacgatgacgacgacttcattgtcgacgatgaggtcattgtgaatcggcaccccaagaagaaggccaggatagggagtgggagggagacagtggtggaccctcaagtatctattgaggaagagacatggccagaccttgagtcagactcatcggactttgagtttgcgacgtccgatgaagaacctaacaatgttgaaacacctgtagctgagcagactacagtcagaaaagggaggaagaagaggatatctgagtcagagtcatcctcagattctgaatttgttgtatcaggtaaggaattggaagaattgagggagcctgagcctccaaaggctgcaccaaatctgcatgtgtccttgagaaggatttgtattacaaggcatggagaaggcaagggaaaggagaaacaggaacaggaggaggctgggaagccaatatgcgggatctgtctctcggaggagctgagagctactgtacaaggtgtcctcaattgttgctcacactatttttgcttcgcatgcatcatggaatggtctagggttgagtcgagatgcccattgtgcaagcagcggttcactacaatcaccaagtcatcaaaggtagatcttggtcttggagtgagaaaagctgtagtcaaggtcgaagagcgtgatcaggtttatcagcccactgaagaagaaataaggcgttggctagacccatatgaaaatgttgtttgtatagagtgcaatcaaggtggcgatgataatctcatgctactatgtgacatttgtgattcctcagcacatacttattgtgttggcttgggtagagaagtgcccgaaggaaactggtactgtggaggatgtagactcggtgacgagggaccatcatatactggaattcagcgtacagtagcttatgaaagacaaaattacagaagtcatgtcggtagttctgtaagttttggcatggctgtaccaggcggtacatttgaaaggccgtcatcaatcaatcctcgccattcttttcaagggattgatctaaatctatctccaagagagtttcccggagaatcacatcctgctgaatcacaagtttcaactgatagcgtatcaactcccactggaagagctggaagaactatttcaggaaggcgtgaattacaacggtacattcagagtttgttcagaccaagtctacctagtagaccagacacgtaccacaatattgcgcagaacagtggtggtgtatcaagaaatgaaccgaaccgctggaacttcccttcttcatcagaagcaaacacatcacagaatctgcctgatggcattcagaaccatcacagtgaccttccatttgttcaagctcacagcaattttgctccatttatgtccccagatggggatgatttccagcaaattgagggtgtcaagagcaacctcaggaacatgcagtagagcccttacggcgttactagaagctcgattctaccctgtgaagcttaccaagggggcaacatgtgccgttttaatggcttgtggaactgaacataacaaaagcttgtgcctgttgcattctcccagaaattgatgtggttcggctcatttgcggagatgtgatgtggtcaacgatataagatacatgctctctttgtttaagtttaggcattttttgttgtcgtcattcttattcattcagtcattaagcacaacctcagattacacagcgaaggcatttctgaatgtcttgatagcttcaaatttatacattgtaatattgtggtaacaccaatttcattaggctgaccattcttttcctcgcgagatgctcttttgcctactaggaatgctgataactgagcttcccagcctcttctataatcatataccgcgcggtggcaaactagcctcgttcgggtactggctttctgttctattagcatactggtctagtggatcaaccgagaaaagctatcaacaatcttagtactaacaatctatggtctgaagactcgtcttctttaagtgttttgttgtatagcgcagctgctttttgtacagatgaatgtttgttccatattgcttaagtttgtatccagtatccccttcatatgcatgtg

SEQ ID NO: 30167 - DNA, 2116 bp, Zea Mays
ctcgcgacctgcattcgatacaaacaaggccggcgcatcggcattcctccttccttaaacccaccccggcatcgggcacgccgcacgccacgcctcaccgagtcaccttcccagccagctacccttccccctaccaattccaaatctctcacccggcttgaggatggcggcgcaggtggtcgcagcggcgggcaccccggtggccaggccgctgggcggtggatctggggccgacgcgctccggcccgcggcgaggatgccaagggagagaaggaccggtgctgtggccgcgagaggacgccgcgagtctcaggtggtatccgtcataagccgcgccccacgccccgatgccggggtgctgccggtgtcgcccgacgacgacgcggccgtaaaggaagaagcaaacttccagcaccttaaggctatccagcaacttgcaactgcagcaaatggcgtgtggtctaaaccaaatgtaaggcgcaagacaaagattgtgtgtacaatcggtccttcaaccaacacaagggacatgatatggaaactcgctgagactggcatgaatgtggctcggcttaatatgtcacatggagaccatgcatcacaccagaaagttattgatctggtaaaggagtacaatgcatcacatgctgacaatgtgattgctatcatgcttgacacaaagggaccagaagttcgaagtggagatttgcctcaaccgatatttctggaaagcggacaagaatttacttttacaatcaaaaggggagttgggactgatacgtgtgttagcgttaactatgacgactttgttaatgatgttgaagtgggcgacatgctccttgtagatggaggaatgatgtcattcttggtcaaatcaaaaactgaagattctgtgaaatgtgaagttattgacggtggtgaattgaaatctaggcgccatctgaatgttcgtggaaagagtgcaaccttgccatcaataactgacaaggactgggacgacattaagtttggtgtggataatcaagttgattactatgctgtttcctttgtgaaagatgctcaagttgtccacgaactcaaggattatctaaaaagttgcaatgctgacatacatgttatcgtaaaaatagaaagtgcagactccatccccaacttacattcaatcatcacagcatctgatggggctatggttgccaggggtgaccttggagccgagctgcccattgaggaggtgccgctgttgcaggaagaaattattagaatgtgcaggagcatggggaaggctgttattgttgctacaaatatgctcgaaagtatgattgttcatccaactccaacccgagcagaagtttcagacattgctatagctgtccgagagggtgctgatgcagttatgctttcaggagaaactgcacatgggaaatttcccttgaaagctgttaaggtcatgcacactgttgccctgagaaccgaggcaactattcctggtggggaaacacctgcagaccttggtcaggctttcaagggagagggttaggcaacgattggctttgtaccaaggtgtatgtccggttcaaatggaattttctgatgatgctgagaagacatttggcaatgctttgtcttatttgctgaaacatggtatggttaaggacggtgaggaggttgcgctcgttcaaagtggtaaacatcccatctggagatcacaatcaacacacaacattcaggtgaggaagatctgatgcggaacgcacatagtattctgattgttggaggacatcgtttcttctagcaaaccgcaaggtcttgttacaatgataccacactggtagtaagtactggtattggtgagatagttggtgctgagctagtgttgtgattctttttcttacttgtgcactagtgctgttttccttccgtgtaaaaaggccaatccaattgccgcttggttttagctgtagctttgggaactgtaggcttgttgtaatacagttcgttctgtcaatgttaaggacttttgcctcgagagctaggcataactcgaagctcaccaaacagcaatctacctgcaaattgcaacgcattttgcgtctttacttccacgcttttggaacca

SEQ ID NO: 30168 - DNA, 793 bp, Zea Mays
ccgcgcgctccctggagcttctctcccagccgccgccaccgcctctatctctcccttccctcttctctctcccctcacatctctcctctctgtcccgaccgagcaacagcggccaagcactcaagtgttccgcgctcggcactttggcttcgggattcctgacctagcgcagccgccaccacagcgctgcccctgtcgcgatagctctgcgtcgccgctcaacggaggccgacgaggtgacgagaagcggaggccgagcagtcgcacttgcaggtccagtcctgctggtccgcagtccacagttcgccctctaccctctgctctgggatctgcagtaccgtctgcttcggcctcagcactgccatccgcttcagcctctgcactaccgtccaagtcaagtcgctgtatcaccttagcccatggacgctccccatgccttgacggcttgacctccgatggagaggaagcaagttcactgtatttgtagactacactacgccatgctttgccaatgaaccagccatcatgttctacaaaattggaggatgaactagccatgatactttgccaatgaaccagccgaagagatctcctctaccttggcagcacgatcaagaatgctgttgtcacggtccctgcctacttcaatgactcacagagacaggcaattaaaaaagagaattgatctttttatgggcgaagtgtcttgttagcatcaagtaagtggcgacatcacaacccctacaagcttgtgtcttaaaacaagaggatacaagaagttggagcgcttttc

SEQ ID NO: 30169 - DNA, 9215 bp, Zea Mays
cccccctgcccgtggcctccgccccaattccagcgggacagcctcgatgagccgccaggatcgtcaccagtggcctcgccctaaccacggatacgaccctcgcgccgccgccgccgccgcgcaatggtatggcgccgcttcgatgctgtttcccgaccccggcgcggcggcgctgcacgggataaacccctacggcttcgcccctaaccctttcttcaataacttcctcccccagaactccgctgccctagctgcctaccaactgcagcagcagcaggctcatcacttcgcctcccatgcctaccaccaagcccctaccggtaacaccatgcaccgctctaccaaacccgccgccgctgccaaacctgcgccgccaccgggcaaccagcaggccgtgctggaccgggctcaagaggcggcgaggaaggctcgggaggagctcgtgaagggtggggacggcgtcacggcgtggaaggtggcgcaggcggtgctggtggcgctcaaggctgattcgtgggactccctcggcgtccagccccaggatgtgcctctcctgcgggatctcttcctaatcgagggcaaggtgaacgcattcatccattgctatgttgcagcaagaaaaattgtaacggtttatgatctggaggttgagatatgcaagaatgagggggttgtgcaatttgaagagctgggattgggacctttccttcagcacccgcttgttgcacattattttttagtgccagctgatttgtctgtggtgcctaagctttgtagcgaggaaattatcaataccctgctgaaatttgtggacaaatctaagaaaaaaatcacaattgaagattttttgaaccatcttgcagagaaaaaatcagtctctgggaaggaaaaacttggtgtgcgggtacaaagcttggggttgcatatttccttactacgacaggccaagcaaacagaagtgtctgctgcgaagcttcgagcaaatatgagtggatctggtaatagtagtcaggagaaggatttgttgaaaaatgcaagtttccatactcacaagaaggctttggacaagaggttcatttctttaactaatcgtataaaagagttaccaggcatcaataagcatatccattttgattcgaccgatgatgaaactaatagttgtactggttctgaggatggtaaatctgatggcaatgagaatgagaatgaatgttctattcttgacaaaaaggatggtgataagcgtgtgaatagctgcccatatccgtcaaaaactgaagaactggaaaggcttggtttgaaatctgaaattaataaaaggcaatctttagagaatagcaagccaagagacagtgggaaaaaggggaaagtaagtgaaaaaagaaaatatgaagaaatcgggagtcctagctgttcgttcaagcagcctaagaagcagcaaaagttgcaaaaacatgaagcatcaccgaaatgtttcctaagtataggtaagctggaaaattttgtaacaacatggaaggaaacatgtcgtgaacatccagttcaacaggttttggaaatgttagcaaattactatgggagaacgatatcagggaagaggagaattagaaatttcttctcacagtacccaggcattggccttctcaatgttgctgttaaatcaatgggatgtggtctgctggatagcatttacgatgtgatacagcttgctgatgagaatgatgtagcttcaagccctcctcctaacaccaccactgaagttatggaaattgagcctccaagtgttgctattgatgatgtcatcaggaggatttcagaatatattgaatccaacagtaaaatctctggtgatgtggctttgcaagtgagggcacttaatgattgtgaaacatgggtaactactcaattttcagcaaatcaattcagtgctcttggccatgggacattccttgagtttttggacaaacattgtcaccagttccgaactgctttgagtagtttctttaaggagggtccttctaattcttcatctctggaagtttctgtactgcagcagcaaattgaatttttactctgtcaagctgagagtaattggctggaagatagtgacttttcagaggatagttttgttatgcttcttaaaaagcaatttccaacaataagctttaatattgtgcaagacaaatctgatggtggagtttctggctttattgaggggcagaagaaagacatacggacatatagtttaaaattttccatctctttgttggagaaacgatggtctggaactttgccaagtagacatgggaatgttgatgaactggggaacattgtcgctgaacaatcttgttaccataccacagtttgctcacgagaggcaattaattgtttactgagggctcctatgctgtctgatctgcatctttggtcccattgggattcgctatttgctcctacactgggctcctttgtacattggttgctgaatactggtccaattcaagagctcgcatgcattgcgaccacagatggtaggtttattagagtagattcatcagccacagttgaccagtttctggaagctattatccatcgatcaccacttcaagtggcagtgaaactgctttcacttctatacatttacaatggttctatgaacaccccaatgtcattgctaaaatgttatgcacagcgagcaataaagctcatagtagataacaacaatgatttgatgaatgctaaatctgaaaacaaaatatttatgcctgatgagccccaaaacctaagtagtgaaagctctacttgttttgctgatcagtgtcaagaaagctctcaggcgtctcctggaaggttgatcaggtctgatagcttgccaaacattaataacactgttcatttgatcacaaaatttgtacttgattgtcttgatcatctaccttcagaattccgtagtcttgcagcagacatactattggcaggatttcgggttgttactaagaactggcatgcagttatgttgcatgaagccactgaaaacgggcagctttgcatgcttcatgatattggtttgtcacttggagttgtagaatgggttgaagattgccataggttgtgtttaactgatgaagttcatgtgcagacagaaatgcattcttctgccaagcttgcaacacctgcctctgtgggagccacccatgaagattctaacatgcatatttctagtgatgttaatatgatggataagagaaaacaattgtttcctgtcataaatgatcgggctggtatagataaggaagacaataagatgttaaatcctgctggaactgaggcagatgttgcagaactacatactaccagcagatcttctatgatggaagaaacaagtcttgaggaagcatctcttgttattgagactatacgccgtgaagagtttggtctggatcaggcactaagtgacactgagaatagcttgttaaagaagcagcatgctcgacttggcagagcattgcattgcctttcacaagaattatattcccaggattctcatctacttcttgagctggtacagaatgctgacgacaatacatatcctgaggatgttgaagcaacattagcattcattctccaagaggatggtattgctgttctaaacaatgagaggggcttctctgctgagaacattagagcactctgtgatattggtaactcgacaaagaaaggatcaaaccagggttatattggaaataaaggcattggatttaaatcagttttccgggtaactgatgctccggagatccattcaaatggtttccatgtgaaatttgatatcacagatggccagattggttttgtgttgccaactgcagttccaccttacagtaccacttcttttagtagaatgttatccgttgaagatgacaaggatgcccattcattgtggaacacttgcattttacttcccttcagatcaaaatttagggagtgcactggtatgtgctccattgtgtctttgttttcagatctgcacccatctctactgctgttccttcatcgactaaaatgtatcaagtttaagaatttgtttgatgacacacttctgattatgagaagggagattcttggtgatggtattgtgagaatctcgcatgggattgagacaatgagttggttggtggtcagtaagaggctacaaggtaccattgtgcggcatgatgtgtgcaccacagagatagctgtggcgtttactttgcagcagactgaggaaggagattatgaaccttatttgaagcagcaacctgtgtttgcttttcttcctctaaggaattacggtcttaaattcattcttcaaggagattttgttttaccatcttccagagaggaagtggatgcggatagtgcatggaatcagtggttgttgtctgaattcccttctttgtttgtaagtgcccaagaatctttttgtgctcttccctgttttcagaggtgccctggaaaagctgtcacagccttcttgagttttattcctctagcaggagaggttcatggattcttcagccagcttccacacttgatcctttccaagttgcgtctgacccgctgcatgtttttggatggctctactgtgcaatgggtctatccatgcaacacacttaggggttgggatgaacaaactaaaatgttattttcagaaggcttacttcatgaacatcttggtcttggttacctctcaaaaaatattgttatatctgataagttatcaagagccctaggtattcatgactatggaccaaacattttgctagatgccatctcatctatttgccgaattgatggttgtattgagtcattgggcctggaatggctttgtgcttggtttgttaacctttatctgacattgctgtctcattcttctcaaaatgtttcctcagcaagaaacctcgaagacattcttttggataaagttaggaaaataccatgcatcccactttcagatggttcatttacctctatttcagatggtcgtatatggttgccatatgatgttgccagttccattcctgaatgcagtagcattccgaattttccagctctatatggtaatcttcgaactgtaagtccaaaccttctctctgcatgctgcaaaaataaatacctcatggaggaagtcagaataaatgatctggcagacatgctccaaaggatcggggtgcggaagttgtctgggcatgacattgttaaaaatcacatcatggtgtccttgcgtaacggtttagatgctaatgtggctgatatagtgattagagagtatgtgagctttattatggttcatcttcagtcttcttgcaccagctgtaactttgaaagaggagagatagtgtcagaactacggaagagtcctatcttccttacaaaccatggatacaagagcccagctgatgaaccaattcacttcagtaaagattatggaaattccgtggatgttactagactgcttcagaatgtagaaataagttggattgaacttgatagtagctatttgcagcatcatggttcacagtcgtcatcatttgcacgggaaaaatggaggcaattttttgaagaaatgggtgtgactgattttgtgcaggtagtgaaagttgaaaaaactttatcccaagttgattctattctagcaggaggactttctctagctgatgtatctacaaaacaatgtacagtgtatgactgggagtcaccagaattatctagaattttatcaatattttcttcaaaaagatgcaaggaaaattgtgtatatcttctggaagttcttgatagattctgggatgatcattatagtgcaaaatctaggatcttcacagatgctacacattgtggtgaaaacagagcagttgaatcatcatttatgaagtgcattcaaagcttcaaatggatagcatcaagaatggatgaggatcttcattatgcaacagatttattctatgattgtgaaaatgtccgctctctttttggtagtgtggctccatatgctgtaccgcaggtatctagcagttcacttaagaaggccattggattcaaaacagaggtatcttactgtgatgcattgatggtcctgaagtcttggataacgtcaaaggttccctttagagcaagtatgagccagatgtgcaaattctataccttcttgtctgaaggcgtggcagacgcaaagattgacattaaacgggagttcatgtcgtctccttctatatttacaccactacagcgtcctcgggcaagtgaggttattcctggaaggtttttggcgccagaagacctctattggcatgacccaacaggatgttctgaaataacagaggatttcgttgcaacgaaaaacagaagtatgttcccaagaaaaatgctgtctgcagcctatccaaacctttatgaattatttactctgacatgcggtgtaccaaaggccccaacaacatcaaattatgttgagatgctgctacggttgtcaaccattgcattgccttcacaggcaggaaaccatgtcttttgtgtatttgtgagatgggccaagtgtatgcattctgaaagtgacaagatgaatgatatattgtacttgaaagaatcccttcagaaattagaaacaacaatattgcccacctcagccgataaatgggtctctctacatccttcttttggccttgtttgctgggtagatgatgatgagctaaagcaacagtttgttaactctaatgatgtttacttcatacaatttggcgacctttcttctgaggataagcaaatgttgtatggaagagttgctgctttaatgaaaagcttaggcatccaagcactttcaaaggttgtgtatcgtgaagcaatattttatggtacatcagagaacagagaaaaggtttccttgatttgttggctgttgccatacatgcaacgttacatctataagatgcatagagatacttatatcaacttccagaaaaacgacatcatgaagattagcaacctgcaagtagtagttgttgacaagttattccacaagtatgtactgaggggactcgagagttcttctaagaaaagattccaatgtcattgtcttttgcagggagatactctatatgcaacacaagaggctgactcacattcagtatttttggagctttctagaattttctttgatggatcccatgatcttcattttgcaaattttctacacatgatcaaaaccatggccgaatctggcactcatgctgagcaaatagagacttttatcgttaataatcagaatgtgcctgagttacctgagcatgaagctatctggtccttctcttccttgtctgcagccaaacatggttcagcgaaccaaggtggtgctgatacccagggggttgatttccaacctgtccatgaatttagtattcccaatcatcagaaggcacaggtgatggtttctagttggcctctaaactattggagaacagcacccgtcttcagaacacctctcataaaccagcatgcaagcatgcaagaggcaaaggtgaatgatgctggaccttcatcaaacttaaacatgcctgctatgtatggacacaccgaagatagtttgctttctgctgatcttgaaagggattggattatagaagagaatccaagaactgaaactacattgtttggagatagttcatcggaaatccttgatgagcctcagatggtgatgtctgctgaacctttccatgcacctgcttatttgaacttggaggctggaaattcaagcccaacggttcatgtcgagctaacaaattccgatgagaaactggccaatcttgcagaagacaagaatcggcgactttcagatgcaagccagttaagaacaggttcaaacccaatggttgatgttgagctaacaaatttcgatgagaaactggccaatcttgcagaaggcaagaatcagcgactttcagatgcaagccagttaagaacaggttcaaacccaatggttgatgttgagctaacaaatttcgatgagaaactggccattcttgcagaagacaagaatcagcgactttcagatgcaaaccagttaagaacagggaggcttggtgaagaactggtcgagaaatatttggccaaacagctaggttccaacaatgttaggtgggtgaacaacagaattgaaaccggactgccttatgatattgttataacacacccagagggtttcacagagtatgtggaggttaaaacaactgtatcttcaagaaaagattggtttgacgtctcagcaagggaatggcagtttgccttggagaaaggggattcatttagcattgctcgtgtcatcttaggtacaaagaaagcaagtatagaaatgttgaaaaacccacacaagctttgtaagcagaaagcattgcggcttgctctcctgatatccagatcggcagcaacctagactaaaatgtcggttttgttgaggctagcaccgatcatccttctgcagattgttatgattactctgactaataatcaacatgaactggagtgagcatctgcatcttgataggtatttgctgatccaagttagcagattcttctttttggagagagatggggtaccgggtacggcatgagtgcaagacaacatacagttgagccgctctatagtaggctcctctttctattattctaactcgggtaatcttctccaatggcggctctctaccatgtctcttgttacatacaacttacgctctgcctttgtaacccattctggtattttgttgcataatgtatgtgattttgtcattagatttgtttttcaatttctgccctagacatcgtcccataggttgattgtgtaactaaacatgaaactgtacataaatggatggaatttgattttaccatgtacatgaaatttgattttgcgtgcggcggctgcctggtctgtgcgttctggtctctgtgcgcagggcgcggcatctgcccggcagcctgctcgccggctgctcggtgagaaaattggctagttgggtactggttttttttttcaattgataaaaaaacaggatctgatggagccttttcatttttgttttactttccgtctcttttatcagcagttgaaaggcgatcacttattctcaatttggtggaatctcctttatcagtaattgatagttgaaaggtggtgacttgttttcaat

SEQ ID NO: 30170 - DNA, 3627 bp, Zea Mays
gggaagagagagaatcgcaggaccaaaccctaaacccccgctcccgcctcctctcgctgctgcagcttgccgggagctcacgcggcctttgcttctcgcttctttcgctggccacctgatcccggttgttcttcgctgggctcccgagccgctgcactcgctgggtgctgccgcctgccaggaggagcggcacggccgtctacaggattaaaggttcttcttaaaatgaagcataacggtgcaatagataaaacaagggctgggtttactgccctttgcaaccggcttctttgctcaaatgattcaaggctgtgcaaaatgacagagtcatggatggtgctactaatggataggacaattgctaaagggcaaactgtggatgatttgataaggaggagtgcaggaattcctgctgcatttatcgccctgttcctggcagagccagaaggaacaccaaagaaactacttccaagggcattagaatggctgatagagtttgctaagaactctttagctaatttccagaaagactccaaccagaggtctggagtaatgaaagagctgttggaatcacagtcagaaactacaagtgtatattctaatggtaacctatctaaaggtcgagatgagggtgttgttcccactgtgcatgtgttcaatgtgcttaaagctgctttcaatgatgcaaatctggcaaccgacacttcgggtttcagtgctgaagcaacaatagttgctatacgagcattttcatctccctactgggaagtgcgcaatgcagcttgccttgcgtatactgcactagttcgtcgcatggttgggtttctgaatgtgcagaagcgtgaatcagcacgacgatctttaactggccttgaattcttccacaggcaacaattgagtatcttttacatgatacatggacaaattgaccagaatttttttagcatcgttgctgctttgaggtatccagcccttcatcctttcctttctagtgaactgcaaaccacaactgaacaactagctgatggagtgtccagcaatttggagtcacacattacaaaagcaatacaccctagcctgtgtccgattcttattcttttatcaagacttaagccttcacctataagctgtggaactgatgattctttggacccttttttgcttttgcctttcatccaaagatgtgctacccagagtaactaccgggtccgtatccttgcatcaagggcattaacttgtttggtatctaacgagagattgcagtacgttattagtgatatactggataatttacctcgtggaagtcacaaagcaatggctcacagtgttcagcatactgatcctgccatatcagctaatatgggaaaagcaaatgtacttctgctgtctaagtcattcaattcaatacatggccttttgctgcagctggcttctcttctggataacaactttagaggtttgacagacggtagcatgaaggatcagattattggcctattactggaggttctttcaagatgctcttggcttggctgcacgaaattatgctcatgccctatcgtaattacatcttacttgcgggtattggatctcatgcttgatgttgcaaggacagggaaaagcagacatactgaagtcattcaggcattgctgctagagttaacttcccagtgcttgagcaacacagcatcaacccagtacgcattccatgatccaacccgtattgaactaaaacaacaagcaactgaatcatttttgagctgtgttggtctttctaagaaaaccgatgaaactaacgatgatgatgtgcagttgcaaatactcggtgaaccaactttagagatgcctagagtggattactcccttcatgaagtacacaaggagatcctgtcatgtctcactgatccttcatatgatgttagaattacggtgctgaagaggattctttggctcacaaaatcaatcagacatggttatgcagataacattttgcaccagtgggcaggagttaatctgcagcctgctttaatggaacggttgtttgtggaagaacaccctaagtgcctttattataatctgaagatcatcttttcatggaacatggaattcccattcaacaatggagaagattctagcacacttttgtccttgtgggataggttagttcatttaaacagcaccatgtcacatgcaaaaacgagagaaatagttctatgttgcatgggtatgtgcatgaaattgttcactaaacaatctaggggtggtatttcaatggattgtcttaagaccagtgagatctctgcatcctttgtcagaatcaatgaaggggatggattatctgatgccatgcttagattaaacttgtttgtcacacttgtcaagaaccaaagtgaaccatcagaaagcatgaatgctcgacgggctgctgctgaggcaattgttgcttctggtcttcttgaagaagcaagctacgttgcttcatctgtgtccaacatgtactctccttcagaatttgatgaagaccataccaaagagaaatgcatggaagatagcgtttttgaatttgttagtctttatacatgcaagatacttgacttgtggtttgtatgtattcagttgctggaggatgaggatgcatatctgaggcaaaaacttgcgaaggatattcagaaaataatcgctaagggttcagctaataccttctgtgatgattccacaccactacaagttgatagagtcattgaattaagcttggactatttaacttctttgtttggcctctggctgaaatacgttgaattcttgttaaggatagtcttgggcactggaaacgctctgaactcccgtggcgatttggtccgtcagatatttgataaagaaattgataaccaccatgaggagaagctattgatatgtcaaatctgctgttcaaacattcagaaacttctgaattcaaaatgccagatggaagcaggagcagagactaaactgttcctgcagaattggagggagatatttctaaagcagctcacatcgctgactggtggctatattgagaaagaggggaagaacgattggattggcggcataggtaaccacaaggacgtgttcatatcagtgtatgcagtcctactcggtttatacgcgctcacgcagtctggctctctggatcaattggaggaccactgtgcagtttatttgcaggaatttgcaaaccttgaaaggtctatcacaccattcctcaagaacccgttgatttctaatctttacgctctggtaaaattgtcacacgagaggttcatatcatcagataagcctgaggaccaagtgggtgattcaggatcaagttttgacccatattttcttatcagatgattttcgctaatgtactagtaattcttcattgttattcctccgttgtaagactcaatactaattgcttttttatacaaattaccatactatagattctttacttgatgccccttctctgtgtatcagtgcattttaagtgccttgggttttctagcactcaaaaaatgtatgacaaggttgtgactaacgtccgaacaactgataatgatataaatatttttccgattaacataggactacatcaagattcag

SEQ ID NO: 30171 - DNA, 1784 bp, Zea Mays
cgccgccatccctcgtcttcatcatcttctttattctgccatacatgagcactttctttcattctagtatgaaggaatgcttcgatggtgccacaagaggtttacaacttagggattatatagaccttgtgtttttggtggctatgatgctcaactttgtaacctaccaatcaggaagccgaaacctggctgtccagggtggatcaatctccgcccgagggcatgtacaatgctcttcgccccaccatggctgttttgattacaaatgagctactggagcaccctgatcccaacgtgaaggttgctctcacctcttgcttaactgaagttaccaggattactgcgccagaggccccctatgacgatgatgttatgaaggatgtgtttaagagaattgtggagacttttgctgagttggatgacatgaacaacccctcctttgcaaggagggtttcaatccttgattctgttgcaagggttcgttgttgtgttctgatgttggatcttgacttggaccatatgatactggacatgttccgtcatttcttcaaaactgcctccaccaggcattcagaacaagtcacccactgtatggaaattataatgatgtttgtaattcaggagagcgatgatgtccatgctgaactggcatcgtgcctgcttcagaaccttacaagagaagcacaagaaactctcccagcatcttttggacttgcagagagggtactaggcctatgtagggacaagctcaaaccagtgcttcatgagttacttaagggaactcctttggatgaatacagcaacgttgttacgacgttgttccaagatgctggagaaaacaatgttgatgcatcaggagaagacatggcagccaaagggaaactttctgaaaagcctgtttctgacgagtcaccacaggaaacttcaaaggtagaccaaaatgtcaattgcctaggccaagaaggtagtagtccaaacagtactccgacaaccgccattagcaatggtgctgctccagttgacaatgtcaaatctccagatggaccagattcttcaaaacagaagcaagaactgacttctggtgacgagcagacaccagattcttctaaacagaagcaagaactgacttctggtgatgagcagacaccagattcttctaaacagaagccagaactgacttctcttgacaagcagaccaaaagttctgagcaattgatatcttgtgaccaagaagtacgagaaccagtgactgttgaaactgaaaagctatctgatgtcaattcaaagaaagatcacaagctttgttcttccattggatctgagatggctgaacaatcaaaggttgttaaagacaatgagagtatagtagcatctgaggagttatccccagggacaaatgatgttgataaaaagcagataacagagaccggcaatataactactgaggaatcatcaaaaccaagtgatactaagcctgctgtggttaagccaaagagaggccgacctccagcagcaaagtctcaggagaaaaagcctgctggaaagaaacatgcatcagacctaaaatctgcaaaacttgatcctatcactgattctggagggagagctacacggcacctgaataaagatgctgcgaagtcttcatcaaccaaggctgctgaaggagaatctgagaagaagcaacataaaaccagtatgaaattgcagaaagaagatgctgtctctgataaagacaccaatgaggatattagtttgaagtctttcacagtgacttgatcaattat

SEQ ID NO: 30172 - DNA, 2176 bp, Zea Mays
ctcccaccaaggcaccaacccgacgcaaagccgccggctttccccgatggcgacggcgatgtcagtttcggcggtgtccccgcccgccgcggcggtcacgcggccgcggacgatggtctgcgtgccggcgacggcgcgggcgccgcgggagatggcggcggagctggccgccgccgccgcgctcggcgctgacgtggcggagcttcgcctcgactgcctcgccgggttcgcgccgcgcagggacctgcccgtcatcctcgccaagccccgcccgctccccgccctcgtcacctacaggcccaagtgggaaggaggcgaatacgaaggcgatgacgaatcacggtttgaggctctgctattggcaatggagctgggagctgaatatgtggatgtcgagcttaaggtggctgacaaatttatgaaacttatttctgggaggaaacctgataactgtaaacttatagtttcatcccacaactatgagaccactccatcgtccgaggaacttgcaaatttggtggctcagattcaagcaacgggggctgatatcgtgaaaatagctacaaccgctactgaaattgttgatgtggcaaaaatgtttcaaatacttgttcactgccaggtgccaatcattgggctggtgatgaacgacagaggttttatttctcgggttctttgcccaaaatatggtggattccttacttttgggtcactcaagaaaggaaaagagtctgcacctgcacagccaactgctgcagacttgataaatctgtacaatattaggcagatagggccagacactaaggtctttggtataattggtaaaccagttggccatagcaaaagcccaattttgcataatgaagctttcagatctgtgggtttcaacgctgtgtatgtgccatttttggtggatgacttggctaaatttcttgatacatactcttcaccagactttgctggcttcagttgcacaattccacacaaagaagctgctgttaggtgctgtgacgaggtcgatcccgttgccagggacattggagctgttaacacaattgttagaagacctgatggaaagcttgttggctataatactgactatgttggtgctatatctgctattgaggatggaataaaagcatcagaatcagaaccaacagatccagacaaatcaccactggctggaaggctttttgttgttataggggctggtggtgcgggaaaagcactagcatatggggcaaaagagaaaggagcaagagttgtaattgcaaaccgtacctttgcacgagcacaagaacttgccaacttaattggtgggcctgcattgactcttgcggatttggaaaactaccatccagaggaagggatgattcttgcaaatacaacagccattggaatgcatccaaatgtgaatgaaactcctctatctaagcaagcactcagatcttatgctgttgtgtttgatgcggtctacacaccaaaagagaccagacttctccgagaagctgcagaatgtggagccacagttgttagtggtctggagatgtttatacgccaagctatgggccagtttgagcatttcacgggcatgccagctccagatagcttgatgcgtgatattgttctgacaaagacatagtgaggtttgtccaaagagcaagcttcccttccatcgtaatttctgcgcaattgattccagttgtgtcccctcctcgtccttcccgcatcttcctcaacctgtagaatccacatttttttttatctcagtggacgattacaaattccgagcaattgcaagttcattggacaatcctaacaccatgaagcctcgtctgtgagagattcatccatgcccacaaacttccttgtttttcctttttagattcggattcagtgatcagtttgcctctcagccattgtaaattaatttgatgttccgagctgaaacattttggtgtgccttatttgtatcagcatgaacagcagtcatcgtgggtttgaatcagtctcttagcatttgcgttccaagacttgtctcgatttgtcccttttctaggtatcactaaggacttatttagttgtgtctggatcaaaacgatcaaaacgcggattgaatttccttctatttaattttgatttagaccccgttcggcaagctaagattcaagtcaga

SEQ ID NO: 30173 - DNA, 236 bp, Zea Mays
gattgcagccgcagcaagccgcagcgaacaagctgtatattttttatggtgggcttactcctacaaaacggatccggttcccttcaccaaccaacttggccgggctgttttccagagcccaatatcttctgtttgtgttgtttcgggctgtcactcgttgcagcaaaacgatgtcatcaggtgtgagtgtgaccgtgacatgcaaaccaactgatgcctttgttctcccaccaact

SEQ ID NO: 30174 - DNA, 2702 bp, Zea Mays
cgctgggattgtgagataagcgtgggcctaccaaccacacatgtcaattctcggaatttctcagaagattggagacgggcgttctcttttcatttggagttttggactagtcgaactgacgaactggcagagcgttcaggatagacatggctgccacctttgccttcatccctctcctgctactggtctgcgtccagagcgcggctcctgttctcggcttcacaaggagcgagttccctgaagatttcgtcttcggatccgctacctcggcttatcagtatgagggtgctgttggtgaggatggtaggagcccaagcatctgggacaccttcactcacgcagggagaatgccggacaaaagcaatggtgatgtagccgccgacgggtacaacaagtacaagatggaagaggtgctattaatccaaaagggatagagtactataacaatctcatagacgagctagttacacatggtgtccaagtccatgttatgatttaccagctggatctccctcagatcctggaagacgagtatggtggatggttaagtccaatggttgtgtaagatccagtaactttagatgttagggatattttcccaaaatgaacatatcttgatcatccatgctaccacaaaacgcagggaggatttcacggcatatgcagatgtgtgcttcagggagttcggtgacagggtttcacactggaccactctggatgaagtcaatgtggctgcaattgggtcctatgataatggacaaattgcaccgggaagatgttctgatccatttggaacaaaaaaatgtacagtggggaactcaagtgtggagccatatatagcagctcataacatgctactggcacatgcatcagctaccagactgtacagagaaaaataccaagtgagtaatcttgtacctgaaaacatcacatgtatcttaacattagtgttgtattgtttctttttttcttgaatacacaggagagctgagcatcgttgcattagaagaagaaatgtacatagtgtgcaaacacacacacccacacacttgtaatatcagaatctttttttttaccaagaaatactgtaggggaagcccctacagtaatatcagaatcttataccgtgacatgtgaggttgatccttataatagatcttacatttgaacatgtttcactcatgatccaaggcatcagtttgtcttctaactacaccaaaaacattccctttggctttatatcatcagatatttacccaaacataaaatgattgacctgtaggctgtgcaaaaaggagttgttggtataaatatatatacaatgtggtcatacccactaacaaactccactgccgatttagaagcaactcaaagatttctggacttctattccggctggatactagaaccattggtgtttggagattatccaagcgtaatgaagaagaatgttggttctcgccttccgtcattcagtaaagttcaatctgaagccattcgtggcactctagatttcattggaataaaccactattattctttctatgtgaacgaccgccctttagaaaaaggcatccgtgacttctcactggacattgctgctgactatagaggtaaaacagtttgtcactcgatacatgattatccttttattgcttgcaattctttagatacattccctgggacttctgattcatttatctagagtcacacacacaatggcctacagaagttcaaaacggtgtcacatggaccaaataatttgatgatacttctgaaacatattcgcaattttatgaaacctacaagctaaatgctgtatataacaaaacaattatctgaaacaggttcgagaactgatccgccaataggtcaggtaaggtttttcatcaacaatcttcagaaattcgacatgatagatacatcccttttattttactgcagcatgccccaacatctattcccgctgatcccagaggattgcaacttttggtagagtacctgagtgaagcctatgggaaccttcccatctatatccaagagacaggttatgcaaccacaaacggcagcctccatgatactgacagggttgattacatgaagacccacataagcagcacattggctgctctaaggaatggggctaatgtgaaaggctacttcgcgtggtgcttcctggacgtcttcgagtacctgtcagggttcatgtcgcaatacggcctgtaccgtgttgatttcgaggacgaggcgctaccaaggcaagcaaggctatctgctcgctggtattctaaattcctagagaacaaggggatccatgtagaggacgagcttgatgatgcgggatcacacgttgagcaataagttttctacagcgacacattgatctgtacatcctctagcgagactattgaatactactgtgcgttgcaataagaacacttatattaaaaaaacaaattccatcaaaacctctgtccaggactccaggtaaacaccaccacaatattagggacacggtcctgccagaacaagggaccgtttgtacaactcaagcccatatctgctagagtgtgaggagaaatttcattatttgggtcttaattcggcttcctgtgatctttagggcctgttcgtttttcacggattcaagccctggaatagttcctagccggattacttctctaatttatataaattttgat

SEQ ID NO: 30175 - DNA, 2648 bp, Zea Mays
gtctactttcattctactgctatgagtagcaattccccgcgcgcgctctctccgccccggcactaggccaacggcaatcaccactcaccaggtgccaaggtgtcttgtcggccccttcaccaagtgttagtcgggtccttcgccggcgacgggcaccaccagtatggacgaatcacgaaaaagagctgtctctactgcaaatggtaaaaatataagttcatcccttgatgaagactttggaaatgacttcctttcatcttggaagttaccaaaatcaggaaaagacacgattgacttcagtgttgactcagttcccaagagtagcaagaaattcagctttgacaacctagatgattttgggcttaatggagcctttgacaaattaccgtcctttcaaatgggcatgtctgatctggatttttctagccctgacaagaaaaaagtgaagcacaccagttcaaatgcagatctttttgaaaagaaaaaggaaactgacaaggacaatttctccttttcttttgatttcaatgagttgggaaagtttagtcttgatggaaagctaggaattgaagaaaagagtactaatagatttaatggcaaatctgaccctgtctcctcagaggttaaaaaggatacacaaagaggccttttagccaagggcaatgctatccttgaagagaataatagtaaggataaaatgcatacacttgatactcgcacttcaagaccttctcatctgacgaatcatgagaatgtgaagaatgccagtcaaccaacttcaaatatcgatgttgctgattcatctgacaagatgcaagaacataccagtgtcaatcctgcaacaatggaacaaactaaagtagactcagtgctcaatgacaatcctggagagcatcctaaagagatatatgcaatgaaggcagctgttaacataccttctcaggatttctcctgcggtgccatatctagtgaagatccaacacaagggccagcagatcatgtgaacagtaaagatgcacctatagtgaactgtggtaaagttcatgtatcgagggagagtaatgatgatgagcagtcgaatggtttacaatccagggacaccagcattattaattccaatgtgtcaagaagaccgtcgggccaatttaactcccagaatgaggttcttgaggaaagtgtttcgcttaatgaaggaagtcaagacaaccaaagttttagtggcgctcctaagaagtttttaaagaagacatcacatgggacaacaaataccgaggaagagatttcaggtcccaagattctctcttgttcagtgcagagggaaatcagaagtgttgaacctgcaccgatgaaggagagaggaagcttctctcttttatccaagtctgtacatatgaaagcaaccagggttgaactaacttcagaaacagccttaaatcaatcatccagtgcaagtaaagtgataaaaaagatgactacacatcctacagacttgaagagggaacacatgcaagctaatgcagtccctcacaaatctaaaactgctttatcaaaaacatacagcaagctagcatcaaatgggctattggccacctccatgaatgccaaagttgacacgaatgccaaattaggccttgagcctcctatctcggggaagtcgtctctactgaatgctcgaagcagcacaccacatagcgctggacataaagttgttgcaagtcatgtgcttctaaaagctagcaatacttctgattcattgcaaggtgttccttccaaagataataaatcgtcaacaatttctcaactgacaggagcaagaatcacaaaattaggaatcagaagtctgaaatctgacatggccctagagaaagaatcagtacaagtgagtgggacaaagtgttccccggtaacaacatccagaatccttgactccattcctgaaggaaaacctgcattgcctagcccatccataatgcagaaagttcctgaggaatcagctctaaatccaaaagctcctaaagtgctcaaacacatcatgagatctccagctgtaagaaaatcacctagaactgttccggagttgggaaatgaaatgattctgggaagtggaactccaaaagctcatgtggataatgcaatctcctcacgtatgccacctgggatgggagccatttcagatctagagttgcctgtgttagaaaatgatggaaacatagaaaaagctgaggcttgtagaaaggagcttgaggatatatgcattctattgaaaaggaaacatgcagaagctaaagagctagcagttcgggctatcgttaacaacaatacgatgctgatgttaaaccacccgatgattgaggagaaaatatcctaagggggcgtttggatcccttcattttagaggaattggaattcactcaataaaataacttatttagtttggaatttgacattccaccactttccaaagtttagatataagtctatctcaaattcatggggtggaggatgggaaatgactttatgtattagtagaatttgtttctactctgtaacttacatgacactcttcgtctcactcttctatagtaaaaatgtagcacataaatatctctgacatcttgctaataatagtatacaaatatattttgcat

SEQ ID NO: 30176 - DNA, 1456 bp, Zea Mays
tgacgcctcactaatgaaaatgggaaccactcgaaaacgtcgctcactctggctgaggtggttggaacacctgttggacgaattgtgaagtgtgaggagtttctgaaggctgcaggacctgttatgctggttggcccttctagctaagttcaccatcttcaactttggtactcagaaggatgtctccaactggggcttgttcttctgtgttgcaattggtccatgggctggtctgattattggttttgtcacagaatactacactagcaatgcatacaagttcaaagcctacaagtctcttatgttttttcttctcatcgtttctttgtgatggtgttttaataatcctaacatgtttattctatggtagtcctgtgcaagacgttgcagattcctgcagaactggtgctgtcactaatgtcattttgggtcttgctcttggatacaagtcggttatcatcccgattttcgctatcgctgttatcatctatgttagtttctccattgctgcaatgtacgacatcgcagttgccgctcttggtatgctgagcacaatcgcaactggtcttgctattgatgcttatgctcccatcagtgacaatgctggtggtattgctgagaactgatgctgttgatgctgctggcaacaccactgccgctattggaaagggatttgccattggttcagctgctcttgtgtctctggcgctttttggtgcctttgtcagcagagctggagtcaaggttgtcgatgtcctctcccccaaggttttcattggtttgattgttggagccatgcttccctattggttctctgccatgaccgtgaagagtgttggaagtgctgccctaaagatggtggaggaggtccgcagacagttcaacaccattcctgggttgatggagggaactgccaagcctgactatgcaacctattggaagatctccactgatgcttccatcaaggagatgattcctcctggtgctctggtcatgctcactcccctcattgttggaaccctcttcggtgttgagactctctatggtgttcttgctggtgccctggtttctggagtgcaaccgtcgttttctcttaacagaaaagaactataaaaacgtcgccgctgtcaaaacccagaaattacgaggcgcgaaatggaaagcttccagcagattaacgatcggctagatttgattcattccgcccgcccactacctctcacggtcacggccaatccggccaacccagagatcacgtgtcagtgctattttgtgtacaagtactacttaatatatgtttgaaaacttttttaagtgatttccaaacttgaacgggaatcattcttattcttttaaatgtctgatagtagttattgtttgtgtgacattgtactgttttgtttcttaaacaaacaccattctacaaattttgcatcgtccctgtagtgcgcccgta

SEQ ID NO: 30177 - DNA, 1909 bp, Zea Mays
cgtcatcctagggccaaggaaacgccaccgctccagtcatatccccgccgcccgcgccgccgaaggccgaaccctcgtcgcctcccctgcccacgcccgccgcctccagcaggaccacaccgccggattcgacttttttgtcctcgccctctccccctcctctcgtctcctttgatggcgtcgaggggaggctcctccggctttatcgagtattttcataacagcacaaagcgtcatggcagcaatagagagaacacaagtcagcaaggcatgaatgctatcagggtgcaaaaagaaatgaaaaaagaatgggcaagacctggaagagttttcaatagaaatattactagaggaggctactctcgaagttcattgcctgctcaaccaaaaagcttgctgcccaacaccacttggttacttgcaatgttaatgggcatggagcggcccatgctgacaatggtatcaaaattgcggctcaagcccatgacaaggaagtcaagccttctattgtccgaaaaatggaacaatatgaagggacacaagcatcattggttggatctcatgcagttcttggaaagggcaaccagaacacggtggacactgcagcatcagggaaaaataattttggtggcgaactttgctgttcttcatcagatccaatccatgtgccctctcctggttctaaatcagctggaacttttggagccataaagcgtgaagttggagtagttggtgctaggcaaaggccagctgatagtgcagcaatatacacatctacttctaatggcttagtcaaagtggtatcagcaccaaaggttagcccacatttggaatggaagcccaaatcagtaagccccagcactgctgcacctcctggtgctccatcacctgttgatgatggaagtaaaacagaagtgtctgctttgtctaagaagctttcacatgctaatgtatcacatgaacatgtcattataccggagcacatcaggataccagattctgaaagaactcatttcatcttcggttcttttgaatctgaaatttatccaaaggcttctttagcagcctattatgatgctgtggctaaagaagacttgaatgatcactctccatcaagcgtggcagcattgggtttcacatcaactgatgggactcttaatgataggatggataatgttggttcctgcagtccacttccacagtcagagcctgctgtttcagtttctgaacatgagcagtcattgacggagtgtgtggatgttcggagccctggtgttgtcggtggaacaaatgagacgatttcaagcaaggtaacacattctcaacctcgactccagcatcaggaagctgcacagaattttaaggcatatgagccagattctggttatgggatgtcatttattactaaagttgatggtgaagcagcccaaggtatagcttattcatctgaggctatggttttacattctgtaaatggctatcagttacctgcatctacagcaactcaacaaccagtgccccagatgttttctcaacaattccaagcacctcagtatccaaactttttgccatatcggcatgttttctcaccacagtttgggtctctaatggttgttccaaactattcaagcaaccatgcatttcctcagttgccacatgccagcagctatctggtaatgccaaatggagcctcacaactagctgccaatggcatgaaatatggatcaaaccatcagtataagcaagtatttcaaggagcccctgctggatatggctacggaaatcataatggttaccctaacggtgttattggcggcacaggtgctattgaggatatgaatatgagtaaatataaggacaactgcctctatgcacccaatccacagccttttattttccgtgattgtca

SEQ ID NO: 30178 - DNA, 2084 bp, Zea Mays
gctcagtgatgtgctaggcggggtagcgtgcggatgactgcgggtgacggcactgaggcaggtgatggtggtgggtgagggcgttcacagattaagcagaggcgaagacgatccaagaagtggagccctatctctatcaaacgtggtgtaaggaaacctctgaacagctccggcgccggtagcatggaggagttcgagcgccgcgagatttcccgtgctccgacgaatggttcggccgtcagggatgacctttggggttcaaagcttgctagcaaattttatgggtgcagcaactcaagcagcaggtttcttgactcaaatattactacccaaccagagcgctatttgatgattgttacaagtggaggcctgaatcaacagagaacagggataatcgatgctgttgttgctgcacgcattttaaatgccacacttgttgttcccaaactagaccaagcatccttctggaaagattcaagcaatttttcggatattttttacgccgactggttcatctcatctctatcaaaggatgtaaagattgtgaaagagcttccacatataggaggttattcggttgacgaagtttgattatagattagcaaataggttgcaaactgacttgcaaaagttgagatgtagagtcaactatcatgcattgagatttactgctccaatacaagagatgggtgaaaagctaatacaaagaatgagggagaggagcatgtattttattgctcttcatttgagattcgaacctgatatgcttgccttttcggggtgctattacggtggtggagagaaagagaggagagaacttggtgctataaggaagaggtggaaaggcttgcatcctaacccagagaaaggaagaaggcaaggtagatgccctctaactcctgaagaggtgggtttgatgttgagagcgctgggctacagaaaggatgtccacatttatgtagcttctggagagatatatggaggtgcaaggactctggcacctcttaaagctctcttccctaatctccacacaaaagaaacaatatctagcaaagaggagctggctccattctctaaatattcttctcgcatggctgcacttgatttcattgtctgtgatgaaagtgatgcttttgtggctaacaacaacggcaacatggctaaaattttggctggacgaaggtatccgttgctgctatgtcatcagtggtttattacttgccctgaccatatttcgtgccctctgcaggagatactttgggcacaagagaacgatccgaccaaatgccaaaaggctctatcccttatttttgaacagaggaaacatgtcgtgggatgcattctcctcaaaagtacacatggttcagaaaggatttatgggagagcccaaagagctgaggccagggaggggagagtttcatgagaacccttctacctgcatttgtgaaaggactgatggcaaagcagtagccagagccaaatctcaagatgatcaagtattgaatagtgttgctgaccaaggcaaaggcattggcgagccagctgttcccaatcatacggatgaagaggcgggcgaacctgatgatgacgaagatgtccctgctgacaaagaggttgttgacgctgaaatggttgacgatgtattggccggggatcctgagttagaacagattctttcagactagtatccatcatcagagatgtttgcacaaaccaatttttggccgagtgattgatgaattttgccacgtccctcgaaattgtacatactttttttttgcgatgtaaatgtacgtatacatccaatctactctagcttagctcgcagcctccttacacagtagctcttttgtaacgtttgtggattgttatagcttgtatcatgggttttgctttttgtgtagcaactctttgacgccctttttgtgtaagcatcttttggcatgtaggatgtgaggtgcttaagcacggataattaaggagagaacgttgttataccattttcataaatgagttacttgcctagatagatttagccatcttgttaacacaaatgaaaaaattggtcttaagtaatatttgag

SEQ ID NO: 30179 - DNA, 1632 bp, Zea Mays
cttttgcgcatcttacatgccgccgccgccgcctcccgattcctgacgtccgagcgcggcacggcggcagtcgcgggagccccaaactcgagcgcggcgacccaagcgctggcctctaccctttctccctcgactcgttttcccggctggcctgctaccgcggatccggcctcaagtcgggtgcaaaacatcgccgcccctgcccccgcttcgttgtcttccctgacgaccctccccacacggccacaccgtctactgctgctgctgaccaccgtacacgcggggaagaatcagactgccaaacgattcactccactgaattaaaagacaaaggttgggccggtccactaacagtctaccactcataggcaggacaacggcatggcacatccgaggccgtggttttcctaagcccattcctcgctcaacagcagctgagcagattaggcatgcatgttcttcgatgccgctcgggttggggcgaattgcgtcatactgcactcaccgctctgggccttccaggtcctccctgccatgcatgtcgggcgcttgcgatgcaataacctcagcaaacaggctgattgggaagcacctgcgtgctggcagggtggatgctgtgcgggaggtgttcgacaaaatgccgcagcgggacatcgtgtcctggaactccctcatggctgtgtatgcccgttctggggtgcatgacagtgcagttactgcgttcctcaagatgagacgtgaggggttctgcgcagaccacacctccttctccactgtgctgtcggcctgcgcaaggatggagactctagctctagggaggtgcatccatgggcttgcgaccaagaccagatcttcgttgaacgtgtttgtggggtcctccttgatcacgatgtatgccaactgtggggtgtatagctgcctggagtggattgtggatgatgtcgacagtccaaacctggccttatggaatgctctcatatcaggtcttgtggtgaaccatagggtagaggatgctcgcagggtattcgatcagatgccagagcacaatgttgtgtcctggactgtgatgatcaaaggatattttactgtgcatgaggtggggcgggcattggagctgtttaaccttatgcctacaaagaattctgtgtcatggtgcgtcatgatcggaggccttgtcaaccacaagcgattcagagaagttaatgaactattcaacactttgatgagctgtagagaaatagtgacaaatgcaatcctcgttaagattgttaatgcctgtgctggtttgaaaagtattggaggaggcaggtgtgtccatgggtttgctgtgaagtctgggtttatccatgaccacatcatcgaggcatcattagttgtgatgtactgtaactccttagatattgatgaggcacagttagaattttgtaaaatggaaagaaagcatgttggctcatgcaagatcgatgaggctagaaagattttttattctatggatggcagagataagatctcgtggaatttgatggtcgatggctatgtaaagcatggaaaaattcatgacgctattgagttgtactcaaagatgcctgaaaagaatttggaagcttctactactttgatgtcttgttttat

SEQ ID NO: 30180 - DNA, 1001 bp, Zea Mays
ctcgatgttccattgttcgttgactatgtttgtgaactgaaatcgttctggtatttttgcatgcagaatttgtactgtacggtattccaaaatcttaaaaggaaaccttgattcaatactcttgtgcaaataatctaaaatctggtcttacactctggaaatttggtaccttaccaccagcccttatagcatttaggggtcatgtgcatggtatagacccatcatggcacctgcttggcttaggataccaagacaagacagatattgagagtgtcaggagggctgcagtgatacattacaatggccagtgcaagccatggctagacattgcttttaagaacctacaaccattttggacaaatcatgtaaactactccaatgacttcgttagaaactgccatattttggagcctgagcgtgtcaaggagtgatttgcagcaaatgctggacatagcgagggagtatagtttatggttcgcttgttggctggagaggctgattgctgctgtataagtataataggtaatcaagaaagcaaccggcattcaatacaactgaccatcccctgcgaaaactggcattcaaatatctcaggagtcttcatctgtatcataggggaacacaattcttaccatctgtatcatactgttgcatcattcttttctatactgtaactgcggaaaaggagatctgggactgggctgacctttggtcgcagaataattcagaaggctagaagattgagtgattggttgatcaagacgaagaaaggaggcggatattgtgtggtggcaagtttatatgctttccatccatccatccatttaattctttttacactcgagtcattgaaattttgttctggtagttttgtgattgatttggtaggttggagatgattgtagtagagatgccattgtttgtggagtaacctacaggatattgttacaattgttgacatactatagatgtgcagataattcttacaagagtatttgcgc

SEQ ID NO: 30181 - DNA, 1196 bp, Zea Mays
ggactaccccaatcgattgtatctgacagagaccgtgtgtttctcagccacttgtggaaagagttgtttcacctggctgatgtgcagcttcagatgagcactgcgtatcatcctcagtccgatgggcagtcagagcgtgtcaatcagtgcttagaaacttttcttcgttgttttgtccacgcctgtccgcaccagtggagtcggtggttgtctgttgcgcagttctgatcagactgttattacatcttctgaattgagttcctggttgaaggagcgtcagctaatgtctgagctggtgaagcagcatttggagcgtgccaaactacgtatgaagcgtcaggcagacaaaggtcgttcggagcgtgagttcgcagtgggtgattgggtatttctcaagcttcaaccgtatgttcaatcgtctgtggctgttcgagcacatcagaagctggcgttcaagtttttcggaccgttccaagtgttgcagcgcgttggcaccgtggcgtataagctgcagttacccccatcttcacgcattcacccagtttttcatgtgtcgcagcttaagcgtgcgttgggcactggtttcactgcatctgtgactttgccgactgaccaatttcattttagtgtgccattcaagattctgcaacaccgcacagtgatgaaagggctgcaagcatgtgcacaggtcctggtccaatggtctcatatgtcaccagaactcgcgacgtgggaagatattcaagatctacgacaacaatttccatatgcgcctgtttgggggcaaacagccagcttaccaggggggaatgtcagtgacacaggcgaggtactggaggaacaaagcaaggagcgggagcagtcgggaccagatggtggacccgatgggccgcggcggtcgaccaggcccaggcgcagcaacaagatggtgactgggccgacgtggatcaacttcatggaagtattgcgtgaggcttaagtagatgagagaggagttgagaggaataacttgtaacagaatattattccacttctgaactaagaactactctctgcctccctcgctgttcttctctgttcttctctgtaatcctatcggttccgtatccagagaggtgctaacaatatcataaattagtgacatacttaaaacagttttaaaatactttggcttgccttaatgtgattctagtcct

SEQ ID NO: 30182 - DNA, 3274 bp, Zea Mays
cgctgcgagaggggtaaagaacttagaagggcaggcaggagaagcgacacaggaaactgacgtcgccttcggcggcctgctacttaaataaatcccctcgcctcgcctccggctgcctcttccctttttccttccgcgcaaatcactcaggtgccagttgcgcggcggagatcgcgacgaattccggacggcagggaggtggtcgggggaactgggaagtgcatgtgagatccgatggcggcggctgcctgcgccggtgggtgcggaagcaggacgcggatgcggagggaaggacgcgctgttcgtcgagctgtggaaggcctgcgcggggccgctgtcctgcgtgccgccgcttggggagaaggtctactacctcccgcagggccacatcgagcaggtggaggcatcgacgaaccagcttgccgagcagcagggcacgcccctctacaacctgccatggaagattccctgcaagctcatgaacatcgaactgaaggttgagccggatactgatgaggtgtacgcccagctcaccctgctccctgataagaagcaagatgagaatacatctacaacagtggaggaagaggaggtggtggtgcctcctgcgctaccagccacaaatgagggtcctcacatccattccttctgcaagacattgactgcctcagacacaagcacacatggtggtttctcagtgttgcgccggcatgcagatgagtgcctcccaccattggatatgagtcaacatcccccaaatcaagaattggtggccaaggacctgcatggggccgagtggcggttccgtcacatctttcgaggtcagccacggagacatctcctgcaaagtggttggagtgtttttgtgagcgccaagcgtcttgtcgcgggggatgccttcatatttctcagaggtgagaatggggagctccgtgttggagttcggcgtgcactgaggcaccaaaccactatcccatcttcagtcatatcaagccacaatatgcatcttggtgttcttgcaacagcatggcatgcagtgaacactgatagtatgttcactgtctactacaagccaaggactagtccagctgaatttgtggtttcgcgagataggtactatgaatcactgaaacgaaattattcaatagggatgagatttaagatgagatttgaaggtgaagaggcagcagagcaaagattcactggcacaatagttggaataggtgcttctgatccatctggttgggctgactcaaaatggcgttcccttaaggtgagatgggatgaaccttcttctatttctcgtcctgaaagagtttctccttggcaaatagaaccttctgttagcccatgtcatgtgaaccctcttccagttagattcaagaggtctcgatcaagcgttaatgctttgccatctgacgtgtctactgtaaccagagaagtcacttctaaagtcatggcagactcgcagcaaaatagtctcacaagagccttgcacaatcaaggaaggacacaattgacagttcgataccatgataacagtgatgtgaagactactcaggatcttaccgtgtggtcttcaggaactgagcaacagagaaacaatattgctgcccagacaaagctatgtctggagggttggacgccaactagaagtcctgaaggctacaatcagatattctcggcatttaaaccactgaaagatatacataacccacttggtccttttcctagtcaaatatctgggactcactcaaatagctgggacacagctgatgctcgttatccagtccaacaagctaattacagcatgttacctggcacatggtctttgaggcctcataacagtggttttaggatgaatcaacaaaattatctagtgatgcctgaaggtgcaaattttacggggaaatcagctttcacttcacttcaggaccatggcactgataaatgctccacaggctgctttggtcatattgagtcaagttcccacacagaccatgcatcctcaagtttgatcaggccccagcctttggtccttggaaatggtgttcagaaaagcaaaggcacttcatttaaattatttgggattccccttggcagcccagaaaaatctgaacctctggtatccccaccaagtgtcgcatatgacgggaaacttcaaacttctccatcagaaaaagggaatcagctagacgtagttgaagtggataattgttctcatccttctaagactgtgaagccacttgatggtcctcagtcagattctattacagagaataatcagccttctccagaagctacccttaatatccagaacaaagtgcaaagtagttccaccagaagctgcaagaaggttcataagcaaggtagtgccctcggcaggtcgattgatctaacaaagttcgcttgctatgatgagctgattgctgaactggatcagatgtttgacttcgatggtgagctgaagagtccatgcaaaagttggttagttgtctacactgacaatgaaggcgatataatgctggttggtgatgacccctggaatgaattctgcgatatggtccacaagatcttcatctacacgagagaggaagtcgaaaggatgaacccaggtgccctgaactcaaggtctgaagatagtctatctgactcgctgggaagaggggtagcttccagagatccccgaggaggcgggtctacttcggctctcgattccgagaactgctagtttgttcagtcagtgaggcctttggaagtgaagcagacaaaaggcgtgaatcttgcggtgtagagtgtagttggtacattgtgtgtatgcctccgggtaagccctgcggtacccagtttgtgtcctggcgccagtttaccatttaagctaagtttttgggtgtgccctgtgctggggtctgggctctagttattgtagcagagcaggcaatgcatgcaagaaactgatgatgcgcctgtttggccctctttcccttcccaagccatgtaaatagccttggctctgaagcgtagtattgtattgtcgacagccgtacttgagatagtactccaagaggcgcgcttgctcctgtcagttgggtgtgcgtatgtagatgtgcgtgtgaagccatgcaagcaagggtttgtggggttgatggcttttcatggtagcggatctgctttcatggtactgacgtgcaggtggcaggctggtgttggctgctatgttttgctgcacgatattggcagaaaacagtagtactaaggggtgtttggtttctag

SEQ ID NO: 30183 - DNA, 1957 bp, Zea Mays
caaccgaacaaacaggccagcgctctgtaccggcgtttctcctcctgtctcctccccgctcgcgctgtcgcttcgccgcttcagatccaaacccgcgtattaaaaagcgctccaagcgaccaaaaccctaaccctaatcaccgcaattccccaatcatcggccccgcgcaaaaccctagcccagcgccacctacccgtccctctcgccgccgccgacatggcaggctcatccggcggcgcagcctcctcttcctcctcccgtggcgtgccggagaacaggttctataatcctccccacgtacgacgccaacagcagcagcaggggcaacggccgttgcggcccgcatcaccgtcgccctcgccgcggccggtgcggcagaagccccctccgccggcggcggccgttgccgcgtcggcggatgtggacatccgggtggattccgacgactcttcgtcgacgacctcgtccaagccatcggtggcgtccaccgcggctactgcagcagcgggtgaggtgaatgtggccgtggcggaggcggaggctgggaatttggagaggttcctcgcctccacgacgccctctgtgaccgctcagttcttgcccatgtcaagcctaaggatgcggcgaggtggtgatgctatggattcacgaccttatttctgcctgggagatctttgggaatcattcagggaatggagtgcttatggggccggtgttccacttgtgctaaatggcagtgactctgtgattcagtattatgtgccatatctttctgctatccaactatttgcagatccatcaagacctgcttcaagaaacagtgagagcagcattgagaatgacgttgagcggctaagagtctcatcatcactggaaggtaaacatcgactggaaaatggtggcatacgaagtgatgatggtgaaggcgatgcatcttcaagttttccaatatttcagtatatggagagggatcctccatatggtagagagcctctgacagacaaggtatcaactcttgcacacagatttccagctctgaagacattcaaaagctgtgatcttctgccatcgagctggatgtctgttgcatggtaccccatttatagaattccaacagggccaacattgaaggatctcgatgcctgttttttgacattccattgcctagcaacaccttgcaaggattgtgaccctcctacgccagcatgccctggctttgggggaattaaccgcggcacgactgcagctgggaaactatctttgcctatctttgggctggcaccttacaaattacgtgcctccatttggacatctgacaaaactcaagaacgggacctcgtcacctctctgatgcaggaggctgacagctggctccgcagaatacaagtagaccatccggatttccggtttttcgtatcccatttcagtacaacgtggagatgacccgtggctgtaaatggttcatttagtatgaatatggcatagagacacctgagtgcccttttgtaacgggggggaatgtatgagttataagcctgcgtgcataactttttctcttgtctccagtaagctgtatcttttgtaggtttgttttgttgtggggtgaaagtaaagatggatggtggaaaaagcaaaattggaggcattgtggaactgaagtgaaatatggggaaaaaagaataaagatttccagttattagagttgagaaaggtccagtgtttcatgtttaggttacctgagctgcccgtgtgtttggtccatcactcatcggttctacaataaatagaggaaatacaccagaagtacagatactgatcttcgaagtgcagatgttggtcctcttcgttttaacagtgggtttcttcaggtagttttttttaaatagagcgtttaggccttattcaatctgactgttgcaatacaattaggcaaaatcttattcaatctgagagcaa

SEQ ID NO: 30184 - DNA, 467 bp, Zea Mays
atcatccccttcctcccgcatcgcctctccctgcagtgccccctacatggcgttcgtcttctctctcacgctagatcaagcggagcactattcatcccccatcctttccttctggatgatggcagcgagcacgccttggcgaagaaacctcccgctcctttgcggtgggtttggacccgagcgcggaggaaggccgactcggatccgctcgatctcgccgccgaccaggcccaacagcaggacgttgcggcgcaggaagcattcccgtcgatgtactccgagcaggcaccgcaagaacaaccctcactgccgcaggtgttcttcatcgccacatccgacgtccttgattcagtcaatcgatgctgctctcaaatctagttcccctcccatcgccgctccatctcaaagcacagatcttgacgtactccatcaggactcgtggggagccagatcgcccatggaggaga

SEQ ID NO: 30185 - DNA, 2938 bp, Zea Mays
aaatgcccgagaggacaatggacacgcacgcagagggagctgccggctgggacaccggacaccacaccattcacatatctcgcgacagcagaaaccacgtcgcgacgctgccacagcagcaggctatgatggtgctcatgagttccatcccagttctcaggccgcgaatgcggttccaaaatactccaagcaaacaggcagtttcgattgggcgaagcgcgtggaaaatccaccgcgccaggaaatcccagagcggcgtcggatcgtggcctcgtgcagcggcatccgcagcaggaataatgaatcgtcatgatctacgttgccgagcccgcagacaggaacgggggtgtaagccgatccgcgagaaaaatccaacctacaagacctacaaggccaagcgacatcccaatccgagcgtttcatcttgccctctgctctgtcccctcacaccttctcgccaggctcagtggtgacatcagctgaggtccggtagtttgcctctgcagccatgcctcaaatccagaacaccatgcggcaaaactgcacactcctagctgttctttgtggggagtttgctgagaagcggcagacaccagcttccctggcgccagacacaaagcggctgcggctgtcataccctttccctgagctcgcttcgtctgggagactggaggtgcacacgctaatcaatcccactttggagcaatttagagaggcacagcaggcggtgcatcctgtcttcttgtatcttcaggggcagcagcaagagaatgaggaggagattggcacgcttgtctggggtgatacagatttatctgacccgcagatgtttgtctcactcatcaccccaccatttccgaccatggtttatttagaggttcccactggggaaaagcttgcccagtcacttcattcaaaggggataccatatgtggtatattggaggaatctattttcatcttatacagcatctcattttcgtcatgcgttaatgtcagtcattcagagttcctgcagccatacatgggatgcatttcaacttgcacatgcctccttccgactatactgtgtaagaaataatcatgtacaaagtgttaagcttggcccctgcctacttggggatgctccaaaaacaaatgtcatccctgctggggatgaagtgaatgaggaacaaggttgttctgaaggttttccagatataagaatatatgatgaagatgtgagcatgaaatttcttctctgtggagtaccatgcaccctggatgcatgtttgttgggggcactagaagatggtttgaatgcgctcttgaatatcgagattcgtgcgagtaaacttcagaaccgagccagtgctcatccacctcttcaagctgaagatcttccacatggagttgttacaatgcgctgcgatatcacaacttgcagttctgcacatgtgtcgtttcttgtttcatgcagtgcccaaacttgttttgatgatcagcttctagggagccgtatcaagaatgaaattattgagaagaggcagttagttcgtgctctattgaataatgaggataacaagccatcttcatatgagcctttgccttccatgtgcgtggcttgcggagcttctacttttgaagtctggataaccatgccaaaatgggcagcacaggttttgaaacatcttgcgccagaaatctcctacagaagcttggttgcacttggaattgcttgggtaaatggtacaccagtgtcctcatttgataggcaggatgcagaccggcttcttttcttttgctctaaccagtgcggagatcaagctattcaaaatggctcatatgctcatgtatccagctggtcagcaccccttaccaaggatagaaccactggaagtctcgagtcaaaacagatgtcatttggtgcaaaaggagttgtaggggataatacgatctccctatcatcattgaaaccaaggctaaagcctgcaacaatgagaccccttcctcactctcgcaagcaacaaatgcatccctttatggggtttcctcagtccatcattcacgatgctagtcaagttaagcctagcttgccagcccctcctgtgaagcacaacgcagtacctgttaccgcagtgacaccgagaaaatcatcatctgggtcaccatcatcctggtcacgtgttcagctaccaatcccattgaatcctctgccaataaagaaacatgagtgcaatcggttgcctatccacagttgctctgaagaagacttcttgaaagatgtcatgcagtttctacttcagaggggccacatccgacttgtacctcagggaggactggcagaatttcctgacgcagtgttaaattcaaagcgtcttgatttatataacttatacaaagaggtggtataccgaggtggcttttatgtaggcaatggcataaattggaaaggtcaaatcttttcaaagatgcacaaccatacagttacaaacaaaatgacgggtgttgggaacaccctaaaaaggcattatgagacgtacttgcttgaatatgaacttgcacatgacgatattgatggggaatgttgcttgatttgccacagtggtgctctgggtgactgggtgaactgtggattatgtggagaatgggcccaccttggctgcgatagacggaaagggctgtctactttcaaggactactcgaaggcggatgggatggaatacatatgtccccagtgtagccttgcgaaatacaaaccgccgttgcctgcaccatgaaatatgttgattaacttctgttactttcttaagggtgatggtttggatagaaattagtggctaaggatgtgtagtgttgacctgtactattgaatatgatcctgtacgatttgtacaatttttataaaatttctgatttccgaagggtgtctggtctgtttgtaagaccttagtttttaa

SEQ ID NO: 30186 - DNA, 1977 bp, Zea Mays
cgctattccctcgtcttcatccggccaccgctcaggggagaaaagatctccagccgcagggggaaagaaaaatcatctctgcgttatctgcatgcgtcgctcaaggagaaaaatctcgtcgcccctgttcctttttaacgagcgcgcagtccttcttccctgcgcatccagctcctcctactccctccctgcagctccccatggctgagctcgcccctgatgccgcgccttgctccctggcgcagcaagctcgccgcgccttgggtcgcgcgccctagctcctgctcgcgccgctgcttctctctgaagctctctcacacgcgcgcgactgccttctctgcacctccctatgctcggaccacgaaactctttggcgctctcccatggcggcgcgcccatcccccaagctccttgccatggccgccatctctcattgaagttgcatccagccgagctcccagcgctgcagccttcccccaattcctctctgctcgcgtagctccctctgcctgcttcccatagcgctcgtccctacctgctcggcctctggctccggctcgccggcgctcctccctgtgcctagccgtgttcgcacagacctctgctccttcattccgcgccattgagtttgcccggccatgacctcgctttgctcctcacgtcattgctcgccgagtctttactcagtctgcgatctctcactcccgtcgttgcgtcgttcgtcgtcgtgtgtgtagcaacatcgctgattcctccatggtgcctatcgacgaactttgcttcatcggtttgtcgccttcggttcggcacatgtgtggccgccgaatgcgttcgctgcttaaccccgtggtgttagagctcatgatctcactgtcgtcagagttctcactggattcgtgtcctcgccagctcgcaccagactcaatctcgtcgtcgttcggtcaccccacctcgatgtcggtccctacgtgttgtctccgacttatgctcgcgccgacaaaagaatcccaagaagatgtggagaagcaagcccctggtcgatgtcccaagtgctcgacagaaagctcgaacaagtcatcgatcgtcatcctcgtccacgccaagatctgggaagattaggcgtagatccacgaagattaggcgcagaagaaaataaattagtacacagccggaggatactcgatgcgaaaaaagatgaagcgtgattcgacgcagcactcaccctatttccggtgaaatgctgagctgaaaggcgtcgttggtttcgcgatttcaagtcggatttaataagggtacgttaattaatcgcgtgacgcggaagacgacccatgtcgaccccaagcgcgggctaatcaacaggttgatgctgatggacgaactggaagatggataatctgaacgagtgccaacataaaagatgatcgtcaagtggacatcgcctaacaaacactaacttagtgttattcaggcaagccccggtgcatttgccacctccttgatgttttaaaatttttatcaccttgtttgatgcattaggtgataggagttgtgtgctaaagcgttgatgcatttccttccttaaaaattgattacccttccttgataccctttttgaaaaagaattttatgatgcttagccttgctttagcaaacaaaaatgttttgttttcaaacaaaagtgatgcttcagtgggtgggaatgttttcaaaaataaaacttgatggtggatccgtcaaaggccttgatgggttcaacatcgaaaaagatgtacctctaccaggtaccaaactttgggttgaaattaataaagctgagaccgggcggttgacttgcacgagacgggagtctcggtgtagtgtctctgtctgagtcgattaaggaccttgtcaatgtaggcttgctgatcgaggaccttttaactggtcacatgcctcgggcagactaataccatcataagataacacgcaatgtgagtg

SEQ ID NO: 30187 - DNA, 1918 bp, Zea Mays
cgaaggtggcacacgacaaaatcaccaaccagtccagtcaccactgggtgctaaggagaaatggccacttccgcgcctgcggccaacgccgacggcgctgctcccggaggtgtagatggtcgcagcggcttctgtgaggtgaccaggacgttccgcagcctgcgcccgccggtgccgctgccgccgacggactcaccgctctcgtttccggagtttgcgttctcgctcctggcgtcgtccccgacccccgcgcacccggctctcctcgacgccgccaccggcgaggccgtgtcgttcccggcgttcctgtcccaggtacgcgcgctcgcgggggcgctgcgctccgtggtccggctcggccgcggcgacgtcgcgttcgtcctcgctccgacacggctggacgtgccggtgctctacttcgcgctgctctcattcggcgccgtggtgtcgccggtaaaccctgcgctgaccgcggacgaggtcgcgcgcctcgtggcactgtcaggcgcgtccgtcgccttcgccgtgtcgtcgaccgccgcaaagctgccggctggcctccccgccgtgctcctcgattcggaccacttccgctcctttctgcagaagcagagcgacggccgtggggaggagggacttgcggcggacacggcggtggtgcggcagtcggatacggcggcgatccagtactcgtcggggacaaccgggagggtgaaggccgcggcgctgccgcaccggagcttcatcgcgatggcggcgggatcccatgctctgctggggaaaccgaggcgcggtcgcgagaggtcgctgctgggcgcgcccatgttccactcgatggggttctactacacgctgaagggggtggcgctggggcacacgacggtgatgctgaccgacgcggtggcgcggcgcggcgtgaagggggtgatcgaggcggcggggaggtgggccgtcagtgagatgacggcgtcgccaccggtggtggtggccatggtcaaggagcggtgccacctagaggcgctggagcgcgtggtatgtggcggcgcgccgctgccgaggacggcagccgagagtttccgacgacggttccccaacgtggatctctgcatgggctacggttcaactgaggctggtggcatatcgctgatgatccagcgggaggagtgcggccgcatctgctccgccggccgtgtctcggagaacgtggaggtgaagatcgtggaccacgtgaccggcgaagctctgtccgtgggccagaaaggggagcttctggtgagagggcctgccgtcatggccgggtatgttggcgacgaggaggccaacgctagcagctttgattctgaaggctggctgaggactggggacctttgctacatcgaccaggacgggttcctgttcgtggtggacaggctgaaagagctcatcaagtacaagggctatcaggttccacctgcagagctggagcttgtcctgcagtcgttgccggaagttatcgatgccgcagtcatgccgtatcctcatgaggaggcagggcagatcccagtagcgcttgtggtcaggcagcctggtagcaaggtcacggaggctcaagtcatggaccacgtcgcccagagggtggcgccttacaagaagatccgcaaggtgctctttgtcgactccattcccaagtctccggctggcaagatactgaggaggcagctgaccaaccatgtgcaggctggcgctgtttctagaatgtaattcttctttatttacttgattgtgtgatgcgtgcaagagacacagaatgacgcgacgatgggttagaacgcgatcgactttttaaacaaataatagtggcatgctgtggaactctatctatgtatgtaaggtccgtttgcatccttggaattaaattttattctaataatagtaattt

SEQ ID NO: 30188 - DNA, 2176 bp, Zea Mays
gcgcgctgcacgtgagatcacgagcggcctggccgggcagttcagacttcagactgtgagtcccagtgtgcgtggtagtcaaaactctccaaaggagcggacgcgcgaggtcaacgtgtcagagccgtcggagccaaggcctgatcgataggagatctcgatgcgccacttgctgcaagaagtaacatctctctagctctagaggccgcacacgcaccgcagacacacgaagcactctctccaggacgcgtaccgcacgcaccggcggccgtcgccctccatctagcggggctcacatggactggcgccgggccggcagcccgacctacggccgccggcgctcggcgggtgggatctactcggcgccggcgtcccctgcgcaccctttgggccccgccgccgccgcgtcgcccgtgcacccgctggcggcgcagtccaagacccgcgcggccgctgccatggcgcacgccatgtcgcgcgcgggcccgcgagacaacgactacgacaactacgacgacgacgcgggcgactccgctaccagcaacggggtggcgaggtacgacggcgggcggagccccctccgcgggtacgggtacggcggccggagcccgctgcactacgctgcggccggcggcggcggagccaaggacaagtacttcggtatcgctcttcctaaggtcggaatggtgtggactcagctgcagcgaatcgcactccatcaacaggaaggtcaacctttgcacctccagttggcgttagtgtgaggcctctacaagctgtggaaattcccaatgggacacctagggatagaagggctgtttatcccgatcctactttcgcccagtccacacggtcacgggactcacatgacagttcaacactgacagaagagcttgaaatgctaaaagatgagaatgtaaatcttctggagaagcttgggctagcagaagagaaacttagacaatctgaagcccggacaacagagctcgagaaacaggttgctaatcttggcaatgggttatctatggaagtaaagcttatgaaaaggagggaggaaatgcttgtaagaaaggagcaagagataagaaaagctcttatatccaagaatggtaaaagcgaggaactcaccactcttcagcaacagctacagtctgcaagagaagaagcatcggctgctgtgaagaaactcaaagaagctgaatccgaaacacaagagttacatacaatgacacgcaggatgatcttaagcaaagaagaaatggaagaggttgtcatgaagaggtgttggttagcccgttattggggtttggctgtccaatatggcatctatccagacatctcaatgtcaaaacatgaatactggtcttcacttgcacctcttccatttgagtatgtaacatctgctggacagagagccaaggatggatccgaagcagaaggtaatggtttggaagacgtggacaagcttgttcatgatttgactgttacagcaggggaaggcaacgtagaaaccatgcttgctgttgataaaggacttcaagaactagctttcctgaaggtggaggatgcggtactttttgcccttgcccaacaccatcgtactaatgttgctggagcagctgatccagatattaaatcatctggggatgaaaaattcactgaggcatttgacctaagcaaggaggaggaagaagatgtacagttcaagcaggcttggctcatatttttctggaggagggctaagaccaacaacgtggaagaagatattgccgaggagcgattgcacatgtggatcgatcgacacggccagcaaccaacgtcacatgacgctgtggatgttgagcaaggcatacacgagctgaggaagcttggcatcgagcagctcctgtgggagctctcccgccacgaggcgaaccttgccaaagacagtccatctgatgtcgaggacctgacctaacagtaacagcctgagcggacgacggtggccatctcccacccaaatgcagtccaggctccagccatatatttgtatatcatacagataactgggacatgtaaacattttttgtggttttggtttttcagctttgtcacaaacagttcactgactctccccgatgtacataacttccaccccccgcttttgttgtttgtaaaaggcagcttgaggtgtgca

SEQ ID NO: 30189 - DNA, 4199 bp, Zea Mays
ttgagctcgaatttgggcaaccataacaaggatttggataggagcaaagatgatattcaggacagcttggattatattggaggcagtgtagagctgattactcaagatgagagtaataaagataattgtgatcaggacatgcaggaagtgattgtgcagcaagaggagcagccggttgaaatcgctttagatcaaagcaggactgatagcattgttttaccgggatccagagaagatcggtggcgttctctgagctggctcttaggagcaaggggacggtttgtgctcacttcagagcgtccaaacaagaagaggaagctcttaggtgcagatgctgggctagagcaacttgtacttctgccatcccctgaaggcgaggctggttcagtctgtgatgagaaaggtgctctgaaacctttcaaaagggaccctggtccatccatagatggaggaaaccaggaatttgtacatttattttgtagtctctggagaccagagttttatgttgaggacatggaatcaatggagcctgtcaccaatgtagtagatacccaagagaatcaatcaaaattggtgtgcagcctttgcaaggtcatgcatggtgcatgtgtccgctgcagccatggagcatgcaggacttcctttcatcctatatgtgcaagagagttcaagcttcagattgagatatgggggaagtttggtcatgataatgttgagatgcgagcattttgtgcaaagcattcttctgtcaaaagcatcagctccatacagaatgacaaaagtgtatctgaactggactccgctcaagttgagctgcatgatggaaagcctgttactgggaaggaacagcaagtgagatttacgcgcagtaacaaggacaaatttgtgaacagcacaattactactagttcttgtagcctaaacgaagcacatacaaatgaagtggctaccatttcacccgttcttggaaggactcaagaaacacaaagtgcagatatggctgctgatcaaccctcttcagatgggaatcttatgagcgattctggagatgtttccggaattcttagaaagtcgaccaaggaaagattagtcttgatgacattgaattggagccaagtcttcgttcagaatcagtggaagctgctttccagccggagacaactgcatactcccctggtttgaagttgaaaatgatcaagtggctgcagaactctgagtgtgcaccttctgttcaggttaagtcatttaaagagggttcattggcacaaggtacattgcctaggagtgaaagcaagaacttaaccactgctacatttcaatcaggacaggaggaagccatttcatcgattgaccatcattttctggaaaatgataatgctaataacggggatttggttcaaaatggctttcatagatgtcctgatcctgatgtaaatcagatttctggccgacatttgctcaacatggatggttactgttgctatattcatcctatcattgagaaaaggttgcaaggtttgtggagtaatagtttggagcaaactatacagaaaaatggttatcatggcaaaactgccatggaagtctgtaaagcacaatcatcagatactctcaagctttcacctgatgacgaaatagaaggggaaatagtttatttacaatccaggctacttgatggtgttgtttctatgaagcagagatatgtccgtcttgtatcttgcagaagatttgatactcaaggttgtccagaatatttcttatgagttggattctttcaataaaagaaaatgggatcatatcattgtgaatcagtttcttcgtgatctgagagaagctaagaagcgcggaaactcagagaggagacacaaggaagctctagctattctggctgcaactgcaccttctgttacaccgacctcacgaaacacaacagtgaggaaagagacagaaaacaatgtgacacctgctaaacgagagaacatgccaagaagcattactggatcctcaagaattggccaactatcttcttcaccacaagcaaaggatttatcattttccaacagtgatgtctcagacgaaactaactttggcattttcaatctggcgaagttctccaagaaaagtgctcttccctgtgatatatgcatgcgatgtgatacaatattgaaccgtatttttgtttgctcgagctgtaaggctactgtacacttagattgctaccagagtctggtgtatcccactggcccatggaaatgtgaactttgccatgagatgccctcagattctgttacctctggtgaacaatcagaccaaaatggtccgaaagcttgtttggtgcaatgtggtttatgccatggaacatctggtgcttttagaaagactgtgaagggtcaatgggttcatgctttctgtgctgagtggctgttggagacaacattcagaagagggcaacataatccagtcgacggaatggagaggcttcatcacaaggataaagatacatgctctatatgccaccgctgtgttggtgcatgcttgaagtgctgtacattagattgtcaaattacttttcatccttcatgtgctagagatgctggtctttacatgaatacaaaaagattgggtaatatgttacaacataaagcatactgttgtagacacagtattgaacagagaaaggcctatagtcaacaatatggtcctgatgaaatcaagggcatgaaacaaatgagggttgaactggaactattacgtttcctttgtgagaggattgttaagagagaaaaagtgaagaaagatttggttggatgtgcacatgacatacttgctgcaaggaggataactgccgtctcttctttgtggacttcatgttatacttctggacctggagcaagttcagaatctgccactacttctgttaataacaaatcatatggtggaacaattcaaaggtctgatgatgtcacagtgagattggaagatgtcacagtggacagtacagttaccaaaaaacatactgtcaggttttctctgcataacagggacactgataggaacactgctgacagttccacatcaacaatatcatacaaacggaagttggatgatggggaatcacttgcattcaagagtcatcccggaacaccagctactgccttgttggagtcacgggatgcagaaaagccaatagataaaaagggatatgtatcaaaaggagcttgtcatggttacttctcaccaagctttgttgaagaacaagacccctccagagagatatgtttacactcgccgcagctccatgtccaaaaggaagcaatgtagtcagcatgtagttcaaagacctggtggatgacagcaggcgaagtcgcttcttgggatatctggataataatattcttggaagctcgatgcagaaaaggacaaagtaaatacagcaagcggggctggccattaatcatgacagccgcaggggctggcgcgtggccgcactggaatcggaaatttggtgcaaattgggctcttcgaagatttgaccaattgagcccatgtcaccttggagtccaacatgcgctgaattcattcactaatttagtcaagggcaggttttgtgaaatacgcccaattgccagtatggcgtcttcacattatgtcgaagaaggaaatcgattgagttatgtgtggtgaaagaaagtgggtagacaaatattactgactggtgaaagctaccaataggccatccgcacattaatgaccatgtttaggagttgttgctatgtactaacagaactgcatgttttgttgtgtggctccattctgacttgtgaaatgaactctcggtaagtcatagggcatttcatgtttgtacaggcatgtaggtttagctttctggtatgtagctaaattcaaagcatcatcttgtagccttatgtggttaaccagatctttgatctattagttaatttagtaaaccaagagctgccttgtgttcgtatgggttgagtcgggcttttactgtattgatatctattattagcgtgaaggctgtttattgccgatgttgagcttcataagcattatctttttttaacaaaacacagtgcttgttttgtgaatacttgtaacctcgaatgtgtaataaatgtagcacgtctattcaactcaatggctcaagtgtcatatatggtcaaccttgcatgtcc

SEQ ID NO: 30190 - DNA, 3372 bp, Zea Mays
gcggtcccctccccgaattccccaagccaccatgcccgactccgctgatcccctccccacgcaaccctcgccggatcccgacatgccgccgcggaagcctctcgctggcggcaagctcaagaagccgctcactgacaagcagcgcgctgccgcggagcagcgcctgtcccacctccgcgcccacctcatcctgcgctccctcgactcccccgctggcggggcccgtgccctaccgccgccgcaggaggcggcgctcgatgccctcggcctgctcaatttcttccgcctcgacctgcaatctgacaccccgcgccccgacctcatcgctccgctcgtcgcctactacgacccggtctgcaagcgcagcttcgtccgcggcgtccgtgtcagcgtctcgcgccaccacatcacccgcgcgctctgcctaccctcgaagcccgcctccgcagcgccggccccagcagacgtcgatcccgcagcggtggtccctgccgttatgcagctcctgcaggattacgtcctgctcccgtttcaggggggcgacatgtgcatactgccgcaggaggtggccgccgcagagcagatggtcagggagggggcggcgcatagggttgattggggagggctgatctggggcctcgtcgagaaggagatgctcgagctgcccaagagggaagacggggtgtgctactatgggccgcacctgcagaggctcatttattccgaaaagccacatctgttggagctggtggaggaagggcctgttccggaggcgtccgctgatgtggagatggaggatgaggatggtgatgtggatttgaaaagcaagaacttggtggaactggagccgggggatggggatggagaagcgggtaacgatgtcagaagcgagagcttgaaggattcagaattggggaatgctggtgcaaggaatgatggtttggacaagttggagttgggggatgctgttacaaggaacaaggtcatggaggagttgggtttaagggatgtagatgctaggaacaacagtatagaggaactagaggtggtcgaggaagatgcaaggagcaagagcttgaatgaatgtgaggctgtggatgccataaacaacaatatagttgaattggatgcggtcaatgaagatgcgaggtgcaaaagcttgaatgatgaatcagagctggttgaagaggaatttaagagcccaagctttgatgacatgaacaccgtggatgagcacgtcaatggcacagacacggatggattatgtttgggatttgtggaagttgaagcggtgcctgctgtacatgaggcaatgcctgataataatgaagaaacgacagaggaagcaccagcagggggtgctgatgtggcaggcagtgataatgtggcagtgcctacagatgtggattgtgaagaacactatgttgaggcagtagttgtaacacaagaggtagtggctgttgcagaggagttgggggatgaggaggccaagagggatgaagagaaggatgtgatgggattgagcttgggttttaattctaccaatggttatggtgctatggatgtggaaaaggaaaccaatgttgaaagtttggatgaggacgagagtgacagtggcaatgaagaggcagaagagtcagaggatggtgcatttgacgttaatgatggagaggacatgaattggagaattggggatgtcaacgggggtgagggaatgacacattccttacaacgctgtaacacatttgggggcatggagtttgagaacctgaataaaggagaggatgagatgagggatgagttaagatttgacgattttcctgcaagggcatctttggaaaggatgacatcatcaaacctcctccaagccatgaactcaattccctcatcatacaatgtatcagagaatgtgcatgatctgccctctggggatttcttggctatgggggctgatgcacataagagtggagtggacctgggaccagggagctcatatttatttgggaataatggtaagaggaatattgatgatattgatgggtacaatggcaatatgcaggtgcaagaggggtttcctcggtctaatcagcagaagaggatgcggcatagtaacagtagcaacatatcacctggatcaggctttttcaatgcaagcttttcggtgcctatacagaacttgatggttgaggcaagcaggctctatgagcagaatgagcaaaaacttcagagtttgcaatttgagaagcaacattggtctgacatgctgcagcagaaggaagccattatccaatccctaaactcagctcgttttgagcaacataataagtatcaagcggagcttagacgcttcgagcatgatctgaatgttatggctcagttggtcactacatacaaaaaagctttaaaacagacccgggcttcttttgatgagtacaggaagaagttcccttgcaatgttcctctttatggtgatgttgcttgtggcggtggtcttgttcttagtgtgagggagttggagaaaaggcggtgtgaggagcagcagcaaaatattgccatggtaaatggtatgattgaaagattccagtacaaatggctctcaaagtttgaagagtggggactttctgtcaattcactgtggagcagaatggaaggactctataaggagattgagcttctcaaggaaaacagaagagcaagatttgctaccccagctacagaggaatctaccctagctacagaaggatctactccagctacagaggaatgagctccctgacaatcagagttgtgatgtgaagatgactccctattactgccctaccctctgctggatgttttggtgtcaacgagcatacaagagcaattgtggctgcctggtggtggtacatactgtagtaagataaatagtttcgcttgtaactatggttgtttcctcatgtagggacgttttgattattagtgcttaatttaggtgcatttagggttccgtaatctatatcaaagtgtgcgtttcatatccttttttatgcactaacgacgtgctcatggcctcggaaagccatttaaagactgcatatgctagtggcaccactaatccatactgccttcagcttaactgctggtagtagcttctgcacctgactagtggcctagtgggcggatactgctaggccatgaacaagtttcaggtatcatacgcgatgcactagctgcatttggctctagtggtttgaacgctaatctctatattgggagagggagtttccagtagggtctctgattctaaatcttaattccatgtgtaactaaataatagaatttaggaaaattgattccaattatcaattctgtacacggatatctacatccaaa

SEQ ID NO: 30191 - DNA, 1489 bp, Zea Mays
tgcctctgcttctccccacgccaccgaggcagtccaggccaggacagggtgccacaaaaccaaaaccaaaccccaccaccactccgcacgagatcatttcgccagctcatcgccaccgccctcctccgctcccgcgtctccttcccctcgtcgtcgtcgggttggtgggtccacctctcgccgtgccccgccgtcgacccgcctcagaatcaaagataagtcaaaggaaaggtcggtatgcgccggtggttttgctgcacgaggtttaatgcttcatatcgtgaacatgaaaatgaacgtcccatcactccagaggagaaagaaggaaatggtttttctgttaaaagtgatcccatcaaggcaccaccttccattgaagtccctgaattatcatttgaagaattgaaagaaaagaccgacaattttggttcaaaggctttgattggtgaggggtcatatggaagagtatattatgctattctggacagcggaaaacatgttgctgttaaaaagcttgacgcttcaacagaccctgaacttgataatgagtttttgacacaggtatccattgcctcaaaactaaaacatgataattttgtggagatgcttggatattgtgtggaaggaaatcagcgtctagtggtctatgaatttgcgacaatgggttctctgcatgatatcttgcatggaagaaagggtgttccaggtgcacagcctggcccagcacttgattggatgcagcgggttaagattgctattgatgctgctaaagggctagagtatcttcatgaaaaggtgcagccttcaatagtccaccgggacatacggtctagcaatattcttctgtttgaggactacagagcgaaaattgcagatttcaatctttcgaatcagtctccagatatggctgctcgtttgcattctactcgtgtccttggaaccttcggctaccatgctcccgagtatgccatgactggccagctaactcagaagagtgatgtatatagctttggggttgttcttttagagcttctaacaggaaggaaaccagtagatcatacaatgcctagaggtcagcagagtctggttacatgggcaacacctagattgactgaggacacagttaaacaatgtgttgatccaagattgaagggagaatatcctccaaagggagttgccaagcttgcggctgtggcggcactgtgtgtgcaatatgaatctgaatttagacccagcatgagcatcgtagttaaggcactctcaccccttcttcaacataaaccgcaaccaccggcagccactactgacgctacagcaccgtcagatgcctgactttctcaaggagctatgaatcatgaatgttaagagaaccattttctcttcggagagctaaactgtgcactcatgctgttcgttggtccatctgtttgttcatcaaatcgagcgtaacgttaccgaaagatggactggtcaatgactaaggaaagct

SEQ ID NO: 30192 - DNA, 2349 bp, Zea Mays
tcaggatgcactttctacccttttctctctgtacattcgtgatcttggccctgctgttgaatttggagatgcacactggcttggaagacagggtattgcattagcgctccactctaccgctgatgttttggccgctaaagatcttcctgttgtcatgacatttctcatctcacgtgccttggctgatccaaatgttgatgttcgtggtagaatgattaatgctgggatccttattattgataggcatggaaaggaaaatgttcctttgctatttcctatttttgagagctacttgaataaaagggcatcagacgaggaaacatatgatcttgtgagggaaggtgttgttattttcactggtgctctggccaaacatctatcaaaggatgatcccaaagttcatagtgtcattgagaagttgttagatgtccttaacaccccatcggaggcagttcaacgtgctgtctcagattgtttgtccccacttatggtatccaaacaggaagagggtcaaactcttgtttctagactcttggatcggatgatgaaatgtgaaaaatatggtgagcgacgtggtgcagcttttggccttgctggtgtggttaaaggatttggaatttcttccttgaaaaaatatggcattgctgcaacattgcagaaaaatttggaagacagaatgtctgcgaaatctcgtgaaggagctttacttgggtttgagtgcctgtgtgagaagctcggcaaactatttgagccgtatgtcattcaaatgcttccattcctacttgtgtctttctctgatcaagtcctagcagtgcgtgaagctgccgagtgtgctgctcgggcaatgatgtctcagctcactggtcctggtgtgaagcttgtccttccttcacttcttaagggtctagaagataaagcatggcgtactaagcaaagcagcgttcaacttcttggtgccatggcatattgcgctcctcaacagctatctcagtgtcttccaaagattgttccaaagttaacagaggtactaacagacacacatcctaaagtccaagcgtctggacagacagctctccaggaggttggaagtgtcataaagaatcctgaaatttctgcactagtccctattcttctgtcagctctgatggatccaaatgcccacactaaacactctcttgacatccttcttcagactacttttattaactccatagacgcaccatcgcttgcactgcttgtgcctattgtgcatagaggactgagggagagaggtgttgagactaaaaagaaagctgctcaaatagttggaaacatgtcttctttagttacagaaccaaaggatatgatcccatacattagtttgctcctaccagaagttaagaaggttctagtggatcctatacctgaagtgagggcagtggctgctcgagctctggggtctcttataagtggaatgggtgaagaaatcttcccagatcttgtgccatggttattagatactctgaaatcagataatagtaatgttgaacgatctggtgcggcccagggattgagtgaggttttagctgctcttggccaagattattttgaccatattcttcctgacatcatccggaactgttcccaccaaaaggcttccgttcgtgatggacatcttacacttttccggtatttgccaaggtccttgggtggtgttttccagaattatctgcaggctgttcttcctgctatattagatggtcattacctctgttgcttcctgctattgaggatgggatcttcagtgataattggcgtatccgacaaagttccgttgaacttcttggggatctcttatttaaggtcgctggaacttctgggaaggcaatccttgaaggtggaagtgatgatgaaggtgctagtacagaggctcaggggcgtgctattattgaagtacttggaagggagaaacgcaatgaagttcttgccgccatttatatggttcgttctgatgtcagcttgactgtccggcaggctgcgttacatgtctggaagacgattgtagcaaatactccaagaactctgaaagagataatgccagtacttatggacacacttatttcgtctcttgcatcatcttcctccgaaagacgtcaggttgctggaagatcacttggtgagcttgtaaggaagcttggtgaaagagttttgccctcaattattccaatcctgtcacagggactcaaagacccaagtgctagcagaagacaaggagtttgcattggtttgagtgaggttatgggcagtgctggaaaacaccagctattaagttttatggatgaacttattcctaccattcgtactgctcta

SEQ ID NO: 30193 - DNA, 1266 bp, Zea Mays
tggaacaattcatgcatggtattgtctcagcgaagcatcttttgttcttgtggacctatggtgtagttagcagaacatctcttaaaggcaagaaaaaattgcacaaggaaaagcacaagtctcgatctgaaagacctcaccgccaatctaatatcaccgaactggataaaggcaaaaaacgacctgcacaatcctccaagtccgatctgcctaataaaagatctaagaaagaagggtcccaagttccttctaggaaaaaggatactggtggtaggatggcaaagaaaaatggtccctgccaagataagagcatttgtactggccagaacagctctctatgcaaagacaatagggagaagcacagtcatgctacctttcagaaaaagtgtcacgctgaacctctcaacaacggtccatctggttctgggtggaacagaactgctggcggacacagccaattcgaaggaagacacataactccagcttctcacgtcgaggcaaatcatggaaattttgtttctgtacagcatccttgcgtcgagaggcttcaacggcctactcaatcgcgtgaagttgctctggctcaccccggcggcggccatccatacgtactgtccagcgctgcaatgggcctccgacatcaaaatggagcaacggccggtgtgcacgcaccggcatatttcaggggacttccactcagtcaacagagggcagcatttccttcggccagcacgccgcaaactgggtaccatcctcatccagaagaattatttgttgcgccacacttcagatatcctagagggagtgctggtttccgccgataagacagtctggttggcgcctgctgcattttggtaactgcattggtggtaagacatgcggtcttcggcttattttcattgatgccatttcgttgccatgactcatgagcaaggagtatttgagtcttacctaatgtgcagagaggccagaactttgtttcatcttgagataaagcttccttcgtatataagaaaaaggaagatcctcacctcaattgaaggacttgattttctttgctttttttggggggcaggatgtgatggaaaaacagtgttaccatcgagtcgcataatcagggctctgcgtgcttcagacgggggaagggtttaatacaaacatgaatgctgcttttttttgtcgatctgagtccttagctgcaagattgacgcgagacatcggcttccaatatatgtacaccaatggtttctggaatttgagctagta

SEQ ID NO: 30194 - DNA, 2294 bp, Zea Mays
attatacattaatattcagtactatgtgtggtgttgtgctttgataacctcaagtgattattcaaggccttcttgttgtatctgaaccctcccaaaattgtggcaattggcagtcatcatttatagtttcttttttatttttcctttggtgtcaagcaacttccagtaacacttaaacctctctccttgtttgtgatatttaaattgcatgaatttgaatcgcttcaatgaatttcttatgatagcaatgagtcctacatgtgatacctgcttaataaggttcttgggatcgcacaattgagatttgaagatgccgaagtgagatcagatgaaatcatcaaatagaataggatactgttgaggataatggttcagcgatccaggaagtccctcgtgaaaaagtgaatttctcagaagaacttttgagcagcacatcatttgctcgccaattagtggatcagatgactctagcaaaggcatatgtcatccttgcaaaagagcaaggtaatcttcagcttgcatgggagcttagttcacagataaggaattgtcaaagattgctatctgaaggggcagttaatggaagagcaatcactaaagatgaagcccatcctataataagccggctagcacggttaatatacaaggctcaggactctcactatgatatcagcacaacaatagtgacattgaagaaccatgccttggcactagaggagcgtgcaaaggcagcaattgttcagagtgctgagtttggccagttagcagcagaatccttccccaaaaatctgcactgtctaactgtgaaactgacagaggagtggcttcggaacccgaagcataggagtcactcagaggagaaccggaattccacacgattggtggataataatctgtaccatttctgtatattctctgataatgtgctggccacttcagttgttgtcaattctacggtctccaatgcaaatcatcctcaacagcttgtgtttcatgtggtcaccgacagaatccattttggcgcaatgtcaacttggttcctcataaatgacttcaaaggttgtactgttgaagtccgctgcatagatgagttctcgtggttgaatgcttcttcatctcctcttgtcaggcagctatctgaggcggaaactcagggttactattactcagctggttccaagaatcctgaaagagaaacaaaattccataatccaaagtttgtttctctactgaaccatttacgtttctacattcctcagatacttcccaacttggagaaggtggtgtttcttgatgatgatgttgtggtgcaaaaggacctgactcagctgttctccattgagttgcatggcaatgtcattggagcagtggaaacctgtttggagtcgtttcatcgatacagcaagtatctaaatttttcgcaccctaccatcagctccaagattgatccacatacttgtggatgggcttttggaatgaacatttttgacttgatagcctggaggaaggcgaacgccacatcgttgtaccattattggcaagagcaaaattcagatctattgctctggagaacgggaattcttcctgcaggccttttgacattttacggcctggtggagcccctagaccgcagatggcatgtcttgggtcttgggtatgatgtagacatagatgaccgtttgattgagagtgctgctgttgtgcactataacggaaacatgaaaccgtggctgaagctggctattcgccgttacaagtatatatgggagcggtatgtgaatatctcacatccgtatgttagagagtgtatgttgcaatagaaagcctgcaaatctctgtatgttcttggatggtgttgaagctgtttcctcacacgaggctgctttcgagcacattgtatgagggaaaggttcagaggtagtagaatatataccagtcatcaaagaagtcaactgttaagtttctttttctttttgggttgggggaagattcattttgagatgaaaataattcctttgcagagtttacatacaaatctggactgggaattttagcagtctaaccagatacatctggatagatattgtaaaagagatacagttggatcaatgagcattttttctttgagatttaggaagtgcaaactgtgagctcaactgtgcagggtcagtggtgctgcattcttttagtactatcttgttttatactggcgaagaaggttctgcctccctacttgtataagtaactgttttagtttgtgctctccatacttaaaggctctgtttggaagcgac

SEQ ID NO: 30195 - DNA, 5490 bp, Zea Mays
tacctcattggcaatagtggagtgatgggtaacattcaaatagaagtcccatagcacggaaaatgcagaagaaacagaatcatcggagttgtaaggattacaccatgaggcaacagaactaacacatcgcattgaccaaatctgtgaattatgaggtggaatttgtcaaaccaaagcaactgtgtgttgaggtgtacttcaaaataagtaagaacaggtgtgtttggaccagcacagcggcatcctcatccgtccacagacaccatgtaatcctcacttctccatccagcttatggattgtaccttgctcccacctcagaccagatccaaacacaacagagaagcagatcccatcaatggccacctctgcctgtgctgcttgcaccggagagatccattggacaatgcagatactaattcatccaatgtttacaagttgtccgactaatcgcgattagtcgggctggtcgcctgttagttggcgattagaaggacgacgcgaccagatttccaagtcgtccgactagtcgtcaacctgggtgattaatcgtccgatcgttaggaatttggtcgcccattgacgtctgcgcgtttatactgggctaatgggcttaactcatttttttggcccatctacagtagcaacatatatgttgcctctggtcagccgaaaccctacccccctgcctaacacaaaacctgccagccgccagcctttgttcaggcgtaaaccctactgctctctggcattgtccagctccagtcatcggcatccagtggtccagtcaccggcggctgctccaagctccagtcatcttctctggcagcgtctgtagcccaccggcggcatctccactctccagtccagcagaccaacatcagtcaccctgagtcgagatgagctcgtcatctgaatttctgctttcagttctgcacttctgctgctactaagttcagtagctactgttttcagttttagttttatgcctatattactttcagtttctgttttacacttttactgaattactgctactaattatgcctatattactttcagtttcagtatgttacaactttttaagagtaaagactcatataatgtcactctattgcagtattgcagaaatgcagactagcattattgcttatatatagttatatacatatacatatgtccataaatctataggacgactaatagacgaccagaggtcgaccaggaccgattaggtatcctaatcgtcgccctaatcgcgattaggcgcctggtcgctgctctagctcgaccagctggtcgcccgacttgtaaacaatgaattcatcaataacctccctcggtagtctactagcatgttatggttgctgcctcggctttgttcggagcttttgtaccatcgcaaggacacaaccatgcaaatccagccaaaaaaaggcaccatgttgtaatcagcaaccttacctcgttccaattcgatggtccctggcaaccatcccatccaagtgttgacatggatcaagcatgtgccgttaggcgttagaggagaaaacccaatgaaagtatgctttttttatcttacgtttttgtcttgcaaagtattttagatgtttttccaaagtgattgcttgagtttgactttatattctgattttttatgcaacacactccttatatggatacatcatacatatcattgtcttagaaatggatatgtatggaaacttgcactttttgtgtcatgttaataaaggtaagctcaccaactttggtaagcggtaatcatatttatgttagaattatccatacaaccctattaggccttgtaactgtagttgggctaggctcttttattgccgaccaagctacccagcgctgcatatacgtagatatgaattatatcgtatttgttagaacctcgttagggttttggcttagtcctcttgtaattacctatacacccctatgtaatgggcctggcccaactactacttggtctatttcatacaactttcaactctgattagggttttccacatggtatagagctaggttcttttttccttgcctctctccccctcccacctccagtcgctggcaccatgcccccgccgctggcacctccctgccccagtcgagcccccccccccccacctcccctctcctcccatggaacacgctagcagcccctacacctagttgccagcctgggcgcgggctcgtccgcgtctgcccgctgctgcgcagcccacccagcaatcccctcccggcttccccacccaccgtgcccccctcgccgaacccgcgtgagccgaactcgtcgcgtccttgtcggcctctccgctcgcatcctccgcgttggtcgtggctctcgccaccatccaggctatcgtggtcgcctctcaagagctcaagtgtgttgcgtccctcgcctagaagcaaaagcacgctatgggcgccgccttgaccactcagctggccaccgctcaacgtctcctcctcgagtgtgccactacgccacccccggtggcccccgaggctccccacgcctccaggctcgacgccgacactatcgcctctctccacgctcaggacgttggtgtcaaaatatacggtcccttgtgtccgttgtattggacccggtgtcccctcactactactgctagcgtgatcaagtgctcatcacactccgtcagttcatcctcgcataccacattctcgacgacggcgttgccccgatgtccccgtcttggctccagatggacagcgtggtcctctcgtggctcacgagcactctcaccgccgagctccgggacattgtccgtgagcacgagggcatcgctcgccaagcctggctcgccctcgaggaccagttcctcgggaaccgggaggctcgtgcactccacctcgatgcctcgttttgtctgttccccagagggacctgtctgtcagcgagtattgtcgtcggatgaagggcatggcaggttctctatgtgccctcggcgagcccatcaccgaccgcaccccggtgctgaactttctgtgtggccttagcccccgctacgaccaactgaaggctctcatcaagcggaacatactcgtcccctctttccacgtcgtacgcaatgagcttctcctcgaagagctcaccctgaagaccgagacacccatccccgccacgaccctctacagtgcgccctccggtggtcaggcgctctctacgagccaggcccctcgtccttcgtagacaggggctcctactcgccctccaaccgtcaccacctctgggtctcctcgtctggctcccatcaccgacgggggtcgccatccccacaaggacggccgcaggagcgatgggtccaccagaggtgggccctctgatcgcggcgacggcccgacatggtcgtcgttctacaacccctggtccaggaccatctccatgtgtccgggcccgggccacaggtgcccccttacagcgtcctcctcagtcgtctctactgacgatgccaccctacggtgtacctcaggcggctccggcccactcccgcccctggggggcccctaccctgacaccctggtcctcaatggctagagggtgggacccagcctccgccttcagcaccatggcgatgacatcgcccccctctgattgggtggtcgactacaacgcctccttaccacaccacctcgactgtggacacgtttatctcgctcccatctcccacatccctcccacccctcctccatcgttgttgagaacggttccactctactggtcacctcagtaggtgcctcagctctgtcaggaccgttctgtctcaatgatgtcctcgtagctccccatattgctcataaccttctttctgttcgtcggtttaccaccgacaattcttgttctattgagtttgacccgtttggtttatctattaaggatctagccaacaaggcccttctcgcccgatgtgacagcttgggcccctctacacgctccgaccatcctccactggcacgtcctccctgcttgtcctggcctctatcacctcctccaccacttggcatcgttgcctcgaccatctaggacctgacgtcatgactaagttcaccaatagtccgacatttcttgtagtaggggacattttgagggtccgtgtcatgcttgtcagttaggctgttatacttgtctcactttaagtaccacttctagggctgagcaggcttttgatcttgttcattgtgatctttggacatctcctgtattcagtctttctggctataaatactaattggtgattttggatgatttctctcattttatttggacttttccgttgtggttagagttcggcacctttcccaccctcactcttcttcgcctgggtctccacccagtttcgtcgtacggtctatgccctttagtgcgataacggccgagagttcgacaactccgcctctcattctttctctctcccactacgttcagttgcgtctctcgtgcccttacaactcatccaatgaacggtcgggtcgaacgaatcattcccaccacccccaacatgatatattgcctcctcttccaggcatctctccttgccagctactgggtagaggcccctagccactgctactcatctcctcaatcgccttccctctaaggcagtgagtcaacccaccccccactttgcattgtatggcaacgctccccacaagctctcacctcaatctctcgttgtcttttcctcggttaccccctgaccacaaggtgtaccgctgccttgacctcctcacccacgcatcatcatctctcgccatgttgttttcgacgagaatgtctttcccctcgctagctcctccccgcctaccgatcttgactccctcctcgactccgaccctgtccttcctccactcaggtccaccccacccactctttgtgcgatcctgtcgatcccgttcgcgccacacgcgacgctgacacctccgctcgcgcctttaattgcgccatgcgcggccccgcttcctgcgccacctctggcacgcttcgccgaccccgcccacatctaccgccgtcgcgggcaaacactccattggacccaccgccccaccggctcgcgcgtgtgccgagctaccgatgtaccacccgatctccatccaccgtgaccccgaccacgttcacccgatggtgactcgccgcgccgccgaagttcttcgccacgtcgatcggctgattttgacggtcgatgctactccggacacctatctaattccctccgtctgtcgccctcgccgacccccacgggtgttgcgctatggaggagtacgcggccctgctggctaaccacacttgggacctagtgtcgcgcccactaggcaccaacgtggttaccggcatgtggtctttcgccacaagttgacctcagacggctcgctcgactgttacaaggccagttggagtccttcgaggcttcacccagtgccccagagtggactatgacgac

SEQ ID NO: 30196 - DNA, 1771 bp, Zea Mays
tttttttttgccgttctgcttttagggttagcggcccgccccggtgatcgcgggagaagggagcatctgtcgccggagtttggtgagtgcctggtctgccctggtgccctggcaccctgcatcggctgtcgttgtatttgtcttcccacgaccgactcagagctccctgatctcaagatctcgagagctgcgcgcggactttgggttggagccgtgcgtatcgatccaactccatccgccgggcaaatttgagtcaggaggaaggatattcatcggcgcttctgaattgggaggacgcagcgcatacgagattcgatgagattttgttgggacacagtttcgccgtgaattggttaggagccgatttggcaacagggaagctctcgaatgggagatccagcggcggcagtggcggcggaggggagatggtgagcggaagctttagccggagcacatccgcgcggctcacgtcgaggggtggagtcgggagcccgcgtgtctcgactcctggagccgtgcaccggaactggtggccgccggcgccgtcggggccgtcgttcgatcgcgtcgtcttggcctttttcctggcctccgtcgcgctcgtgctctcctgcgctctctacctctacgtattccggtacttgggccggagccgtgtggtcgcggagttcgccggcgagaatctcgagtcctgcgacgtgttcgacggcgtctgggtgccggatcagaggcaccccttgtacaacagttcgcagtgcccatttgcagagagggggttcaattgcctggccaatgggcggaaggacaccgagtacctcaagtggcggtggaagcctcggggatgcgatttgccgcggttcagtgcccgggctctgttgcagtggctgagagggaagagggtcgtgtttgtgggggactccatgagtcgaacgcagtgggagtccttcatttgcatgctcatgacaggggtggatgatccagagacggtttatgaggttaatggcaaccagatctcaaagacaatccagtttttaggagtgagatttgagtccttcaacctcagtgtggagttcttccggtccgttttccttgtgcagcagatccctgcgcttcgccatgggcgcagaagggtccgtgccatcctgaagcttgataagttggatggtttaagtcaggaatgggtgaactcagatgttcttattttcaactcagggcattggtggactgccagcaaattatttgacatgggttgctattttgaggctggaggtgtgcttaaactgggaacatccattaatgctgctttcaaaatggcattggaaacttgggcttcatgggtgaaagagagaattgatttaaggcgaacacatgtattcttccgtacatatgaaccgtctcattggagtggcttaaatcaaaaggtgtgtgaagtaacacaacaacctaccgctgaggccaatggaaatgacaggagagaatttggggatatacttgctggtgttgtggcaaatatgagtgtccctgtgacagtactaaatgtgactttgatgggggcctttagaagtgatgctcatattggactttggagtcatcctaataccatactagattgcagccactggtgccttccaggagttcctgatgcttggaatgagcttgtattttcgcaccttttgactaatggttggcgagtgccggctagctgactattgacatggactgcacatctccttggacataaagttttgtactccctccgtcccaaattaaa

SEQ ID NO: 30197 - DNA, 1452 bp, Zea Mays
atggctgcggcggaggcgcggcgccggtcagcggtctgggccctgctgccgctgctgctgcggctgctccacccggtcgcgctcgtgctggccaacaccgaaggtgcgttcgtggccgggcaattctcagggagggcctcggtgtctgtgtttggttatgctactcagagtgatttgaattttaacaatatatttagcattcatgatgctcatctccatttatcacgccaccatattgttcctcaggtatgcaagcaatttttatttttgatctttctccttgttagcttgattgatctttctccagtatttatttgtgggcttggttaatctaggttccatttagttgttgaattagttctaaaatcatagtggaaccaaaataatgtgtggatatttgcaaacgagtttctcttgaagtcatggtgtgaggaaaaaaggtaatgtccttcacattattctggtttagtataccttgttgattattgacatatgttggtcatgttggtgctccactaccttgttcgtatattaaggcatgctacatttcttaactacgtaccaatgatgtggatacgatttttgcagcaaagctatttttatcctggtgttatcttatctattctcatgacagtgaatttagttttattgttgacctcccacggttcttgacttcctaacatcggccactttatttttagttgattgactggcatgagggtggatacttgactgttgatttaccaatgtctcggggagaagttgtcattgggggtccaaatgtaactaaaggctatttcaaggatgaagctaaaacaaatgatgattgtgagcccatatatggagaacattataatcaatactgatcctttccataattactgtgttgcgcttgtggcagctgcacaaattgagctgtaaagctaggcttcccaacaaggagttaaaacaacaattcctcaaatttgtgctagaagcaagaggctgttaaagaagtgctctttagcaaaggtttcgtcattcttgcctaccgctgtccctttgcttcagaatacggtgaaacagaagtccttcattggctcttctcatcttggctcacatgcagtacttgaataccagtttcttcctgagcagccaagtgatgcatatgagaggggaagccagttgcgcttctatgatgctctagcagaagtgttaaactcaaggaaagaagaacaaatgtagagggaaatggagagacatgatcacgagagatgtaatgaagagaggttcatgcgtgaaaggcaaaggaaagaagaaaattccattagcaacagagacgtatacttataactattatggtagataaaaaatgttacaatgtctctcttctatagaacgaaactgggatatcattcattgatatatgttcgattttattcaataattattatataattgtgcaccgtcgca

SEQ ID NO: 30198 - DNA, 1068 bp, Zea Mays
gaggaatgataatattggtggccgacaagtgggggccgtgcactctctcctacgactcccacttcctctaccagcctagggcctaggctaccaccccagtgcgaaggaagtcagagctctccgcctccgccggcggggctcgatactgatgggtgtcttcgggacctcgcgtcctgcctccgtcaccctctgcgccttcctcacattcctcaacctcttcgccttccttctcgccgtcggcgccgagcgccgccgcagcaccgggaaggtggtgccggacgagtacgacgagcggtcctactgcctctacgacaccgacgcctccacagtctacggcgtttccgctttcttcgtgctgctgctccagcaggccattgtcaccgccgccacgcgttgcctttgcttcggccccgtgctctcctcccgcggctgcgccgtcaccgcattcgtcctctcctgaagcctgcctcataggaggatcggtgaggaacgcaaagcacaccaagtatctaggctactacacgaagcacgacctggtgtcgtgcgccaccctccgcaagggagtctttgcggccgccgctgcgatgatgctcgtcaacctcttggcgtcccttgtgtgctgctggagctactcgaaagccgcgacgggcgggttcatgaagcaccagaatgaggtcggcgtgggcatgacggattacggccttgacaggggcgtttctgggccctgagtgagttgggtggaaccttgttggcgtctgtgctgcagtaggcgtctcacctgtggtgtaatattatggtcgaaatgtatgtgagtgaagttccgttctttctctacggtcggtgcgaatggtataccagaactgtgctctggaatgtgctagtcagtgatgatgttgtatggttcgtgattttatatctgtgaaaaaatgtggaagcattagctgtatttgctgctgtgctgtgcacgacaccggcacggcttcctgttcctgctcacggtggttgttgtaaagcagcagaaatatcagaaagcgggacttcaatgttcttcgctgtcattaaatcatg

SEQ ID NO: 30199 - DNA, 4003 bp, Zea Mays
aaggtaaagcagggagggaggggtctggaaaggaagcagggaaggaaaggaagagaggaagaaaacggacgctccgagggcaagtggtgccggatttttgtcagtctcctccccacctagtctcttgtatccaatacaacctttgccttcattgccgcagttccgtttcacatcccatcctctccatttccaccccctcccatggcctgatttccgagcccccccgccattcgccccgcccccgaatccgccgtctcatcgaacgcccggtgccgtggggagaagcgaggctccggttctttgtttcttggcggccgaaatataagggaatatgattgacgatgaggaaagccaagggattaagaaggtgcatttcagggattcgttctcccagcaccctatagttacctacaagaggcgtcggcagcagaagccacagacgcagcagcaattacggcaaccaccgccatccctacagcagcatccggagccacagctacaggtgaagctggagccaaagactgaagatgtgccggaacagcagtttccgatattgagagcaagggatattggctgggagcatgctgtggatcttgatggaaataaaagacggtggcaatgcaagttctgttctctatgtcgaagtggtggtgtaactactttgaaggctcatctcattgatgacagctgcccaaacgttccaaaggaaatttcaaagaaagtatcaaacttcattgaagagaaaagagcaacacgccttcttttgaataattatgtctttaatgttgatgaggacttcaacacaatacttcaagaagggactgtagaatatgtaaatgaacaacaaccttcaagaaaggctacatatgtgcaaacattatctaagtgtgctattaatgagatagcagcgggaagcaagcaatgtggtgcagaatgtagtggccagccagttgagcattgtgatcagcctgaagagcagtgcacaatggattatggcaggatggatcgattgactagcaataagaaccagattttggacaagaatactgagaattcaaaaaatacaaagatgttgaaaccatgccggaaaagtgagtttaacacaaggaagcacataattattgttgataaaattgggaggcattggaagtgtagatactgtggcatggatgtgtatggtaaaaagtttcagctccattatcatctagctggtgcatttcgtcaggctaagtgtccaaatgttcctagagaagtttttgcaaaagcaagacagcatgttctgacaaagaaaatgctaaaaaagagtaaagctgagcaacagattccttctagtccacatattcttgcccaatctggtgaagaacggcagaacaatgatccattttgtgggaatcagtctcaactgtcaataaacaatgaacctagggaggtacacaattaccctgcagtgctaagggacagtgcatgggaacattctctgatatatgagaaagaaaacggacactggaagtgcaagtggtgcagtattgagggtgatcatggtttaactagattgatgtggcatcttgttggatggcagaatcgacctcagtgcccaaatataccaaaggatgttgctgaaaagatgaaggatcaaatgatgtcaaagaaggagcagaaagcgagatcaggtttgtttgacggcaatggctgttgtgaggtgttgtgctcttctaatagttcacaacttgatcagaaccatctcactgcaagaatacatgacagatgttcttcccaggcttttgaccatgctaacagtgaattaaaaggatgcaacatgttatccaatactattctttcacaacagagttccaatcctcaggtgcatcatgaggatcctcaggtgtgtcatgagcaagagaggaaggaggttgccacctcttcagaacctggctgtgagcaaggtcagaggatgcagtggcagtcgcaaaataagccaatgatggaaggacctcatgacaatggattatgtggtgacacaaaccagttggaggaacaaaaaagtggctttggaattagtgactgctggaggtatgttttggatggacaaatgcacttgcctgatgtacaggagggtgctggaattgggacatgcatccgtgatgctcttctctatggttgtgctgaatttggcacagtacctgacaaaatggaaatggattgtgataaaacagtggatgcgaacactgctaagtgccagaatattcttaaggatgttttaagatcggagaactttgctttgttgtgcagtgtactctgcagaactgtacatcaagatggggaaagaactagatattttgattttggtgtgattgattcaaggatgaaaaatggaaattatgggcctgaacctgaattattcgtccatgatctgaaactgttatgggaagatcttaaagtggctggtcaagatattgttcacctagcaaataatctatcaagcctcacagaggactcctatgaaaagctggttggaagagagagaggatcagatgatgatgagctcaatgaagctgtggtggccaggtctgaaccgaaaaacctagttcaaccaaatgcatcggtacccttgacctcacaaggctttaaccaattattggatcaacccgggccttctgatccttctgttgtatacaaggacagtatctgcaaccgatgtgggaaagtagcaggagctggtagcgttctcaaatgttacaggtgcatgctaccttgccacatttcatgcattgaggctactggttcacccatttcaactggaaggtggtgttgtaaaaactgcagcgctggcactaaggaaccagttgaaggagacatggtcttagcccatggcaatccaaattgcttgcatgaaagttgtgtcgtctgcgacagacttgcggcctgcaggtctccaaaatgtgataactcaagagcattggttatttccagcgtggacccagagattgatacatgttactcatgcaagatatgtggaggcaccgaagaggatgagaagaggttcttgatatgcggcaacgtcctctgccgatacatgtactaccacattgggtgcctcaagtccatgcagatctctaccagtgtagagaggggcagcccgtgctggtactgcccgtcttgcctttgccgagtttgtctgtgtgacaaagacgacgacctgaccattctgtgcgatggttgcgacgaggcttaccatatctactgcataacacctcgccatacttcaatacccaaggggcagtggtattgctcatcgtgcagcgtggagagggcagaagaggggatgagacagtacgagaggaggacgctgaagctccaccggaaggaggatgctggactacaaagttggaattttgatggtgtggacctgctgctatctgccgcggagcagctcaggatagatgagcagctggagactcgtacagattagcgtgttgcacctacactctggtccttttgccgtgctaaagtgagtttgttgtttgaagagcagaggcctgcctcaggatcagagctcgggcaagggcagttaacaaaatttgctgcagtcctctcacgaactgatgaaaatacaaggatcttcaaacagcattcgccttttgagatgcgtgctatatgataacatgctgtaggatatttgtttcgtttatctgtctttttgctttgttgcacttgcacctgcttgagaagatacttaactcgatacaccttactggtatccaaactgcaagggatgttcttaaattcaaggaaaatctccaatttgagagagcaagccgtctttgaaaactgcctcaggtttttgttgaggctgttattatgctttgtggcctgaattattttagacatacaaacttattgcttcacgaccttcttctcaagtcggtctagatacttcttggggcaacgtcgaatgctatgtccttcatccttgcagtagtagtaaacactatttgctttgagg

SEQ ID NO: 30200 - DNA, 5234 bp, Zea Mays
ccgatgcggatgcggatgccgatgccgatgccgaagcgcacctgtctcttctccttgccgaccctccacccccagccgaagtgaggccaccaatcacacagccgctccccccgctcgtcctcctcccctgcccctgcctccgcccccgcccccgcccccgccccgccacgccagcatttggattggattgccggcggccgagtggaggcggagatccatccggactccggtgagtccgttcccgctgccgtgcttgatccaggcacgcatgacatcacatcagttcagctagatgcctgaaggagaagttcagtagcacaccactacctcacaaaacagctcttctgctcgtgcaaaagtatccagggtccagatgggttcagacaagcagattggtagcccacgccaactcttggaaacactaaagatgggcagagttaggactatcctgacacatacatacccgtaccctcacgagcactccaggcatattatgactgcagtgattattgcctgtctcttctttatatcgtctgacaacatgcacacgctcatacataaactggataacaatatcaagtggtggtccatgtatgtttgcctcattggcttcttctatttcttctcatctccttttcttggaaggaccattcagcccagctactcaaattttaaccgctggtatgttgcttggatttgctttgcatccctgtaccatcttcctagcttccagtcaatgggggttgatatgcgcatgaacctctcgcttttcttgacaatatatttctcctcagtgcttttcatcattgcctttcatatcatatttattggtctctggtacattgggttggttgcacgcttggcaggaacgaggccaggcgtatggacaattctccagaactgtacagtaatcagcattgcatgttgtgtgttctacagtcattgtgggaatcttgctgtgcacaagagcaaatcttttggtagtagttctgatcccaatttgcttgcttttcttaaaaatgaaaacgggagtacctggatatcaaattttctccgtatgaatcagttgaaagatgagatatgttcgtcttggtttgctcctgttggatctgcaagtgactatcctattctggcaaaatgggttatctacggggagttagtttgcagcggatcctgtgctggcccatcggatgaaatctctcctttgtactcattatgggctacatttgttggcctctatatcgctaactttgttgtggagagatcaactgggtatgcctttagtttttcacactatacgtactaaggtcctgtttggaagcaacctagtttttaagaatctagtttggaaccacgtctgttttcataaaccagtttcttaaaaattgggtgcttccaaacatgacctaatattgctgaattagttgttgccacgtggaggctactaatatttctttctgataccttaagctctctctgtggatgactagtgattgtgtgggaaagtgaactgcttgattgatattgcatagaggtggtggttacatatatagacacataacccctaaccctaatgggccgacaacccaacagtggtgtcggcccacccacacgcacagacaatctaacatccccccctcgtagtcgcaacgggggcactgcacacgatgggactggagtagaagccgaaggtaggagccgacgggttgatatccccccacagtcgcaacgtcgtgagggtgtgaatgttgcggctggagtagacaccggtgtggactctgagaaggtgatatcccctagatgtcgaggtagccgaagtcgaggtggtcgtggtcgtggtcgggagacatgcaacaatagcttgtggttcgggaggggtcgacgttcgagcatcaacgatcggcaacgcgatacaacaaaagagcaccaacaaaccaaccttcttgcttcttcgatcgtccggacgtcgaggagccccgctagggaggccggcggcagcgcacgcgtctgcgccagtcatggtggccgcgcccgcgacagaatagaaggggtaaaggcggatctggtcggaaaggccacgtcggcgacagatccagccaggaagatggcaatccggccaaaggaacgacagatctagccgggaaggtcgaagcaacggtgaatccggccggcggcggggcggacaactgcgcctgctctcgtgctcgccagaggccggcggcggaggagcggagccggcgagtagaggagaggggacgccgacggccggagaggagaagaggccgtgtggtggcctgcatctgggatgtggccgcccctaggagggaaggatgagcctcctgggggggctgagatggcggctgtccctgtgggatgctggcggctgctgcggggttgggcgagaaaacactaaccctaacctagtctggtaccatgtaggaaagtgaattgcttgattgatatcacatagaggtggtggttacatatatagacacaaaaccctaaccctaatgggccggcagcccaacagtggtgccggcccccccacacacatagtttaacagattgtgcaattctaattcttggttatgttccgtaaatacttcaggtgggctcttacccacccgtcaacagatttggaggatgagaaactgaagaggcatatgaaaccagattttctggacatggtaccttggtattcagggacatcagctgatttattcaagacagcatttgatcttatggtctctgtgactctttttgttgggcgatttgacatgcgcatgatgcaggctgcaatgaaaggaccaacaggcaacactccaaatgatgacctattgtatgaccacttcaatgaaagggaagacctttggtttgactttgttgcagacaccggtgatggagggaattcatcatatacagttgcccgactgttagcccaaccatctattaggactgttatcggtggctctatgcatactcttccacgtgggaacttacttattatcggcggagatcttgcgtacccaaacccttcatcatttacatacgagaggcgcttctttaggccttttgagtatgctctgcaacctccaccttggtacagagatgaacatatagctttggataagcctgagcttcctcctggtgtatcaaagatgactgaatatgatggaccacagtgtttcataattcctggaaatcatgactggtttgatgggcttcatacttttatgagatatatatgtcataaaagctggttaggtggatggtttctgcctcagaagaagagttattttgcattgcatcttcccaagggttggtggatatttggtcttgatttatctctccatggcgatgttgatgtataccaattcaagttctttgctgatgtttgtcagaataaggtgcattttcttcgcttgctcatcttttttttctttaaactcctttcatttccttatttttggtttcacgtgggacaacatgcgttagtaattgcttctagtgttcaaccatgtatgccggttattattttcatttacagtaaacacaagaagagttgttgcatattctttgtagtcttaggctgataggctcttagccccatttgctttctacttggaaggaatccctcttacggccttacctttccagaacatctcttggaacttggaagttgaaggtaatatttacagatttaattgattgacttcaatactaaagctgtgcaggttggagagaatgattctgtgattgtagtaacacatgagccaaactggcttcttgattggtactggaatgagactacaggcaagaatgtatcacacttaattcaggaatacctgaaaggaagatgtaaacttcgcatggcaggggatttacaccattttatgaggcactctgccactcgatcagaaaagaataattttgtgcaacacttgcttgttaatggatgtggtggtgcctttttgcacccaacacatgttttcagaaactttgagaggttctctggaaccacctatgaatgcaaggcagcttatccatcctatgatgagtctactgggattgcattgggtaacatattgaagttccgcaaaaagaattggcagtttgacatcattggcggttttatatacttcattttggtgttttcaatgttcccacaggaggagaagagctattataggcggcctccatgttttggcccatttaactgcagcactacttttaatgttgctgctggagttgggcattgaaatttgtattcgtaaccatttattggcaacttcaggttatcacactctgtatgaatggtatcgatccatggaaagtgagcattttccagatcctactggtcttcgtgctcgtttggagcaatggactctgggactgtatccagcatgtataaaatatcttatggcagcctttgacgtccctgaggtcatggctgtgacaagaataaatatatgcaagaacggaatgatgtctctttcgcggagtgttctgatcatgtactacacttctgtgtttatctatttctggattttctcgactccagttgtttctctcatatttggtagttacctatacatctgcatcaattggttccacatacactttgatgaagccttctcgtcgctgcgcatcgcaaactacaaatccttcacaaggttccatgttaagaaggatggtgatctagaaatatttactcttgcagttgacaaggtcccaaaggactggaagttggatccgaggtgggaatcagagggacgagggcctcatcagctcagccatgaccggaagcatccaagcaagtggaggtcagcctcatcaactgaccctgtgagatctgtacgggttgttgatcatttcaccatcgaaagaacaagaaccccagatatggagccctcttcctgattgtgcagcccttactattataaggagttgctactgctgctagaaaaattaacaataactagcttcaacacacagtattgtttttgtttccacatccagccaataggtggaccgaggtgatctgcccttgtcggcgtccccgctttactgacctcacctgcagcattgtaatctgtatagaaagaaaattcacctgctgcctattgcttgtattcaatcaaaggaactctaaaaaaaagagtgttacagaagaatgttttgagaaagcaaagggatgaatcgattcatcatcatttactaaagattgattctat

SEQ ID NO: 30201 - DNA, 5610 bp, Zea Mays
cttgctcgccccgtttaccccccctgcctctgccttccccagcctcgtatcatcttcatcactttctctctgccccaggccagtgcccacctctcgcagtcctgtacctaccaaccacatcatattcgggtccgtgagcccgtgggagaccgcgcggcggcgacgacgaggcctcgacctcgagcgagggttggtggacgtcgacgagctagggttaggcgggcttttgagcttaagcttgggttgggggggcctgctgatccatggacggggggaccggcccgggcgccgaggtgctctctcccggcgaggccgagtggcccccagagctccgcctcccgccgctgccctccgtgccggagcccccagggccgcccccgcccgcccccgcctccgcttcgctgcgactgcgaagcgtcggggtcgcgccccatctgcacggggaggtctttgatgatgacccgcagttcctcggatcgatcatgggggccgcggccccgcccccgccccagcagcagcagcagcagcccgccgccgcggcaccggtgaagaggaagagaggcaggccgccgaagaacagggacggtgcggcgccggtgcctgcgccggtgaagccggggaacaagaaggacgaggaggaggtctgcttcatctgcttcgatgggggcagcctcgtggtttgcgaccggaggggttgcccgaaggtgtaccaccctgcgtgcatcaagcgagacgaatccttctttcggtgccagggcaagtgggattgtggttggcacatatgcagcagctgcgaaaaggcagtacagtacatgtgttatacttgtacgtactctgtctgcaaaggatgcatcaaacaaggcaaattctttggcgttagagggaacaagggcttctgtgacacatgttatggtactatattattgatagaatccaaagaagatggtgcaaaggttggtgttgattttgatgatatatatagctgggagtaccttttcaagttatattggttggatctgaaagggaagcatttactaacgattgaagagctaaaaagtgccaagagccattggattgttcctactactgctggtagaagagagaaagaggagtcatctgatgaattatatgatgcaagcaatggccaagatgctacttttgacatttcgtcaaagaaacgaatacagaataactcttcaggaaaaagaggacaaaaacgcaaaaaagacggcaacattacttcaaggaaatgtggaatctcaattaacagtgctggaggcttaccaaatggatcaacaggtgaagggatggccttggctggtgacaaaaactgggcatcatctgagttattggaattcattggacacatgagaaatggtgataattcttatatttcccagtttgatgtccaggttcttttgcttgaatatataaagcaaaataacctccatgatcctcgcagaaaaagtcagattatatgtgatgcaaggcttagcaatttgtttaaaaaaccacgtgtcgatcattttgagatgttaaagcttttggagatgcattatcttgtgaaacaggcttcaacaccgaatgcagacagtcaaagagcaatttattcagattcagctcaagtaaataatggaggacataatgagttggccgatacattaggttttgataggaggaaggctcataagaagattgaaagagaattgacaattaatccagaagattatgcagccattgacatgcacaatatcaatctaatttacttgcggcgcagtgtgatggaggatcttattgatcaggttgctgcattttctaacaaaattgctggtgcttttgtgaggataagaatttctggtcttggcaacaaggaagatatgtaccgactggtgaaagttcttggtacgcataaagttgcagagcgatacactgtcagtaagaagacaacagattatgctcttgagatatctaatttagaaaagaaagagattatcacaatggatacgatttcaaatcaggatttcacagaggaggaatgcaaacgattacgtcagagtatgaagtttggtctaactgcccggttaaaagtggtagatgtctatgagaaagctaaaatcttccaatctctgcgatttaaagatttgcagcttctgaacacccctgaagaaaaggaacgcatgattaatgaagttccagaagtacatgttgattcccggatggatccaagttatgaatccgctgaagaaccagagtataagaaagctgttgattggaccatgcatcggaatgggccagatctattatttccaggaagaaaagggacagaattgaattctgtggagaatcatacacaaaagagtctggatacaagcagtctacctacagaggacgtggaccatagatcaggtgcaggaagtaacattaatttaaacaacatggcacctgagcctgcatcacttggaattttatcaaatgacactgagccagaaaaggtttggcactacaaggaccctaatggaaatgttcagggcccgtttactcttttgcagttatccaagtgggcaagttttttcccacgcgacctgagagtatggcttacatttgagagtgaggagaactcactactgttgactgaagtgctcccaaagcagcagaaagattttattcagctttcaacagttactaccagtgataaatcaatgtgggcaggctctggtcaagatagagttaactcaaatgcaaataactcttcctcccctatgggttataacatggtctatccttctgcattatctagcccgtctgctgagtgttatgatccaacaaaagatctaaagcctctgggtggaacttcgccatcacgatctctgaaagatgctcatgctttgcatgaggttcagaatcaggttaactattcattcacaattctatcttcaactggttcatatgcaccacccggttctcatgatggaagggtttcaagagacagggttgatgaatggaacagtagtcaggacaatggtggtatttggaggccaaccatgaattctagtcagaagactaatgcacagcagcatcctgatggttgtactgggaaggacctaatgcaaactgaatctaaatgtagttcacatttggtctcagttcttacttcacaacactctgagagagaccctgccacttcccttagtactacaagttggccggtgttcagaaccaggtgccagcaggaaggttcttcatggacttcagctacaaatgctggagctcatgaccttcagttatctattgctttagcaaagccggagacctgttctccaacaaatcctgtggaagacagagattcaagttctgcttctgctttgtcttgtcagtctggggctcctgtctgcgttccccaaccagatccaacatctacatctaattcaaggaagattgatgcaaccatggatcagcatagaacatgccagcctgacacatcaagtgtatcatttgatcttcttcatgagcctaaaagtggctcactcttttccttgaaaactcaagatcttgagtttgagtaccctagtcctatcccaaaacaggaggggaaggggatttctgtgaaccagtcaggctcaacatcagtagcacatgagaatttagctacaaagacatgtgtccgcgcacctactagcaaaattgatagcttacaaccacttaaggaaagatcacattcgacagatagggactcaatcactcaattagagcatctgtttgaagagaatgtgataaagagaaataacaaagtggtcaatcctgtatctgatgctgaagggattgctgtatcagatgtgttggaatccttaacagaacaagattgtgaaaaatgtagtatacatggggtagcgccttcacaaaaaatggtgccagcttcagctgaggaagatcaaccacaatgctccagtcctattgcattgtccccttggggtgaaccaagttactatcagggtgaagctgttgattctgctctatggggcgtccaagatgaccctggtaatgacatgtggtcaatgccttctccaaaacctggtttccagccctcatcaggtcttggagctgatggcaaagacgcttcatgcatcatagaggaggcgagagcggacccaggagatggtgcttttgtcaaaacattaccaacacaaggggagaaaaagatggaacatggaaattcaagtgcctcaggttctggagtgtcagaacgggtaaaaccaaaaggaagcgctgcatcaggtccatctctagatgggagcacaaaagttatgggttggcaactgccgggctcatctctagagggcagtgcaaaagtttcaggttggaaaccaccagtcttatcacttgaagggattgctaatggttcaggttcacaagcatcgtgtccttctacgcaaaggggcacaaaatcttcaggttggcagcgatcaagttcatccccggatgggagcagaaaagcctcaggttggcaacagtcaagtacatcaccagaggggagtggaaaagcgcatggctggcaacgatcaggatcttttacccaggggggtacaaaggctgcaggtcggcaaccctctcgttcctgtacagatcggattgcaaaagttgatggctggcaacgaacaagttcatctccggagggaagcagaaaagcttcaggctggcattcgtcgggtcgtgacagctcaaagatcgcatccagtgccagcgaaaaccgtaaattgtcttctagtcaccaagcgacgacaccaacagggaggcactcgttggcaaagagacagggaagcagcgacaagggtgctgctggttgggacgaggctctggggaactcttcggaagcatcgaagagacaacagggaaacagcgacaagaatgcaggctcgggagtggctctcggaagcaacaggagctggcatccatcgtctggtaaccctagtcggggcggccaggggaatcaccaacatgacagggactctcacagcggtgattcgcggcggggtagctcgaactacccccggaggtccgacaatcgtcatgaccatggcagtggtggttcgtcacgaccctcgtcaagagggcagtcccagagggggctatgtaaacactacgagagtggccactgcgggaagggttcgaaatgccagtacctgcaccggtgatcgccgtggccgtgtggaagcgggacccctgtttgcctggccgtcctcacatttttgtatagcaggatgtggtttcgtcgtagtcagtatagtagaacgcttattaaccgtgtcggcaccactaagttggtagtagtacatatctttcagggcaggagcatgactaaagtaggatttgtaagttttattagagccactgatggccttggataaagattctccgctttttggttcgggaatgcacgctttttgttcagctaaacggagttgtgggcttctacaaacatggattttctcgctaggtcagagtgctgtgctatcgtacagaacagctgcacgtccgagtggtcacggacgaggcgcgtgcaatcgtccgaatgcctacaaaagagtggccaccggcgtgtggcagacatgtgaa

SEQ ID NO: 30202 - DNA, 1866 bp, Zea Mays
aaggaactaacgaacgaacactgaaattcgctagtaatccaccttaaacctgatttaactagtggttgaactgctgctcttgactgcagtgcagatatgtgaactgatctggtaccgtgagatctccgcttgtggatctttgatcggtgcttggttggactctaaaatctaaatacgcatcgtgcacggtcaagtcggaaatggaaagcgaagttggcaccgaaatggaatttaaggtgatgttgatgccacaacgctggcatgtattgcattttcctgtcccaatttacagtccctggatatcagcatggccaatagcgccgccaacaggatatctggggatgagctatctaggtttgtttcggagaagcgatctctgtcagttcttaaattagatggctgcagcagtcttggttttatcaatatcagctcttcaagcctttcaagactttggatgtcaggtctttcttcccttaccaaagcggtcatgaactgccccaatttgaatgagctctccctggactttcccaaacaaaataatgattctactgacctggttgctctaatggatagcctaggccgcacctgcccgaacttgaggaacatgcacatctcatcagaccgcttgtgcaacgaagctgtgtttgctctagagagtgctaacctcaggggcatgtgcatgctctccttggttctaggttcaaaaataacagatgcagctgtcgcatcgattgttcgttcttacgcgagcttggagctgctcgatttaagcgggtctggcatcactgacaatgggcttgggatgatcagcaacacgttccctaacaccctaacacgtctgctccttgctctgtgcccaaacatcaccccatgcgggattcaggtggctgcagcacagctgccgctccttcgcctcatggactgtggcaagagcatatgtgctaacccccagcctgaagctgggagatcatactctggcgatctaactgatgggatcaaattctgctccaaattacctgtccagagaaagcagcaggctacttgccagaagctgatcataaagcatagcgccctgaagaagctcagcctgtggggctgttcagggatcgatgccctgtacgtgagctgcccggagctggtcgagctgaacctcaactcctgcacgaaccttcatccagagcggctgctgatccagtgccccaagctggaagacgtgcacgtcaacgggtgccgtgacatgctggtcggagccatcaggaaccaggtccttaacgagttcgcggccgcggcgccccgggtgccctgcaagcggctggccgacgggtccaagcgcgtgcacgtgccccactacatggtagagcagctggaggaacatgagaaatggggcagcaggccgcggaagagccagtgcaccgttcatctcacctaggctaggcgcctgttaagtgagaggccctggtgatcgccggcgtcaggagcttgcggcgtcgatacagcgagactagatggaaatggtacggatatttttcgatatccgtcggttatgaaatggtcaaaactttatatggataatctatatctaaatccaaatatttgaaatctgactttctgaatccagctactcaaaatcgtcagatttgaagacaaatatagacatgtcacatatgttcccgcatcaaatttcacacatatgatgatttatttagtgtacagaaagtaatgtcaatctttattatgtaatgaagcatctatacaaaataactaaataaaaacaaagttctgttttttgcattataatccgtacaaccattatatgtcaattattgaaacattcaacaattactggtagtactgaaattaactcga

SEQ ID NO: 30203 - DNA, 3449 bp, Zea Mays
ctccggtagaactagaagagagactaacccagctgcggcccgatccgagtccgggggcccaaggcgcgggaggcgacggcgatggacgcgcgcccgcgacggcggagggcgcgcacggcggaggaggcggcggcgacgctgcgaaaggcgtggtgccggctgcggctgtccgcgcgcgacccggcgcgcgtgccgccctgggacgccgtcgtgctcacggccgccagccctaagcaggccgcgctctacaaccgccagctcgagcgcgcccgcgccctcggccgcttcccggcctccaccgcggccatcgccgtccccgaccccgacggcgcccgcatcggctccggcgccgccacgctccacgccgtcgctgcccttgttcgccacctcgccgcccaggcttccaaggaagagatcggcgaattccttctcgaaggcggaaatggtggttcgggggatgaggccacgatcgccgcggcagcgggattcatggcgaagaagcacgtgctcttgcttcacgccgggggcgacagcaagagggttccgtgggcgaaccccatggggaaggcgtttctccctctgccttacctggccggggacaatcccgatggacctgttccgctcctgttcgatcacattcttgccatctcctccagtgcaaggcaagctttcaacaaccaaggtgggatcttcataatgaccggggatgttctcccgtgctttgatgcctccaatctatatcttcctgacgatgctgcttgtattgtgacggtgcccaccactctggatgtggctgctaatcatggagtggttgtagcatcaaaggacgctgggatcgatcaggagacctactctctttgcttggttgatgatctcctgcagaagccgacagtgagcgagcttgcagagggccatgccatcctagatgacgggagagcattgcttgacacaggaataatagccgcaacgggtaaagcatggcaggaccttgttacccttgcacattcatctagccattccgtggttaaggagctcatgacttgtaacaaagagcatgggtaccagccaagcatgtatggttgcggaaccgtccattgggcaaggaactgatttctgctttaggaaaacaaaggcttttcagcttttgttcatatgacttttcatttctacattttggcacatccgcggaggttcttgatcacctggcgggttcctattctggacttgtaggtcgaaggcatatgtgttcactaccagagaccactgcttgtgatattgcagcgacagctattattttgtgtacaaagatttcttctggagtctcaataggagaggatacattggtttatgattcagtactttccggtagaatacggatcggctcgcaatgtattattgtctcggtgaatatacgtgagtttgatggtagcgcttgtttcacattacctgatcgacattgcctctgggaagtacctttggcaaactctgcggggagggttttggtttactgtggtcttcacgataatccaaaagtttctattcagaaggatgggacgttctgtggcaagccatggataaatgtcttggaagatcttagaatccaggatacggatctgtggggttcaactagccaggacaaatgcttatggactgcaaagctttttcctgtcatgtctctcccagaaatgcttaatgtgggcatgtggcttatgggatcagaatgcgacccagatgggagaatagcttccttgtggcaaaaatcacagaggatcagcctggaagagctgcatcgtgctattgattacagacaactttgcaccgattcgagcaagcatcaggcaaatcttgcagctgacatagccaaggcttgcatgaactatggcttactcggtcgtaatctgtttcaactttgtgaggaaatgttacaaaaagatacatgtttagcagtctatgaagaattactttcattttttccaagtcacagtgaacagtatcctggggttcttcctcagagcagagaatatcaggtcaagatggatctgcttagagcttctggagatctttccactgcatgtacggtggaagagaaagtgtgggcttccattgcaagcgaaactgcgtcggcgataaaatatggatccaaagagccatctagcggcaagatgtcttcaaaccatgaaagcttgcatccaaggaagactgttgtagaattaccagtccgtgtggactttgttgggggttggagtgatacacctccgtggagcttggagcgtccaggttgtgttttgaatatggcgataagtttgcaaggaagccttccagtcggtgctatgatagagacaacagaggaccaccttggagtaaggatcgaagacgacgctggtagacatgtttatatcgataatctggcatctatttcttctccattcaaagaaagtgatccattccgtctcgtcaagtccgctcttattgttactggaatccttggccacgagatattgtcgaaatcaggcctgaacatcaggacatggtcgaatgttcctcgtggaagtggactgggaacttctagtatattatcagctgctgttgttaagggactgttccaagtgatggaggacgacgaaagtgacgacagtgttgctagagccgtgctagtggtggaacaaataatgggcacaggtggtgggtggcaggaccaaattgggggcctatatcctgggatcaagtgcacccagagttttccaggacaaccgttacggttgcaagttgttccagtgctgaccactcctcagctgatccaggaattagaagaacgtctcctgattgtattcactggccaagtaaggctcgcccaccaagtcctgcagaaagtcgtgactcggtacctccgccgcgacagcatcctgatatccagcatcaagaggctagcggaactagccaagatcgggagagaggcgctgatgaacggtgagctggacgagctcggcggcatcctgctggaggcctggaggttgcaccaggagctggaccctttctgcagcaacaggcccgtggacgagctgttcgccttcgccgacccttactgctgcgggtacaaactggtcggagctggtggcggtggcttcgcgttgctgcttgccaagaacccgagctgcgccagagagcttcgacgggcgcttgaagagtccgacaccttcgatgtgaaggtgtacgattggaacgtcgccatgccacggtgaagagtagctggctcaaagggattgtgtacactgtattgctaccatagacgctgttatcattttttgtgtgtcagacgacctagggtggtggggtggttgtgtgactctgatccaaaagtcggctgttatcaagtgagcaggctgtcggtttggttggcttttccaacgcggtcatgccaaaaaaatcgctgatccaatgtctcgtcaaac

SEQ ID NO: 30204 - DNA, 6581 bp, Zea Mays
cgcgccgcacgggtccgaactcccagaaaagccgaggaggcagcctcgttgtgctcctgctgctgctccgcccttccgaccgattgaggcggcgcaaagcaaaggaaaaccccaggccgcaaccctcgcaaacactcgagtcctcgtctcttccgcaccctcctcttcaactccagccgccttcaccgccaatcaggatcaggaccaccaatgggccatgacacttggaaatcctatgcttgggccatgaccaccaatgggccttcgccgagcatcgagaagcctccgcgcccgccgcacgccggaggaaaggaagtccccccatccccaaattcccaaagccaacaccgccgagaaggacagagactggaagcgcaagagcaggcgccgcgcgtgccggcgatggagagggacgtcgtgctctccgcacccgaggccgctgggtcctcgtcctcccccgcctcctcgtcgtactcctccttcgccgagaccagggtcatctgccgcgtgtgtcagaagcagttcgcgcagtacacttgcccccgctgcaacgcccggtactgctcactctcgtgctacaaggtgcggcctcctctcgcttcgtgtgtgtgtgatctcgttgcgcgctcgtcctgtcttagggcttgtagaataccgttcgggtatttcattcactttgttactctcatgcccgggctgccctctgctgacgcccacaaggtgtttgccgaatcgctcactgacttttgaagcttttggacaagaaatcctctgattcctgctcaaaatgtgtaattatccatgatataaactacgacttacctctgaatcatacaaaccacatgccaattgttcactttggcctctatatttggtgatctgcgtggaataatgcattttgttttgctgtgctgggtttaacaaatatacatttagattaaaggagcaatccaaaaaagttcaaagaaatttatatgtcatagtttccatgttctcccctttagtgaatctctcctaatagtttaatagttgggttctttgctgacctaacccagcataatttgaatcagctgacatctgaagtgacagtaagttgtaaaaattcgtcaaagctagactctaggtaacatgattttttttacttatatgctgtaattcacctctagttgctggtctgagaggatcagtatgtctgtatgacactttcaatcagttcttgaaagaaactgcttgtttattcatgcacgaaacaagcttctggaagtaaactgctttgtgttggaaaccctaaccctaaccagggttgggagatgtatttataataggagtacttgggcctaagcccattacacaatcagaacccatcacattaggcattacaactctaacaccccgtagtcgaaactctagccacaacagatgttgagattggaccaaaactcctaaaacactgacgtagggaggcccttggtgaagatgtcggtgatctgagaagtcgtggagacatgacatgaagaacacgcacatccccaacgacgacacacttgcggacaaactggaggtcaagctcgacatgcttcgtgcgttggtgctgtacgagcttggtggagaggtacgtggcgctggcgttgtcgcagtagacaagagtactgcacattagcggactttgcagctcctgaagtagctgacaaagccatgttgccttggctatgccgttagccacaacacggtactcggcctcggcgttggagcgggagacgactggctgcctcttcaacgaccacgagacaagactgtcgccgaggaacatggtgaaactggaggtggatcgacgtgtgtcaggatagccggcccggtcggcgtcgatgtagatggcgaggtcgttggtcgcagatcatcgaaggagcccgaagtcggaagtgccttggaggtaccgcaggatccgcttcatagcagtgagatgtggctcctgcggggcgtgcatatggtggcacacatgttggacgacgtatgcgatgtcgggccggatgaagatgaggtactgcagtgccccaacaagactctggtagctggtgggatcagccaccgggggccgtcgttggaggaggccttgccctgagtgtccaccggagtcgtgcaaggcttacagtcagccatgctagcgcgatcgaggatgtcgacgatgtactggtgctggtggagaaacaagccctgggaccggctctccatggtgatccccaggaagtggtgcaactcactcaggtccttcatcgcgaactcctgctagagggaggagatgatacgccacaggagttcgtgcgaggaggccgtggggacgatgttatcgacatagaggaggctgtacgtcgtgtccaggccacgatagaagacaaatagggaggtgtctgccttggtctcgaagaagcctcgtgagagcaataaggcgacaaagcgactacaccaagctcggggcacctgcttgaggccgtagagggaccagttgagcttgcaaaccatgtcgggtagggatgaaaatggtcggaacgatatttattcagttatcaatttttggtcatttttctttggttgcgaataaataggatatataatctactatacaaatttgtattcttgtttttaacattgagcttttagatattcataaaaggtaaaccacaaattcatcctatattttcttaaatgatagatgtaaaattcggtatggattcagaaacaaattcggtaatgtttcactttttgttgtagagagcaaataatgcataaaacaatttatgcaatattttattcttatttctaataatgtgcttcataacataataaaacatcaacatcaaattttatacagatctattttaaaataataaatttgttctaatagttcggattgccactttcatccctgatgttgggtgagccgggtccacagagctgaccaattgagtgtaatacaccgtctctgtcggagtgccatgaagacattcttgacgtcgagctgatgcactggccaagcctgtgagagagccggagtcagaacactcttgatggtaccaggcttcaccacggggatgaaggtcttgtcatagtccaccctgggacgttagggtgaagcccacaggacccaacgagccttgtgccgatccaaggagccatccaccttcagcttctgttgaagatccatttcccggtgacccctttggcttgtctgtgaaggatcttgctaccaggatccttcacacgcggtgtgacagctccgagccgctgtacactattcgcctgcttgcctccaattccccgacctccacgctgcatgccttgaccgctgctacctcatctatcacttggcgccaccgccttggccaccccaggcctgatgtgatgtctaagttgtctagcagttctatcatctcatgtagtcggggttcttttgagcatttgtgtcacgcctttcagttaggtcgacatgttaggctcccttttccctcctcttccagagcaacgagcaattttgatctggttcattgtgatgtttggacatcccccgttctcatcatttctggcaataaatattacttgctcattctggatgattactctcatttcttgtggacttttccgttacgcttgaagtctgatatgtttcccacactctctaacttcgcttgggtttccactcagtttggactcaccatccgggctgtccagtgtgacactgggcgagagtttgataactccgcgtcctgtgacttcttcctttcacacgacgttcagtggaggatgttgtgcccctacacttcttctcagaacagcaggattgagcgcatgattcgcaccacaaacaacgtcatgcgctccttgttgttccaggcctcccttcccgctcgctactggactggccactgctacctatctgctcaatcgcctccccaccaaggcggttcatcaccccaccccctactttgctctctttggtacctctccctcctatgatcaccttcgcgtgttcgggtgcgcttgctatcctaatctctatgccactgctctcataagcttgcatctcgctccactcgtagcgtcttccttgggtactctcctgctcataaggggtaccggtgccttgacctctccacctacagagtcctcgtctccgactttcccttctccgtctccccttccgctgcctcctcctttgagtacgacaacctccttgaggcactctgtggttccccctcttgctcccttgcttcccacacccctgtgtgcgatgtgctgtcaaggagtctcccgtgccgccatgtaggagtgggcagaaaacccgatactagaagcccgaacccaaaaccaaacccaaacccaaataacccgaacccgaaaaacttgagaaacattttgggtacgaacttccggtacccaaagtttttagcaaattttgggtcagttgtatcagtacccgaatagacatactacccgaacttccactacacaccaacgcttcacgtcacgttcaccttcagtccttgacgacctcatcctaatgggctagaccacgaccaccacagagtcacgttcacgggccacaacatcaagagtcttgtagccggccaagagtccaagacgaccaagagttttgcaactgtagcagccggctagccgccgttcgtcggccgccggtcgtcggtcgcacaagtaccagccatcaggtcgttggttgtcggccgctccagtaccagccaccaggtcaccagtcgctggccgcccaagcaccaagttgctgtccgccgctagcccgccacacccaacttgctgtccgcctacttgctccacgtggccacacctccagggctctagttcgtctccggctgtcctctagtccgcctctgacttctcgccggtctgcccgtgcgtgcggccggctgaccgacaacccaacatggcaacacgcggcagcacaccgaagaccgaattgccttgccgaagcacgacgcccacgccctggtgcctgacgttgaatcgttgtcgcttgtggtgaagccaacagaagaacaacaccaacatcggaggaatcttgcaatgcttgcagcaggtaggatatggtaatgtcgcacgggtgtcaacagtcttccctaacgacatcttggcaccccctggcgctgataccacttgtcaggaaccacgccggagagacaaccttcagcaggttgccggcgaactcctacctcccagggtcatagtgttcaatgcactgaatccttcatgcgtgagaatgttatggacgagcttaagcagatgcaacctgaggatgaatcaaagaaaaagatgctagatatcctcaagcggctccacttggaagaagagatggcatcagatggtgaagatgagtccatgttatcagaggagcttattcaaaaagttatgtctggggaagagataaagctggaagacctctctgattgtgaaatcaaacgattccgtcaagctctggcctcaggtgagctcagtaagatgattgaaccgtggacaccttggtggaaaaaaccctcagccagatctatttcccttggcctggatggaagtcagcttatcagacaagtaaacgcagaagacactgctgtaccatatccagatccaaatactgaccaagaggctagcatcaacgaaatccctgaagggccagaatctcctctcccgtcattgaaacagttaacaaggacagagccatctcctttgcttgctgtccacttggttgacattctgtacagttactgcttcacacttcggctctacaacggtgattggcactcagatcctttgggtgcttgcactgtcgccctgtcgatgtcgaaagtcatgggccaggatgctaaacctgagactgtacctgaagcactcgcagcctgcatcgaggagacatgctcaccagcttacaggcatactggtggtttcaggtttgctattggactcgtggacgatatcatcgccattctctccttgggacagaacgcacttatttgtgccttatgcgacttccatcgactcattgaagttggtaagagcatgctcaaggtggagaaagtgggcaagacggagagggcacagaactctccgaagcttcgtagtgcagctaggaagctattcttcatgacttgttgggtccatgagcagccagatgaggcgtggccatctttagctcacatcgtccaggtgcagaaagcatctatggaggagttggagaccgggaattggaaggcggatagaaagagcaaaccacaatccgcggttcttatcgaggagctgtaggcatatggatgtaccactggaaactggatcgcgaggctctgtacccttgtgtatcgctcaggatgaatccaacgagagaccttgtccttgtaatgcagttagttgcttttgtgtacacttttttttgaaaaaaattgtatttgtatacgagtttgaaatcctagttgaagcgatcctgctttactttgcttgttaaattgcgggctgatttaatccatgcgttggagcttatgcggttcagatattcttatgattgcaagtttgtg

SEQ ID NO: 30205 - DNA, 2918 bp, Zea Mays
cccccatctcgcatctcgcgtactatttccacaattccaccgacccgtcgtcgcgccactccgtcttgctcaacaccagtcaccactgctctccaagcctccaccagcgtccagccgaaccatcgccaccgcaggatggcctcccgcctcctcctccacctccacctgcgccgccgcgggcgcgggatcccgggctgccccgtgcccgcgctacccctccacgccgcgcggctcctctcctcctccccaccaaccgcagctgcggcctcgtcgtcggcggcgggcggcgggggcatcgagaaggtgctggtggcgaaccggggcgagatcgcgtgccgggtcatgcgcaccgcgcgccgcctcggggtcgccaccgtggccgtgtacagcgacgccgaccgcggggcgctgcacgtgcgcgccgccgacgaggccgtcaggatcggcccgccgcccgcgcgggagagctacctcaacgccagggccatcatcgaggccgccctccgcaccggcgcccaggctatccacccgggatacggtttcctttcagagagtgctgatttcgcgcagctctgtgaagccgaggggctcaaattcattggaccaccagcatctgcaatccgagacatgggcgataagagtgcatccaagaggatcatgggtgctgctggcgtgccgctggttccagggtaccatggggctgaccaggacgttgagctgttgaaactcgaagcggataaaatcggttatcctgttttaatcaaacccacccatggtggagggggcaaggggatgagaatagtcgaaaggcctgatgaatttgtggattctgtactgagcgctcaacgggaagctgcagcatcgtttggtgtaaacacactattgattgagaagtatattactcaaccaagacacgtagaagtccaggtaagattcaattgatattggacctgccacagtccttcatacaattggaaacctgcagtaactctttgttgtcttcccttgtactgcattaatgtttgaaggtatttggcgaccaacatggaaatgcgatatacctttatgagagagactgcagtctacagagaaggcatcagaagatcatcgaggaagctccagctccaaatgtgccagctgagtttcggtctcatattggtggagctgctgtatctgcagcaaagttggttactacaatgctggaacagtggagtttattgtggacactctttctggagagttctacttcatggagatgaatactcgactccaggttgaacacccagtgacagagatgattgttggtcaagatcttgtggagtggcaaatacgtgttgcgaatggagaacgactaccattatctcaggagcaggttccattaaatggacatgcatttgaagcacggatatatgctgaaaatgttccaagagggtttctccctgcaacaggaaccttacatcactaccgaccagtcccttctgacccaactggtgaaatatggacataccctatgaccaattatattactagttacatttcagtgttgcacaattaacatattcttcctcagtaagagttgaaactggagtcgaagaaggagataccgtcagcatgcattatgatccaatgatagccaaacttgtagtatggggtgaaagtcgcacggctgcactagtcaagctaaagaagtgtttatcaacctttcaggtttgccaaccaatgttgatttcctccaagaactcgcaagccacagtgcctttgaaaaaggcctagttgacactcacttcattgaacgttataaagatgaccttttgagtatttctacaaagtcctcaaaagaatctcatggtgtagctgagcttggtgcaattttggctgctgcatgcatttgcaagaaggaacacattacatctaaagaatcactacgagccaacaagtcactatctgtatggtacaataatccacctttcaggatgcatcactttgctaggcatcccctggatcttgagttggaagagaatgatggattcagtgagaaacttcttaaactgttcattactcataagtttgatggaagctacttcatcgagaagatggcacttctggtttagatgtcaaagttgatcacaagggtgaccacgattttcgtgtggatgtttctggtctgcaaactgatgtgactctagcatcttattcaaagggaaacagcaaacacatacatgtctggcatgggaatcatcaccaccattacagacagactgtaagagctgagcatgcagttgaagatagctcccaacctagtcatgcttctgaagggaagtcgcatccaaaagggagtgttctggcaccgatggctggcttggttgtgaaagttttgcttgaagacggggctcaggtggacgcagggcagcctgtcatggttatggaagcaatgaagatggagcatgttgtgaaggcgcctcgtgccggatacgtgagtggcctgaaggttactgcaggccaacaagtttttgactccagtgtccttttcacaatcaaggacagctctgcaaactgagatggagcgatcactgccctagagtagttgcactgcaactgcatcaagcacccagcggatgctcgtccagatagagaagcgaaggaaataaactgctgggttcgtctgcgggcaatccaatccggcagggcaagcagacggcgcatggtgtttcccggcttgatgcgaatccatcatccgccgcaacaattccattgcgtagtgtacacgaacatgaaactgtaccacgctgagcaagaggaattcttgtttgatttgtgcaatgaaataagttgattccatcaccgttccatttctcataattagtaataataatgaataattagtaataatataatgaggaatgtgtttattttaccaa

SEQ ID NO: 30206 - DNA, 1240 bp, Zea Mays
tcgtctcgtttcagttcctcgtcgccctcgccacttcgccgccgccgctttggctccacccagtccgcttccggcatccgcccatggctgcggcccccgcccgccacctcgccgcggccttcacggccgccgctgcgcaccagcgcgtcgcgttcaggcgcgtccaggtccgggccccggtgtccgcctctctctccttcccgccgcgccatcccgcgacatttcgcggcagggccagcctcgcctgccccgccgccgcctctctatccgtcccctccggcgccgcgcctccgggctccgtgccattcaacctcctgccgcccgactccgaccctttcatcgagtgggacccgcccccgggcgactccgccccctcgccgctcgctggcggcggtgctgccgggggtgccacgctggtcgtgctgctcggctggctcggcgcgcgccagaagcacctgcgccgctacgccgacctctaccgcgagcgcggggtcggcgcggtgcggttcgtcgtgcccgtgcgcgagctcgtcggcctcgacctcggccgccgcgtcgagcgcagggtcgccgacctctccgagcaggtcgccgcgtggtgcgacgccgatcggcgccgcacgctcctcttccacaccttcagcaacaccggatggctcgcctatggtgctgtactggagaatttacaatcaagagctgacctaactgagagaataagaggatgtattgtagactctgcaccagttctagagataagaccagaggtctgggcggccgggttctctgctgcaatgttaaagaaaagcagttccatgactggtcctacgactgaatctcttgatgggcctgttgtaaatggcaccttgaacagagttggctccaatgtgacgcaaccttcatggggtgaatgttttctcctgtcaactctgcggaaattcttcgagattgttctttacgtacctgatgtaaacaagcggctgtgcaaggttctctcggtgctttcagagcagcagcctccttgcccgcagttctacctgtacagctcggccgaccgagtcatcccggcggagtgcgtggagcgcttcgtggagtcgcagaggtccctcgggcgcagcgtgttcgcccacgacttcgtctcgtcgccgcacgtggaccactaccggagcttcccccacgtgtactccgccaagatcgacgagttcctcaaggtctgctccacggtcgagccacactattcact

SEQ ID NO: 30207 - DNA, 3537 bp, Zea Mays
tttgatctatgcaaaacccccaaatatagatcgagcggaccctccaggcctccacaacaaagctagggtttgcctcccccaccctcctggcctcctcccgctttccctcatcctcgtgcgaacctcgcgagccaaggaccgctcgtcgtctcttgtctcgccgtcgccatgggtacggagcggaagcggaaggtgagtcttttcgacgtggtcgacgagacctccgtctccggcaagctgggccgcgccgcctccaacggcgccgccgccactgcggcggggaccaatccgtctgtcaaccggtggaacggccggccctacacggcacggtacttcgagatcctcgagaagcgccgcacactgcccgtgtggcagcagaaggaggagttcctccgccgcctccgcgacaaccagaccctcatcctcgtcggcgaaacgggaagcggaaagacaactcagattccacaatttgttcttgagactgaaggcttgggtaaccgttccatggttgcctgcactcagcctcggagggtcgcggcaatgtcagtctccaggcgtgtggcagaggagatggatgttactattggggaagaagtgggttacagtattcggtttgaagattgcagcagccacaaaactgttctcaaatatttgacagatggtatgcttctgagagaagcaatggcagacccacttttagagaagtacaaggtgattgttcttgatgaggctcatgagaggactttggcaacagatgttttgtttgggcttctgaaggaggttctaaaaaatagaccggatttgaagcttgttgttatgagtgctactctcgaagcagagaaattccagggttactttagtgatgcaccgttgatgaaggtgcctgggagacttcatccagttgagatattttacacccaagaaccagagagggactatctagaggctgctatcaggacagttgtgcaaatacatatgtgtgaacctgctggtgatatccttgtattccttactggagaagaggagattgaggacgcatgtcggaaaatcaataaggaaatcaataatatgggagatcaggttggcccagttaaagtcgtgcctttatactctacactgcccccagccatgcagcagaagatttttgaacctgctcctgccccattgaaggaacgaggtcctcctggaaggaaaattgttgtgtccaccaacattgctgaaacatccttaactatagatggcatagtttatgtgatagacccggggttttctaaacagaaagtttacaacccaagaataagggtggaatccctcctggtgtcaccaatttctaaggcaagtgctcatcagagagctggtcgtgctggacgaacgcaacctgggaagtgctttaggctatacacagagaagagctttaatgaggatttgcaaccacagacatacccagaaattcttcggtcgaacctggcaaatacagttcttaccttgaagaaacttggaattgatgatttagtgcattttgactttatggatcctccagcaccagaaactctaatgagggccttagaagttttgaactatttggctgcactagatgatgaaggtaatctaacacagttaggtgagatgatgagtgagtttcccctggatccacaaatgtcaaagatgcttgtcatcagtccaaagtacaactgttcgaatgagatcttatcaatatctgccatgctgtcaggtatgttaattatcactaaaggttaataaattgcatttctacaagttatcttctctatatttttgtctggagtactccctccatcccaaaatgtgtcattctcacttgtcatgccactttagctttgatcaaatatatataagaaagtattaagatttatggtgcataattagtatcatcagatgaatccttgattatatatttatgataaacttgtttggagatattaatgttgctaattttttctacaaatatagttaaactcaagtaacttcgaccagcacgcatcccgtagtgacacttgttttgagatagagtactttccttgtcagttctgttcaagcgaaataccacatttgtaatatagcatgtgagcttgcatgcatactactgcatgtgcgcttggcatcatttattcattttcttgtgcatttctttaatgtgctgtcatcagcaactgtcattcacctggcttcttgagctattggtcgaaatgatcatacagtttaggctgatgcagataattgctgtttgttgagttattctgacaaagcaaatggtacagtctcgcctctttgcatctgctgactaccgtggacttcgtctgttattaccatattctttctctagcacccaattgcttcctccggcctagggaagctcaaaaggctgctgatgaggccaaggctcgatttggccatattgatggggaccatctgacgcttctgaatgtataccatgcatacaagcaaaacaatgaagatccccagtggtgttatgagaactttatcaattccagagcactcaagtctgcagacaatgtcagacaacagcttgttcgcatcatgactagattcaacctcaagatgtgcagcacggatttcaatagccgtgagtactacgtcaatatcaggaaaaccctgcttgcagggtatttcatgcaggtcgctcacctggaacgaactggacattacctgactgtaaaagataaccaggtcgtccatcttcatccctccaattgcatggaccataagccagagtgggtcatctacaatgaatacgtcttgactaccaggaatttcatccgcacagtcaccgatatccgtggggaatggctaattgatattgcgccgcattactatgacctgagcaatttcccgtcatgtgaggccaagcgtgttcttgagaggctgtataacaagcgggagagggaaagagctgcaaatagaggctgaagttgatacttccacaaacctggtgcttcataattccacagcaggttatcacagatggcggacccgtttgtcatatgcatgatgtcttccacagcctgttgcctagtgtttcatcagcatgatcattatgcagacagcctcgagaaatcccttggcagctcaattagttatgatgcagattaattttgtgccattctccttatttttgtatgcgtaagatatttatattttgcgtttctatgtgattaactggttatccttcggttggaatgaaattccactgattttggtttattagcttagctggggttatgtatgcctataatatgcttacttccggttgcaggaggaagggttgaacgaggttggcaccgaagaaaatttggtgtccctttttatttatagatagatagtttctgtgtggtacgccaaggataaggcgatctgaaattggattgcgtctatctaatgtgtaacaaaatggaaacttttttggtgggtgcaatgtagcacttgcctatctgacacttgtgcacgttcgatctccagctaaacagctatgtgagccgg

SEQ ID NO: 30208 - DNA, 421 bp, Zea Mays
aagacgctgcagatgcagtcgtcgagctaacaagcagccggacaaggtgaaatgttcccgttaacatcccttgaggcctacactaggcagcacaccaaatggggcgaccgccctgccgccggggagcattcaatcgtcggcggcacaccatcccccattcttcccgttccccaacgtgaagtggcaccatggtcgccactcgccacgcgctcgccgcaggagcaggagcagcgactgcgggccagccagcctccggttgggtagctgttctgcgcaacagcccgagggcgcggatggaggagggaccaaacaggagcggaggggaaggcaggcggtacaactgatgagcggcctctgaagtgagggaaattaactcccggtgagatgcagagaagtcagtggcaaaaccttttgctgacct

SEQ ID NO: 30209 - DNA, 1860 bp, Zea Mays
aatcacggcggtcatctcgctaacgctttcctcttggacagttccacttctctgctggcctgccacaaggctacagcggcggcggctgcttcgccggccggccggccgccccctcctgtagcgcgctgagcaagtcaagtaagatggccggcgagcggcgcggtcttgccatcgggatcgatctgggcacgacttactcctgcgtcggggtctggcagaatgggggcgtcgaggtcatcgccaatgaccaaggcaaccgaaccaccccatcgtacgttgccttcaccggctccaggctcctcgtgggggatgctgccaagaaccaggccgaaatgaaccccagcaacacaatcttcgattccaagcggctcattggtagaagatttagcgatgcttctgtacagagtgacattaagcactggcccttcaaggtcattcctggacctgatgacaagcctatgatagttgttcaatacaggggtgtggagcagcagtttgcagctgaagaaatctcctcgatggtcctcgtcaaaatgcgggagattgctgaagcctatcttggcaccacagtcaaggatgctgttgtcactgttcctgcctgctctaccgacttgcagagacaggccacatggaatgcaggagtgcttgcaaatcttaatgttatacgcatcatccctgagcccactgctgctgccttggcttatggtcttaataggaaggctgcccagattatgggtgaatatgacgttctcgtgtttgatcttggaggtggtacctttgatgtctctgttctcgcaattgaacagggtatctttgaggtcagggccacagctggtgctgctcaccttggaggtgaggacttcgacaacaggatggtaaaccactttgtcgaggaattcaagagaaagaagaagaaggacattagcggcaaccctagggctctcaggaggctaaggacagcctgcgagagagcgaagaggaccctctcctcctatttagaggcgagcattgagattgattgcttgtatgaggacatcgacttctactcagccatcacccgtgccaggtttgaggagctcaacatggatctcttcagaaagtgtatggcgattgtggaggactgcctcagtgatgcgagttatgtacgttcaattcatgatgtcgtccttgttggtggttcctctagaattccaaagatccagcagcttcttcaggagctctttgatgggaaggagctttgcaacagcatcaaccccgatgaagctgttgcctacggagctactatgcaggctgctatcttgagccgagagggtggctatgagatccagaattatctcctgttggatgctacccctctttctcttggtttggagacggatgggggcctcatgaccttcttcagcttgttcgctgcggcttgctgcggctgcaatccggctgcggctgcggcttctacagtatttttctctctatggattgcagctgcagcagtccaaacagctgcaacagtgtcggcttgcagccaaccgaacacgccccttgatgattccaaggaataccaccattccaaccaaaaaggagagggtcttatcgactgactccgacaaccagccttgtatccgaatccgagtgtacgagggtgaggggtctattactcgtgacaaccacctgttgggtgagtttgagttttcccttcttcccgcacctagcggcgttcctcagatcactgtttgcttcgatgtcgacattaacggtatcctgaatgtctccgctgaggacaaaaccactggccagaagatgaaaaaagtcatcacaaagagattccaagcggctcattgggagaagattgggagaagattt

SEQ ID NO: 30210 - DNA, 2138 bp, Zea Mays
cttgttcgtccatccgtcacaatggtcacacggcggctcccaaaccctaaacagcggtggtgcccctacgcttcagcctcgactcagtattcccccttccccgcttcgacaagtctcgtcccccgcccccttattccattacaagcaactccgccggtgccaccgctgctggtgggacaggccgccgccgccgctgctggtgggacctaccgcctcgcgctccgcatccagcgccgcctcatcccgcccaaccaccccaggatacgggacttcgtctacaggtactgccttcgccgagccccgctgtcgtgcgtccgcgctcaggacgccgtcggtcactgccagccaaacaggatcagcgcgagcagccagtgcaggcacatctcctactcctacgccccgttcccgtcggtcactgccaggaggaagggtgtcttccgcgaggacattgcacagctgatgagtagtggatcaacattattcaaaattttgctcatgacgtctgatatgtggacagttgccattcaagttttactctatcatcaataggtgaagattcctgatccagaatacttgtgtaagattattaacatgttacccaataataatcttacataatttggcccaacccaaagatacgttaatttaaactccctagattattttgtggaatcccaacagagtttattcatttgcttgtactctatgaagtggaagttcttgagatgccaaaaagcagggaagtgcggacataacagtcaagatgagctacttaaaagtgaggataattcaaaggagcgtggtatcccgagaatatgaacactccagagatgcaatatttgaggaaccggattctcccattatattctttggatccttgcagcccatatttgatttcaatggctaattgggttattggtcagcttgcgatatgcctaccagaggacatgagttctagtatttatcagtccttaatgaaggcgttgaccatggagtatgtggaggacataacttgttatccggtttgtgcctctgcttctggtgctattgcagaactcatcgagaatagttatgttccacctgactggctcattcttctgcaagtggttctgaaaagaataagtactggagatgaaaatgagtctgctcttctgttcaagcttctgggcacaatagttgagggtggacaggaaaaagttgtttcatattcctgaaattgtatccaacattgcgagtactataatggagctcctgccccctgtcccagatccttggcctcaggttgttgaacagggtttcacagccctcgtagcaatggtgcaagcttgggagagctctgcaccagatgaaaacaagacacctaaaaagaggttctggcagtcaggccagtctgctattgcccaaacaatttcattactgttacaaaaagcttggttgtttcaagctgacaatatggagggctctgcattaccacctctgtcatgcgtaaacgatgcttctgtgttacttgagtttgtcatgagttctgtcacttgcatggaagaaactgaaagtctgaaggtctttgagctggtagctacatgggctaacgctgttgccaactgggactcctgggagatggaggatcagggtgttttcaacacaattaaagaagctgtcaatttccaccagagatttgacctcgacggtctcttcctgaaaacgcactttgtgagatgtcattccactagctaaaagtttgcagaaatggcaccatcaagatcggtctggagaccaacaagatcatggacttcatcaagtttgatgtcggcaacgtggtcatgatgaccggtgggaggaacaccaggcgtgtaggagtgatcaagaacagggagaagcacaagggcaacttcgagaccatccacgtgctgcttagagctttttgctatgtctagttttctcctatttgttgtataggaaaacatagaatggaattcaaatttggtggccgcaaaatatggagacttgaattcatataaagttaggcttaacattagtgcaaacaattgtattttagtttagatttagagtacacttatgtatgtgttgtttgacaatgcttatttatgatatattgaatggtacttatttatattata

SEQ ID NO: 30211 - DNA, 2638 bp, Zea Mays
cttgctcgtagccgctgacgccactctgctcgagttggctctgcgactgggtgtttgaagaatgccatatgtttttccttgagggatttcaagtaataaagtatgctatctgcacagagcaacttagggcataataggcattctcgcaatgatgtttccacaaagcacaaaagtggctatgaaccttctgacacagaaactgagtggcatgaaagcccttggaacgatggagcattggcatcgaataggaatcgtcttcctaaagattctggtaggaatgaccaagttggtactaggaggcaaaacatatctcctaactgcacactagattatcatgctgagaaaacttcaaacttgagatacagtcgtactcctccaagggtcacagaacaaaggcgccatccttctccatttacagctgtgaagaatgaatcacgtaagaagagcagccggacgcctcccagatttcgttcttctatggaaacctttagtagatcatcaataaaggcaaggttttcccgcaatcgttcaatttctgcaccaaaattacggccacaagagaaggaacatcctgctagagctcctgcatttcctggcagtaaccctgtctcaacacatccagaaagagaagttgctgataatatagaagaagattcacatgcagaaaactgttcccaggagatcagtgaattgattgcaaatggcaagttacctaattccagatataatgagtatgcatttacgagcacagagtcgatacctgcaggtgatatcttcttctcccgtgattgcagggctccacttgagaaaacgtcaacaaagcttaacaatattgaccaatcatttacctctgactcaaatgtccatactgagaatgatggcactgttactcaaagtaatttgggccagccatcacaatttgtttcagctcggacaggtctttcgcgcacaactacgaaatccagttatgctactggtcgccattgccagatgagcaccaccaccactttgagtagcccatatagcaatggaaaattaagtggggagagtggaaagtttagtgaaatcactgggaaactagttggaggcgtcatgaaattcacatccagcaaggtgcaaaacgatacgtggcttccatgtatgactgggaaggcatgtcgaaaatcaagaacatcaaacaacaaaaaaaatgatgaatctgaatcaagtttcattcagaaggcacttgtcattgagaagattagacttttttgggctgataaatatcgtccacaaaatttaaatggatttacttgccacagggagcaagtccagcagcttaaacaatcggtctctgcagaattttgcccacatattattttcaaaggtcctccaggatcaggaaagagatctttgtgcagagctgtcctcactgaaatttttggcgattcatctttgaatgtctctcactatttgaagagctgcaatggccaggggtccatatctgtgcctattctcgtcccagtttcatccagcaataaccatgtggaactccacatgaggtttcaatcgaagaacgctagatatgctttgatgactctagcaaatgaaatgtctgataagtgtaaaatcactgagccaattgtgagaaagagctttaaagtgattgttctctatgatgttgataaagtcagccaaaataaccagcgtctgataaaatggataatagattcctcctctgatgcatgcaagataataatgacttgccaggatgaatctaatctcctagattctataaagagtcgttgcaagattatttcaattggtgtgcccagtacacgtgaggtggtagatatccttacctatacatcaagaaaagagagttttgatcttcctacaagttttgctactaccattgcgaatcaatccaggaagaacttgagggaggctatattggctctagaggcatgtaaagccaacaattatcccttcattgatggacaagctataccactaggatgggaggaggttctggaggaacttgcagtagaaattttggatgatcctgcccctaaaaggttatttctggcacgaggcaagctccaaaaactcctggtggaatttgtacctcctaaactaatactccagaagctcgtagaactcttcttgaagggaattcagactggcgtgaagagggaagtctactattggcatgcctactatgacaagaggttgcctgttggtgcaagtgctctgcttaaattggaagaattcgttgccaagttcatgagcatccaccggaagagcatgtcgcatgagcccaagattcctgaggtgccgcagtgaaacctggcagagcatgtcctcgtgcggttcggccgtgtcgaaatcccgtttgtggtggtggtttttctgttttatataattcaccttacgtgatcaactgtcatggtccatgtttttcttgttctatgtatatactatatggtacacatatatgctactactgagtacacaaatatgtccagccgaataaatgtctatacggctataccatctgtgttggcaatatcttgttgcaaaagtttgggagtggacgtataataatcttttgatttgaggtacgtgaattttggctatcagtttgttcttttctttt

SEQ ID NO: 30212 - DNA, 1389 bp, Zea Mays
gcgaaagatatgcgtatcatttcactactaagagagaagattctgttcttgtaagcagtgtacaattacgtgatgatctcttgtcaatgttagttgctggtcatgaaacaacaggctctgtactgacgtggacaatctatcttctcagtaaggatccgactgcactgaggagagctcaagatgaagtagatcgtgttctacaaggtagactacccaaatatgaggatgtaaaggagctgaagtacttgatgcgctgtataaatgagtctatgcggctgtatccacaccctcctgtacatttcttgtgctagtgacatgcaactttataattggttttgttgactcatggactaattactgataggtgctgttacggcgtgcaatagttgatgatgttcttcctggaaactataaggttaaggctggtcaagatattatgatatctgtgtacaatatacacaggtccccagaggtttgggatagagcagatgagttcattccagagaggtttgatttagagggacctgttccaaatgagtcaaacacagatttcaggtttattccattcagtgggggtcctcggaaatgtgttggagatcaatttgctctcctagaagcaatagtggcacttgcagttgtgttgcagaagatggatatgcagcttgtgccagatcaaaagattaacatgactactggagctacaattcatacaaccagtggactatatatgaatgtaagcctgcgtaaagttcagcaagaagctgagttagcgctgagcgaatcgaaatagatggaaacgacttcagacaagaatagagctcctgaactggatacaatcatacaaatatgaaatatgcttctccagtttctcgttgaaagctctactgtactatactagatgtcaatgcgtcggcatacagattacagattcgcttctcttgaaacatgaaaggatccttcgctggctgattcgtttggctattcgtgagtgtaaaatttatcttaggctttatttagatactcaagtattgacctcaatcaacatgtgttgatgtggatttggatgtaattagttcaaattacacctaaatccatctcaatactcaatacatgtggatttaggtcaatactagaatatccaaactaggtcttagtggtaatccaagaccgaacagaaacatgtttctacttagctgacggcggcacaaatatagtattagtgctagtttgggaacttaaatcccctcagtgattggagggattgaaaaagaaattagtttattttcccctaatcttctctaatcatagaggagatttgagtttccgaactagcccttacatacacatattttgtctggttttctccccgaaacataaatccagttttaa

SEQ ID NO: 30213 - DNA, 3307 bp, Zea Mays
atatgtccttattgtaggcgtgcacacccgtgttctgcctctcgacgcctgtctgcccgcgccccccgcttgtgatgcccatctcgtctccccgctgtggcagccgccttcgcgtccgccgcgagatccctccgcgcacgggcgcgtcccccacaaaccgcgctccgtgaaatccgcactcccctcgccgcctccccagcccgcagcctctcctcaacctccctccccaaggagctggcggcggcgcgactgcgtcgggagaggacgcagaggacgccgcgcgggggctgcggcaggagctcgactccgagcaggcctccccggagatggcagccagatccggctattgagccccctaaccgagcggatccaaggtactacacggccttgccctcacccttttgcttgctttgtcgtcctctcctcttcctcttgcgggcgcgatttgtggtgggtaccgcggcagggttgtggcgcgcgctgcggacaagggagccgtctccgtgcttatcgcgcgcaacgcggacggcggcatcgagagaggagtcgttcttctcggtggccccggcgatccgctcacccccgggtgggccgccatcagcggtgcggagcgatcgaagttcgacgataaggcagtcaagcagcggttttcgagtatcccctccatgccggtccaccgatgagcggtttctgagtgcagtctgcccggtccaccgatgagagggagactcgtctatcaccctcatcatcattattgagcactgtctggtactctggtcaaaatggtcagtttggacttgactgagttctatcgttgccctgtgaggataaccggttcacaaaggcaataattagcaaggtttgtgctgattgcatgcatgaagccgatgaattagcttcagtatgaggcagacgatttgagtcccacagtgtctttgattcctaaatcacccagctggctagctccttggtggtgcgcactgcagaccgataaccgattgccaggacacaagccagccagctggccagttgaagatttggaggtttcacctgctcaaagaaatgccctgcgcaacctgccagtttgctgtgtcgaccgttggtggcagctgcatcgacgacatcacatagacgagctgactgtcaagcactgggttgatcaggacgaccctggccctgccattcttgtttagagttttgcttgccaagttgatagtgattttttcagttcgattagtgtaggtgctggctggaggcacacgcagacacgctggtagcttattgactgaaagtgccagtcctagataattttggggaaaaaggctccacgctggtagcttattggctggaggcacacgcagacacgctgatatctaagaaactcgttcatacaatccaatatatctaaacattttatcttattcactagaatcctttaatacacggcttatttatatggattatatgggtggaaccatatattatacttagggaaccgtgctatagacgttccttcatttttaaccgtgtttggattattaacttgcttctacagataagatgtgaaggctcatattagttttcacttttcagttgcctgacacagataggtaagtcgtggtgtaccatgattagttttcagttgcctttataggtgtgcacggatcagttctcagttttctcgtatggaggattgacaaaccgtgatctataaggattagtttttttaaaaaggaaagcgagtaacacacaactagattttatttcgtgggaatcgtacaggaatcgctacgtactccagtaataagtacgctgaatggatagaaaatgtttatgtttttttagaattatagattttatctttccttgaaacgtatctcaagaggattgacgtcaagaggattgatgtgcttgtttcttgtacccatcagatagttttttttgtctccagttgctctacacagcaagtctatgaggaaggagcaaaagaagttgctctttcagttgtcagcggaattaatttaactgtatgcacaagagaaacaactttgttctgccacttccattttcgatgatgaaccaatgtgagctaacacatgttttggcatgcacttcttcgcagcaagcatacttgcctatggcaaacaagcagtggacttacacaatgatcgaaatgacagagtatagtatgcttgacgtctatgaatgcatagataaggtataacgaagctgttgttatacactgatgttttgttcttgtttgcttgcaactttttgcagctgttcgtgctatcggtttggaaagaacatgtggaaagctaatctcggatcttgcttccttcagaagacccaaaggaccttgaacagcaaaatctaaggtttcaacattgcagacacacaagagtccagcatgcgccaacgctcctgcaggttagtccgagatggcccttcattttcctgtttcaatagataaaaaaactgaggtcgcattaaaaaactgaagtctattcaacaaatcaccaaccatgatttttctgaggcacatgggtacaatcagcacaaactccatttgccaagaaaaggttataatgcattcacaccaataaatgttcgtttcacaagacataagcaaagaacattgaggtcgcattatctaaccttttggtgattgcagttgatgcttcttccagtagtttgtgacagattgctcaaagaaaagcaagacagctcgccaatcctagaagtggaaaaaaacaacatagaataattagccagctacagggagtaaaccattaagagaagaaacatcgtaatgccatgtttccaaatgggcacaaagaaacttcaagcacctctagacggaagctgtctgcactgaagatcaggacacgaatatcgcgagctttatcaaggctcgccttgtgcggaaggtgtatttctgtgagatctccaagatgaagcattagggggtcaatcgccccagattttacatgtagctaacttagtagggcacccataatccataatttattctctgtagttgtagcagcgacctagaggtgttattctgtagcacattgtgtaacatgtaggagagagataaacacatatccccattctttctactgaaacaccagaaatagttgctcttgctccataattcattaatgtgaacttctgaagccatgccaaggtcttatattgatcctctgttgtcatattgataaaaatagggtatgtaaaaccttttctcataacagtttaacacatattttatatataagttatcgtaatattacatgtttcc

SEQ ID NO: 30214 - DNA, 3130 bp, Zea Mays
cgacgcctgcctctgcagactgcagtccgagtccaggggagccgcgtccggtccgcgggttgccttctcttgcttacttgctagctcctcgtcgcagtagcggcagcggacgagcagtcgagcgcaacgccgccaatcattccttcctctgccttcctctctccctccccctcccggcgccatctcgacgctcggccccccgcgggcgggatccgtcgccacagatccgctgcctgacctgaccgcccctcatgctcgggtagcgcttttcagtttcccccgttccccgtgggccactcgacccgccgacggagcggaagggcggccccggccgtgaccgcggcgcgactcgcgaccctcccagtcccagaagcggcgtgcggcgaccgggaccggctgctggtggtgaattcgcgccggcgaactgaattcaagcggcgaatcccctcctctggtcctgtctcgagccctcggcgtccgcgcctcctccgtctcgccgccgttctcgacgcccgccgatccaacaccgggtctgcccaacagcccaagtgtttcactagtgatggcagaagtccaggatggtcattatgattcaatgtcacaggccactgatagcttgcgtgttgaacctatatatgagtcgttcctatgcccgcttaccaaacagtggaaggaggcttgtctgccctgtaactaagatggagctcagcaacactgagttaaatccaagcatagctctgaggaacactattgatgaatggatgaatcgcaacgaggcggccaaacttgacgtcgctcgtaagtcattgacttctgacagcacagaaagtgatatcctacaagcactccagtatgttgatgagatatgtcagagaagtcgatctaacaggcaggttgtgagaagagatgggttgataatcatgattgctgacttgttgaagaatagcagtacgaaagtacgccaagcggcactagggactctttgctccattgcaaaagatgacaatgaaaataaggttgagattgccgctggagacaatattcgcacaattgtaaagttcttaaatcatgggcagactcaggaaaaggagcaagcggtgtcactgttgtttgaactttcagaaaataaggctctttcagaaagaattggcagtgtttctggagctattcttatacttgttggtttgtcaagcagtaaagtagaaaacttgctcattgttgacagagctgagaagacattggaaaatttagagagctgtgaaaaaaatgttagacagatggctgaaaatggacgattgcaacccctcctgaggctgcttcttgatggttcacctggcatgcaattacctatggctgcataccttggagagcttgttctaagcaatgatgttaaggtacttgtggcacaaaaggctggctccacactagtcaatatcatgaaaaaagggaatagagaggccagagaagcagctttgaaggcattgaaccaaatttcatcttatgattaatcagcttccaatgagattgaaggaggtctcagcgaccattcttgcaaatgttgtggcatcgggtgcacgttttgagtccattccacttgatcataataggcagaccttggtgtctgaagacattgtacacaatctgcttcatctcataagcaacactggacctgcaattgagttttgttgaagcacctcaaagggaagtacgcatgaattccatcaagctcttgaataacatatcaccttatatgggtcaagaacttgctgatgcttttcgtggaaacttcagtcaactaagcagcttggtcaaggtaattgtcgataacaatggtatttctgaagagcaagcagctgctgctggccttgtagctgatcttcccatgggggactcagtcctcaccagacgtcttcttcaagatggggcattcgcagcaatcatttcaaaagttttaagaatccgacaaggggagattcgtggggggcgttttgttaacccattcctcgaaggtctggttagaatagtctcccggatcacatttgtcttggatgatgatccggatatcattgctgttgctcgtgattacaatcttgcttcactcttcactgatctgcttcagatgaatgggcttgacgtagtccagattgtctctgctgtttcactagagaaactctcgcagcagtcaaaacatcttacgaagatactgcctgctcccagcccagggctgtgcttttcaatatttccatgcctcagccagaagactgtagcaactggggtctgtagagttcactgtgggatttgttccgcaagggagagcttctgtctcttggaggggaaggcagtggagaagttagttgcctgcttggataataataacgagaaagtagtcgaagctgctctagcagcgctgtccactttactggaggatggagtggacattgaacaaggtgtcatggtgctgtgtgatgcagaaggaatcaacccgatactcgcggtattgtgcgagaacagaaacgaggcactgcgccagagagcggtgtgggcagtggagagaatcctgaggacggacgaaatagcgtatgagatatctggaaaccagaatgttggtacagccttggtggaggcattcaggcatggcgactctaggacaagacaagttgcagagcgagcattgaagcatgtagataagttgcccaatttctctgggatattttctaagatgggagcacaatgaccacgttccatggaagtactcgtgttctatttgacatgaggcaggcgcagatgaacacttgtgttcccagcaggccttcattggttttgctgactcgcactccagctagatgttgtagcgatctgattggtggaagaagaattaagtattgcacgtgttgtatagtgtgtatttgtacctgtagacttgtctgtactttcgagattggtcagattcatagaataggttgctatccctgttgtgtggagacaatacataatgcataaccgccagcactgggtggaaaaaaaagggaagaaatgtgaagtcgttgcgtcagatatgacatggttttctggtgtatgtcttaatgtctacagaggcaaagtgcaaaggactgtttggttcgctgtctaa

SEQ ID NO: 30215 - DNA, 2349 bp, Zea Mays
actttttggtggatttggtcgggtagttcagcaacgagtcgaggatgcacgttaatgtcctcaatacgctcttcaccagtctgaattctcctgggcagctcagagcttggcaggcgaatggcggtgatccttgtggccagtcatggcagggcattacttgctcaggatcaggggtcactaaaatcctattaccaaacttgtcactcaccggaaatctggcctacaacatgaataacttgggttcattagttgagcttgacttgagccaaaataaccttggtggtggaggccaaatacagtacaatcttcccaatgtgaagcttgagaaactcaatcttgcaggaaatcaatttggtggaaatttaccctactcaatttcgacgatgcctaatcttaagtatttaaaccttaatcataaccaactacaaggaaacatcactgatgtattttccaacctttatagtttgtcagagctggatctctcctttaattctcttactggtgatctaccacaaagtttcactggattgtcaagcctgaaaagaatgtatttgcagaacaaccaatttactggttatatcaatgtcttagccaaccttccccttgaaaccctgaatgttggaaacaaccatttcactggttggattcccagtcagcttaagaagataaacaatctacagaccgacggaaattcttggagcacaggaccagcgccacctccacctccatatacagcgcctcctcctccaaaccattggaatggcgcgggtcagaatgatgatggttcatcaagttctggtggaagacctgggataggtggtggaggtgtagcaggaatcattatatcattgctgattgttggatcagttgttgcattttttctaatcaaaagaagaaaacacaaagctattatggaagaacaatttgaacagcatcagccgttcacttccttcccttcaaatgaagttaacgacatgaagcctatctatgagtccaccacagtagacatagagtctttggcttcacctgcttcgattaatctgaaaccacccccgaagatagaacagaacaaatcatttgatgatgatgatgatttttcaaacaagactgctgcaaatagaagtaatataacacctatgaaggcaactgtttattcagttgcagatctacagatggcaacagatagcttcagcttcgataaccttgttggagagggtacttttggacgtgtttacagggcacagttcaatggtggaaaggttctggccatcaagaaattagacattactgtgatgccatttcaatcgtctgatgactttgctgaactggtctcgaacatttcaaaattgcaccatccgaatctgaatgagcttgtaggctattgcatggaacatggccagcacttgcttgtgtatgatttccataggaatggatcgcttcatgatctactccacctttcagatgagtacagcaaggcacttagctggaactctcgcatcaagatcgcactcggctctgcccgtgcactggagtaccttcatgaaatatgttctccatccatcatccataagaatttcaaggcatcaaatattttgctggactcagaattcaatccacacctttcagatactggacttgcaagcttcattcctgatgctgaattccaggcagcagaacaaagtgccggatacactgccccagaagtggacatgaccggtcagtacaccctcaagagtgatgtttacagctttggagttgtcatgcttgagctactgacaggacgtagaccatttgacagctctagacccaggtcagagcagtcacttgtgcggtgggcagcacctcagctgcatgacatcgatgcattggacagaatggtcgatcctgcactcaagggtctatacccagccaaatctctatcccgatttgctgatgtcctcgccctgtgtgtccagcctgaaccagaattcaggccaccaatgtcagaggtggtgcaagcattggttcgacttgtgcagagggccaacatgacgaagaggatgcttgatggaggagatacttctcgtggaccagatgatcaggaccaatatttcatatgacaagctgaactcgagcttttcagctacctctcagattgtatttatctcgtctcgttccactagcgcccggcagagacataatcacacaagtggaagaaacagaactttgtcagcttcgccagtacttggtttgacagaaaactgaaaaacacatatggccaccttcttttcagcaggagttcacttttaagtgtctatgcagacatgtcagtaacctgtaaggtactaaggcatcttggttttggataag

SEQ ID NO: 30216 - DNA, 1497 bp, Zea Mays
cgtacctaggagacacaaaagctatatctctgagaaaatgtggtcttacaggtcaggttcctaatactcccccaaacttgcccaagctaaaatatctggatttgacatcaaacaacttatcaggatcaataggaggactcttgctttcatataagacctcaaattacatatatgtaggtggaaacaacttaagtggacctgtgccttctgaaattgttcaatcatcagtttccttggatgtttcgtataactattatgttgacggatccctttctaacaatccttctggtcagaagcagttcataaattatcttggaacatcaattgatgcaagtggaagaatcaacagtggaaatcttacaatcctgaactgccttcgcatgaacgaatgcaacataaataatttaactaatcgtgcaacttccttcgctataaactgtggtggcaagcaagtggagtattcagatctaatgccaattatgttctctgaagactccactgatcttggaggatcaggctttcatgttaatgctactagtcattgggtagttagtcatgtgggttctgatccatttaacgaatccaccggtattgtaaatacaagtgatatttttgaaaccaacatgcaagagctctaccaaacagcaagaacttcaacaagttcgttgtggtactatgtggtaggtttagctaacgggaactacacagtccaactcttctttgcagagatagtcataactcatggacctggaaagcgcttatttgacattgatattcaggaccagaatatcaggaaggactttgacattactaaggaagcagggggttccagaaaagccactaacataacctacgaagtgactgttgataactccatactggcaatacatctgtattggagtggacgcggcacctgttgtattccatatgaaggagcttacgggccactagtttcagcaataaaagttacccattcccaagacccgaaaaccagtcccccacaagcaccacattctgattctgcccgagatgatgtaaagcgaagaggagtggttgcaggcattgcagcactttccatagctgctgcggtgatatcttcatctgttgtctacctttggtggaaatgggtttcacttgtgaagcgcccaatggcatgagttcgtcagatgtttgcatatagttgattctcccacaaatttccatgtcatgcgaaggactctatgtatttgtcttttagcgttggctgctagcaactagccaactagcatagccaagatgactgatgtacagttgacgttgcgatcacggttttaggtctcaagttttgtttcacgattattgtaacctaggaaattatctaagacattctgctgctaatatgttgtttgtttgttgatcaaagtgattcaaatcgcattgtgatatattgtttgtttgtcgatcaaactcattgtaaaactattctcggacgaatgtcacatttcacgtgttgccaac

SEQ ID NO: 30217 - DNA, 2172 bp, Zea Mays
gtcacaagcggatatttagcatagccgattcggaacggatccattgccatcgctagctcttactactacggtcctcgtcaatcctcatataagcataggctgatgcgtgcagcgtgctagtggaaggctagctgtctaaaattttcagttcaccatgaggtcaccggctgctccggggccttctcacgattccctcgactcatcaccgccggcgcctggttttcgtagttaccagcagacaaaactggcggagcttgatctggattcatccttgtcgccggccaccgcggcgccaggttcgcagcctactccatcggagtcgccgctgccagctccgacaccaacacctgcgcccgcggcgacagggctgctgataccaataccagcgcggccagtgcttgctccatattcccagccggcgtcttcatcgggttcacctgccgacaagtcagtggcgggcattgctgctggctcagctgctgcgggcgcccttctcatcgtgctactggtagcagttggtttgtatgtggcgtcgcctatttggaagaggcgcactgggcgtgaccgcaggggagcaggcagctccggtggcggcggtgcctcacaacatgaatcgcagaaacgccactctgctgttcaaatcgaggtcgaagtgacgccgccgccaacagcgtcatcatcgtcctgggctacttccagagacagccacaagccggacacgcacggcgacggagcgggaccgcgcgtgcaggtgcagcccgtgcctggagctggaggtggcgactacgaggtccggtttagaggcgcgttcacctacgagcagctggccgccgcgacggacggcttctcggagtccagcctcgtcgggcgcggcgggttcggcgacgtgcacgtcggcacggtggacggcgccgcggtggccgtgaagcggctgcgggcagggagccagcagggggaccgggagttccaggcggagctgcggatcatcagccgcgtgcaccaccgcaacctcgtctcgctcgtcggctactgcgttggcgacggcggccagcgcctgctcgtctacgagttcgtgcccaacttgacgctgcaccaccacttgcacgcattcagcacaacaggggaggttgaaacagtactcggttggccgactagatggaaaattgctgttggagctgcaaaaggcttggcctaccttcatgaggactgtcatcccagaatcatccaccgcgacatcaaggcagccaacattttgcttgaccctgacttcaaccccaaggtttctgattttggtatggcaaaattcgtacctagtagaggggatactcacattgcaacaaggatcgttggaactattggatacctcgcacccgagtacgccacatccggcaggcttagcgagaaatccgacgtgttttcttttggcgtcgtgctgctggagctcgtcaccggcatgagcgccgccctgtcgtcggatcgggaagaaggcactctagtaggctgggcacggccgttgctcaccaaggccatggagctccacgactacgacgagctcgtcgacccactgctgccgagcttcgacgccaagcagatggcgtgtctggtccggtgcgccgcggccgcggtcagcacgtcggcacgccaccgaccgcggatgagccagatcgtcaagcacttggagggcgacgcctctacagagcccttgggtcagactggttccagtcacgggcccggcggggacacttcggcccagtttcatagctacagcaagataagggcgtcgagaagctcggacgcgacgcgagggcattgggtcaccgttctgagcccaatgcatggcacggtccctagtgatttagtacgacacggtcataattcaaatagtgccactgcccataagacacggatctagaattggccgccacacatgtggctcaaaagtgtggcgcggtgtggcggcttaggcgccacaccaaacacgcccctaatgtcgtgattgagccaccaccctggcacgatgagctgacataagtataacacaattaattggccgatacggttaggcatggtttataccaaccggtggtatatagatttgattgtgatatatacatgtaattgtaaattattatttatcataattttaaacataatgaattcactttacaatgg

SEQ ID NO: 30218 - DNA, 872 bp, Zea Mays
ttcacaatgctcttcacctgcaccacagagcaaaacagattaggcatggcgaaggcaaaactcgtcagtcagttgcggcctcgtgtgagtttgaagcaaaaatgcgtagcgggggcatcagaactaccttctccaggcactttgaagctgcaaccggctgtttagctaggataagatgagccatgtatcctcttctaagaaattcaaggcagcttccttgttcttcttgtaaaccaataactctcgattcacctctaactgaataagcccgtacatggactacatcatggattggatagaaacccagctggacgacgaagccattttccctcaacggcttggggctgctttccctcccaacttccacgacgttgtcaagacggtcctgaagcgcctcttcggggtgtacgcgcacatctaccactcccacttccatatgatcgtcaagctcaaggaagaggtgcatctcaacatttgcttcaagcactttgtgctcttcacgctggaattcaagctgatcgagagcgcagagctggctcctctcagtgagctgtcagtactaaactggtgagatagttcgaataggcggcagccgcggcacaccaagtgttcagtttaatgttcgtttggtttcggatggaacatctccatttacacatttggtatcagccgttggcaactcagatgatctccgtatcagccgttgatatctacctattctattactatatcccttctctttattaaaaaagaagggttcgatccaaagttgtgcctctcagaaccttttagcgccataccgctgctgtactggatgattttggcacagacagaagctaatgtcagttctaaattcttttttatagagggag

SEQ ID NO: 30219 - DNA, 3074 bp, Zea Mays
ccgaaacctcccgcggtctcgcccccacccctcacaccaccgcaccaccggccaccccctgccccgatgcagcccgacggcggcggcgcgattcgcgtgctgaacgtggcggagaagccgtcggtggcgaaggcagtggctgagatcctgtcgcgccgctcggcgcagtcgcgtgcgggccggtcccagtacaaccgcattttcgagttcaactacgccatcaatggccgcgcctgccacatgctcgtcacctccgtcacgggccacctcatggaactcgaattcgatgaccgcttccgccgctggcactcctgcgaccccgccgaacttttccacgccccagtccgcaagtccgtgccccaggacaagcaggccataaaacaaactttggaagaagaagctaggagatgccagtggctggtgctatggcttgattgtgatagagagggtgagaacatagcatatgaagtgatcgatgtttgtacacgtgccaacagtcatcttaacatttggagggctcgcttctcagctttgattgatagggagatacatgaatctgtgcaacatcttggcaggcccaacaagctctttgcagatgctgtggatgcaagacaggaaattgaccttcgcattggtgcctccttcacaaggtttcaaaccatgctgttaaaggatgcatttgtaattgatgtgactggggatgagagaagtttggttctgagctatggtccttgtcagtttccaaccctaggattcattgttgagcgtttctgggagattcaagctcatgaacctgaagagttctggacaataaattgtactcatacttcagatgaaggcactgcatcttttggttggatacgtggtcatttgtttgattattcatgtgctattagtatctatgaaatgtgtgtttcagaaccaatggcaacagtacaaaatgttaggaatcaagagaagctaaaataccccccatatccactaagtacagtggagcttcagaaacgtgcttctaggtactttagaatgagttcagagcacacaatgaaggtggctgaagaactttatcaagctggattcattagttatccgaggacagaaactgataacttctccccaaacactgacctgcatgcaatcgtacgtgaacaagtgaatcatccagtttggggagcatatgctcagcgacttctaaatcctgaagcaagactttggaggaatcccagtaatggtggtcatgatgacaaggcacatcctcctattcatccaaccaaattttcagaagagattgtatgagtttgttgtccgacatttccttgcatgttgctctcaaccggccgttggagctgaaacaactgtggaaattgacatagctggtgaacagtttaatgcatcagggcgtgtcatacttgctaaaaattatctggatgtttaccgctttgactcatggggtggaacgttacttccaacatacaacattgggcagcagtttgttccgacaactttaacacttgattctggagtgactcggccaccgcctcttctggctgaagccgaccttcttagctgtatggataaagcaggaattggcactgatgcaaccatgcatgatcacataaaaaagttgcttgaccgttgttatgcaaccaaagatgaaaacacacgtttctccccgacaaatcttggtgaggcattggtgatgggttatgatgaaatggggtatgagctttggaagccttatttaagatcaatgatggaagctgatatgaaatcagttagcgtgggtactaagagtaaatcagaagtacttgagagttgtttgcagcagatgaaggcctgttttcttgacgcaagggtgaagaaagcaaaactccttgatgcaatggggacattctttgcaaggtctaataggcctataaatgaaactcaaaatccagtagaggttgtgaggccttgtggtgcatgcaatggatctgaaatgttgcttaagcgaagggcgagtggtgaatttatggttgggtgccgaagttatccacaatgtagaaacgtggtatggctcccaggatctctttcagaagcggctgtaactaatcaagtttgtcctatctgcgcaccaggccctgtttataagattcaattcaagttccgtcggagggatattccaccaaatttcgatgttgatcacctaggttgtgttggtggttgtgatgatatcctcaaagaccttatggagataagtaggtttggaagtcgcagccaggctgcaacaccagcaagaggaccaacaccaaatggtgtgggtcaggggactccaagacaggatttacatactatttttcgtccggcaagccagcttaataatgataacccatcggttatgcattctcaaggtttccgttcaacccatacccaaaatccaagtaatgcatcagatgcaggtcaagtgctgtgcacctcatgtggagcgctttgcatatcacgaattgctaatacagaggctaacagggggaggaggttctacaaatgtcaagatcctggctgtggcttcttcaaatgggaagacgaagtggacaatggtacggggagaggccgccgtgggcgcggcagcagcaggcaggcgtctgcgtctgcatctgcaggacggagaggcggaggccggagaggcagaggccgtaacgctgacggcgggatgttcgtttcagcgacgggcgacaccgtgctcggctgctgctttaactgcggcgatccttcccacttcgcaaacgcctgcccgaaccggagatagttatcagggagctgctcgctatgcgtgtacagagactggcagcgtccgccaaacgatgaagccttcggatggttttcgtgtactgaggtgcatataagtgcacctgacaagctcattttctagacaattactaatatttttaaacaaaatgcagctattaggctgatgctagttcagcaaatctgacggcacttatttacaaaagttagggcgcgaaaaactgacaaaggaagagatgcaaacacgagctgatctactaaggtttcgataacaagtttctactcatcgt

SEQ ID NO: 30220 - DNA, 3077 bp, Zea Mays
  misc_feature (1)..(1): n is a, c, g, or t
nctctccgccgacgcccaggacaaaggaatccgcctcccggacctcgggcgtcacggccgacctcaagccgcaccagctccatggcgtcgcctggctcatccgccgctatcgcctcggcgtcaacgtcgtactcgtggtcttatgtcctctaagcgtcacagatgggtggctgtcagaattcagtaaattctgtccttccttcagggtgatgcagtatgtaggtggtaagcttcaccgccgtgaccttcggaggaccatctatgaagatgtacagaaagcttccacatcatctcgatcctttgaattaccatttgatgtgctcatgacaacgtatgacatagccttgatggatcaagatttcctttcacaaatcccctggcactatgcagttattgatgaagctcaacgtcttaaaaatccatccagtgtactgtataatgtccttgagcaacgtttcatcatgccaagacgtctactactaacaggcacacctatccagaacaatctttctgaattatgggctttgatgcacttttgtttgccttcaatatttggaaagctggatgagttcctttctacatttaaggaagcaggggaatcactgacaggtgatgaagctaataaagcaaaaggccaattcaagatcattaaacatgtactcaaggcatttatgctacgtaggacaaaatttttactaatcgagagtggaattctggcgctgcctccactaactgagctaacagtgtatggttctttgcttcaggatggtgccgttgacacagttacaaaagaagctttacatgtcagtgttgcggaaagagctgccaacacttatttcatttgctagaggatcatctcgccaccagtctttgcaaaacattgttatacaactgaggaaagtttgcagtcacccatatctgttcagtggcattgaacctgagccttatgtggaaggggaacatttaattcaggctagtggaaagctcattgtcctagatcttatcctgaagaagctccatgaatgcggacatcgtgttttgctatttgctcagatgacccagacactggacattcttcaggattttctagagctacgcaattacacttatgagcgcctggatggttcagtacgtgctgaggaacggtttgcagcaataagaaatttcagttctcaatctacaaaaggtcttatcagagatgataatcgaagtgaagcatttgttttcatgatatcaactagagcaggttatattttatgaacaagattggaatcctcaagctgacaaacaggctctacagcgcgctcaccgcattggacagctgaatcatgtcttgtcaataaatttggtgtcacagcgcacaattgaagaggtcataatgcgaagagccgacagaaaacttaagcttagccataatattattggagaagaagacgggactgatgggaagggaggagatccaggaattgaagctagtgacatgagatcaattatctttggcttgcacctgtttgatccagcagatacagctacagaaacaatcgatgaggatataactgctgagacattcagtgtcgagaaactggcaaagttaaaaacaatgtctgaaaaggttgtcatgatgcgtagccatgagtcttctgaaaaggatgaacgagcatttgagatcaatccaaatatgactgatgacagtggaactgtgattagaagggcttctgattctatccgcattgatcctgggctaaatgaagctgcatacctatcctgggtcaagaagttcaaagaggcttccatttctagtgaagatgccacagttggatttggaaggcaaagagcagcgcctgaagaaaagctcctgaaacatgatgttaacaagcaaaaaatagaagaaaagagattggccaaatgggaaagtttgggttaccagacactagcagttaaggaacctgatatcacagcaagccagaatatttcagacgcgggatccatccaatttgtatatggagattgtactaatccttcaaaagtttgtcccgcaaagcctgccatcatattcagctgcatagataattctgggacttgggggcatggagggatgtttgatgctttgactagtctgtcgacatgcattccagatgcttatcaccgtgcttctgaatttgatgatctccacatgggcgatcttcacttgattcagcttgatgtagcttactttaggggcagacctggtggagtggtgagagctgactcactgagtcacgggtttcgaaacagcctctcagcatttgcaggaaaatgcttgtttcggtttatcccttgtgaagactctactcatgtgtgattactttgacaagaacctgtcctccgtgtcttcatttcatttgcatccttactgcagaaggcaactgtacccggagtttggatgcacctttatgggttgcactagctatcgttcagtcttacaatccgaggcgtaaagttccgagaagtgaaatctccatgtctgatttggagctctgtatatcaaaagcagccttctcagctgctcagcattctgcggctatccacatgccccgaattggttaccaaggtggctcccaacgatcagaatggtatacaatagaacgcctgctcaggaaacactcatctctccatggaatcgacatttttgtatactactttcagcgacgacagacagattgccagattgtaacccaggtaggtcatgctgacgattcgacccaagcgtagggatgtctctgtaaaaacccactacatcagaagaatctgggattatgtgtagctagctgcaacaatttgtcttttctttttcttttactgccccttctctctgggaccaaaacgcctatgaatagatgagggagccaaatgaattaggttttagtacatttagctaagaggtgtatgtatgtacaagtgttgtttgcatctgcagtctcttttgatgaaaatctatgtggcatttatattgcttgatttttgttttttgatttggtctattttagacctctttttcttcttcttaacatatatgatgcgtagcgaaaaaatcttac

SEQ ID NO: 30221 - DNA, 2173 bp, Zea Mays
gtaaatcaataccactcggtccgcgacgctttcctctcccttcgcgatgccgacgatttcctcgcgttgcctcccttcgcgccgccgcctccctcgcgtcggccgtcgcctccccccacatcggccgtcacccctcaccggtgagtatcgtcctctccctccctccctctctagctgtttcctttctctgacgatgcggatccccgtcggatggtgtggatctaggcgaccaacctaccctcgacctcctctgctgatgcggatccccagcgggtgctgaccgtgacgggacctccccgtgaccgtgctctgctgcgtggtgcgcgccccgctccgcgttcggctgcccggcggcggctcgcaccaaaacagttcatgttttgatgcatccatacgagcgcttcccagtcgattcaatgcatccatgttcgcgttcggttcggcggccaaaacagtcgccgtgtgctccgtcaggcatcagcatcaggcttcccaatcgaaaaatgtgcatcagcatcaggcttgtccgttagttaagttcaaagaggcattccataccagcgcgcaacatcattcagatatcccaccactactccttgtttctagtataaataaatgtgcatccaagtcactcatgaggagcaacaagctggagtagctagcaactcgagggatgaagactagttgataggctagctttctccttctgtgccactcataaaacaacagctaggtagcacctttttgttgccaagcaatgcaagatctatctgctgagatcaatctgaatacctaaaatatctatctggccggtcatcagctcgatcttaagcagtttatatatgtcttacctggttgggagggttctgcacatgacgggcgtgtgcttcgagatgccatctcgaggccgaatggattacgtgtccctcaaggttgctattatcttgttgatgctggttacacaaatgcaaatggtttcttagcaccatatcgaggacagaggtatcatctaggaggtttcactactcaaaacccaccacatagtgctgaggagtacttcaacttgtgccatgctagagctaggaatattgttgagagggcatttggaaggctcaagggtcggtgggcaattttaagagacccatttgaaaatgatgaggagccagctatggatgcatcatttgaagttatggatggagaaatcagtgaaccagaatttatcacaggtgtctcaacatctaatgaatggactgatttccgcaataatcttgctcaggggatgtataatagatatagagctaggtctaataactaaggacatgaaccaattagagagctcaagtgttactcggggaagagggaaaaacaaaaggatctggacttattatgaggatgaggagttaattaaagcactatatgagatatctttagatccaaagtggaaaagtgagggaggttttaagaatgggtattgttctgttctagaaaatgaactcaaagcaaggctaccagggtgtggtctcagtgctattccacacattgagtctagagtgaggcattttaggaccaagtatggttctattgaggtcatgcttgctaagagtggttttaatcagatgacgatgcttttcgcgcttcctgagactcttaggagagaattcatcctgaacatgattgcagatgaagctcaaaggaagtgacttgtcaaattatcaatgaagaatgtcaggagcatttggtgaagagtgatcggcatatcaacttctggaagttgaattttgaagacgtttgaagtcctaagacatttctagaacatgaaaattatgaattcctaaggctagctttttttgactgactgtgttgttgactttgtgtgaaaataacccgttgtttgaaacctattatatttgctagctttatttgctattcagcaagacatataaagttgctagctttattggttgtctgtgttttcaactgtttgtgaaaataaccagtataaagttgttgtttagaacatgttatttgtgctagcgcaaagctgaaaataaaatcagtatttttgtgcgccataattttgaagttgttctttaaatcagtatttatttgctacggcagttcataattttgaagtaaaataactatttctgtgcggctgctaggcttatgtgtg

SEQ ID NO: 30222 - DNA, 1402 bp, Zea Mays
attgagcccgacagcaaaaagaaaggtgacgtttctctttcttggttccggcgccccaccgggagagtgagctgctgcctgcgcaactcgagcgccgcttgtcgcgagcaccgcggcctcgatccgtcaagctaaaagcatgtctggacagcaggaccacgctagtaaaagctctagctcaagcatcagcagcagtactcaagagagcgaggaggaagcacctgtccgaagcgtcaccattggtagcctccttgcccaagcaaatagcaccagtggacatagtcttgggaagcgcctgtcccatttggggtcaatcccgtatactccccgagttaatggaaaaatccccaatgttggtaatgcaacactggaccacgaacgattgctggaaaggttgggcacttatggtctagctgaatttcagatagagggggatgggaattgtcagttccgagctttggctgatcagatatatcacaatcctgactatcataagcatgtgagaaaagctgtcatgaaacagctgaaggaattcagaaaacaatatgaaagttacgtaccgatggaatataaggtgtacttgaagaaaatgaaaagatctggggaatggggagatcatctgaccttacaagcagctgcagatcggtttggtgccaaaatttgtttgctgacatcatttaaagacacctgtttaattgagatagtccctagggatctaactcccacaaaaggtaagggcttggctaccctgctgctcagttatcagatgcttggttccatatcgaacttctctggcaccagcattgcagcatctattctgctcttgagacaattctgcattcaaccattgcaagatgcaaaccacaatagtatatttaggttctgcaggaatcattaccacctaatcccagtgatggtacacatttttgcagagctttggctaagcttctggtgtgaagtacactacaattccttgtatggaatcgacgatctcctgacccgcaagacgaagaagaagcactggctgttctaggagggttctgaaggatccaaattctttcagcagctcctgctctgtccagccagcgcagcctctgtcttagtacttactagttggccaacactgtatcatatcctaagttgagtctaggctttacgcttttatgtacagtcgatctagatcttgtaaaattccctcaaggagcaacaggaactgtacaactcttagatccatgagattttggtgatctctcctccatgggaatgatagtgcttgggtgtatgtacattataaaagctaccaggggcattttgacgtgggcgtttggatgccattctccataatttttattctgaattcgtagagtggccatttccaggcatggggatctgccggattttg

SEQ ID NO: 30223 - DNA, 1848 bp, Zea Mays
gcagctagcgtttctccttggtggcggtatcccaattaagaaccatcgtgccaagaccttcaaggaggcgtcatgccattcaagttgtcacggcatttgatgatgatcctggggatttctcgctggtgcacgatgacggggacgagcagtttggtgttcctcagtattcaagcgagagtgaatggagcgatgatgatgtcatattgacggcattcacagatgttgagttaccgatggcagtcaagagccgggccgagggtgcactaactatagctgcccataggttcgccacgattgacaaagggcataagaagagcagaactcaacaagggctgatgaataatgttggactggttgctttcttagtgatgttacttttctttgtcgactggtgttcttggaagattgttagactaccactggactctttttacttgacacgtccttttttaacatcggcagttttatcagcacttgctggattcctttttgcaccagtcgctgatagtctgaagatccaccatttccggaggagaggaaagtctgtttctccatcaagtagaaagccaacccctggaatgggaggattattctttgttcctgttggtatttttgttgcaaaaagagaggttggttccaactcgaatggagttaatggagcagctatgattaccctcatatttgcgatggttgggttgcttgatgatatttctagtctagcagtagatcacaattataaaataccgcgatggataaggttcttggttcaaattgttgctggcatttacttctctaactggttgggttctacagatatttcaacaccatatagcatgaaatatctggttcctctgccgcctcctttcggccttgcactcattggaaaagtatatatggttctggctgctgcatgttcactttccatgggtccggcagtaacactcgttgatggtcttgatggtttggctggtggtattgctgctttggcactcatagcactatctgttgcagctctcccgatttgctctgaattcagtgtttttggagcatcaatgtcaggtgcttgcattgggtttctttttcacaacagatacagggcctccgtggttatgagccgggttggttctttcgcactcggaggagcagttgccacaattgcatcatgcagtggaatgtttcttccaatgttaatagcatgcagtctcttctttgttgagctactgtttgcaatattgcaggttccttttcacatggctaaaaactctttccgcggaacaagcagacatcccctgaaaatccgcccctcgcattactacctcagacttctagggataaaggaaccttatatcgtggcgggcgcatacatgatatcatgcttcctaactctgttggcaggataccttggccttgtctcagcgtagatgaactctcgtcgcttcctctctttttcttttcagttgtggtacatgataaaatccaggcagccattattgcttcatttttatgccaggtctgtgtttcagtgacacagagaatttaacagatgtagtcgttctttaatgttatgttatatattaggtgtagacgtagattatacggtgtttccataggtaacagtgctgccatcgcgtcaaaggcactgtaggcggtagagtagtttatctgtttgtttgttgtatttcatttcgcgtgaaaggagactttgcagatcagcagatggggacggggtgttgcgacttggtcgacgtgcatcccgaccctacttgcaatgcgaacaggaggaattcctgcgagcaagcgaccacgctttgtttaaggctgggagtggcgtttatcttacccctaacg

SEQ ID NO: 30224 - DNA, 6240 bp, Zea Mays
tcgcacgaacgaggaaggcccgcaaccacagccaacctatgaaccccacccgccgcgagattcacaacgcgcacgcaagaaatccacaccgcaccaagaacagatccacatcgccccccctttctttcctgggctgctgaccctgactcctccctccgcatagagggaaaaaaggaataccaggcagcgcaggcgcgcggaacggaagagcaccaaacgccagcagcagcagcagcgaggcaaaataataaaaagtcggaggcatcaaatccaaaaggtttttattagcatggaagcgaaatccaaacccctgaccaattcgggccgagcagcaggcggaggaggagttgcatccgtggcctcccgtgttgctcctcctcgcgcccgcgtccctattacttctccgcgtccgtgctggggcgcggcgcgcccaccgatcctgttctacctcgcgtctgcgctgcgacgttacctgctgctgtcgcccgtcggtggtggaattcgtcgcgcggatcgagccgcgggctcgattcgggcttggcgcctctgtatatatgtcggaattcgccgtagcgtgtgattaggttttgttgttcttctgtgtcggcctggtcttcgcgtgttgtgttttgttgtctggcggaggcgaatctagggtaacggtcagtcgggaatggagtcctccgacgacgggggctccgggccggcggcagggagtcccggccctccgtcggcccccgcagccgttggcggtgcgagtagcgctcctggcgcgtctggatccggcgggaagccgccggtgaagcgcgtcatgaagacgccctaccagctggaggtcctcgagaggacgtacgcagaggactcgtatcccaacgagacgaagcgggcggagctgtcggtgcagttgaacctcacagacaggcagcttcagatgtggttctgccaccgccggctcaaggaccggaaaccgccggccaagaggcagctaagggacgaggaggttagcgtcccagtcatagggccgccgccacctgtgcttccgcctccattgcctcccagcgagatgatggtggggactgtcggaacctatggtgagcagctgctgccctattccaggagagggtctggccggttatcggctgcacctaggttatctgtgccggagattgggaggaggtactatgaaccgccacaagtcatgctgcctcatatggcaccagtgcaccttatgcaagcagagcaccgggtgatcgattctgtggaagcacttataggggaacctttgagggacgatggaccagtgcttggtattgaatttgatccacttcctcctggtgcatttggagcacctatcgtccctgagcaaccgaggcagccctttcgatcatatgagaccaagatgttttctggtcccaaaaccatgaaggcagtacatgaataccagtttcttcctgagcagccaagtgatacatatgagagggcaagccagtcacacttctatgattcttcagcagaagcgtcaaacttgaggtggcaggtcacctattgcatcggcattgacagatcatgagggggctttgtcaaatattaatgctagcacaactccaatccacggccaacttggcatccctcaagttgccggattcgaaagccccctggcatcccctgaaagattgggttatcatgatgaagatacatatcacatggacagaaagcgcaagcataatgaggaagctaagattgctagggaggttgaggctcatgaaaagagaatcagaaaggagcttgagaagcaagatctgctgaacagaaagagagaagaacaaatgcggagagaaatggagagacatgatcgtgagagacgtaaggaagaggagaggttgatgcgtgaaaggcagagggaagaagagaaattccaaagggaacaaagacgcgaacacaagcgcatggagaagtttatgcagaaacaatctatacgagctgaaaaactgagacaaagagaggagcttcgacgagagaaagaagctgcgaggcagaaggctgctaatgagagggctacagctcgtagaattgcgcgagagagtatggaactgatggaagatgagcgcttggaactattagagttggcctctcgtagtaaagggctgccctcaatggtttctcttgatagtgacacattacagcagcttgattcattcagaggaatgctggggaagttccctcctgaaactgtgagactgaaggtgcctttttcaataaaaccatgggcagcttccgaggatattattggaaaccttttgatggcttggaagttttttgttaccttcggtgatgttcttgggcttccgtcatttacgttggatgaatttgtgcaggctcttcatgattatgattcaaggcttttaggtgaattgcatgtttctctgctgaaatctgttataaaagatattgaggatgttgcccggactccttcagttgctttaggtgtaaatcagagcagttctgctaatcctggaggtggtcacccacaaattgttgaaggggcctatgcttggggcatcaacatactcaactggcagagacacttgaactttcttacatggcctgaaatattgcgccaatttggtttatgtgctggttttgggcctcagttaaagaaaagtgatgctgaaattgtccatcaccgcgatgataacgagggtcgtaatggtgtagatgtcatttccattctgcgaaatggttcagccgctgtgaaggctgctgctttaatgaaagaaagagggtatactaatcgtcgtaggtctcgacaccgtctgacacctggaacagtaaagtttgctgctttccatgtactgtcacttgaagggagcaaaggtctcacaatattggaagttgcagaaaagatccagaaatctggacttagagaccttacaacaagtaagacaccagaggcatctatatctgcggcattgtcgagagacactaagctttttgaaagaacggcaccttcgacatattgtgttaaaactccttacagaaaggacccagatgattctgaggctgtgttggcagcggcacgtgaaaaaatcagggcgtttcagaatgcgcttccggagtgtgaagaagtcgagaaggatgtggatgaggctgagagggatgatgattctgaatgtgatgatgccgatgatgatgctgatggtgatgatgtgaatattgaagacaaggatgccaagtcgccccttgttggagctcaatatggtgcacaaattacagtagttggtgacataaagaaagaatcaaacatcgtgatgaacacatcagtgccaccaagcattcagattaaatctagtgcaagtgtaccatttcatactttagacagtaaagcaagtagttcaactgatccagaggttggagatgatgctaaagacattgagatagacgaaagtaatcaaggggagtcctgggtacaggggctagctgagggtgactactgtgatcttagtgtagacgaacgcctcaatgctttggttgcacttattgccgttgctaacgagggaaattctatccgtgcaattctggaggaacgcctagaagcagcgagtgctttgaaaaaacaattgtgggctgaggcacaacttgataagaggcgtataagggatgactttactagtaagatgcagtatgattcttatgtgagtatgaaggttgatacagatcaagaaaataatgctgctgaaattacccttacaccagtgcatgaccctattaaaaacaataacggaaatgccaatttgatgaacaatggtttgcttgttgataagcagaaccagcttactactggtgatgtatatcatcagcggaatggtgcaagccgagaatcgagtactaacgcagaaagcttgtctgttcagcaatatgcttcatctgagaaaactcgatctcagttgaaatccttcataggtcacaaggcagaacagctttatgtgtacaggtctctaccacttggacaagaccggagacggaaccggtattggcagttctctgcatcttcatcatcctatgaccctggttcgggaagaatcttttttgaatctagagatggatactggagggtcattgatacatcagaggcatttgaagctttggtagcttcccttgatactcgtggcatccgcgagtcacatttgcactcaattttgcaaagtatcgagccaaccttcaaggaagctgttgagaggaaaaggtgtgctaatttagaacacccaactggacggacttcggaaaatggaaatattttcaagatagaggttgggcgcaatgaagctgagaagaattctatctcgaaaagggcttccgtgtttctgaaatggatctggagagagtgctacagtcaccaatctacatacgccatgagatatggaaagaagcggtgtcctgagttgattcactcttgtgattattgctaccagatatacttagctgaagaaaggcactgttcttgccacaaaacattcaaacacattcacaatttcttggaacactcatcacaatgtgaagaaaaacaaagaacagatcccaattggaagatgcaaactgtggacctttctgtacccgtaggattgagattgctaaggctgctcttagctaccattgaggccttagtaccggcagaagctcttctacctttttggacggatgggtatcggaaatcttggggtgcgaagttgtattctgcatcatctgccgaagaagtcttgcagatgcttagtgtgctggaaagtgcaataaagcgagactacttatcatctaactttgaaacgacaactgagttgcttaattcaagcacacaagattttgctactcagaattcggctggaggttctggatctgccactgcacttccatgggttcctgacactactgctgctgtagccttgagattgttagacttggatgcttccatctcatacacccttcatccaaagttgggttcaaataaggagcaagaatctggagatttcatgaaacttccaccgagatatccttctatgaataagggcaaacaagaaatagaacagttcaggcctattggttttgatcaacaggatggaacgttgctacctaacagcaatggtcgtagaggtcggggaaggggaggtagaggaggcagcaggggaggtagatctcgtggtcatggtggtagggttcccagaggtattggcagctcttccaggattcagttcagggatgacaatagtatgctctatgggagagccccacgaaagaatgcacgtggtggccgcggccgtggacgtggacgtggacgtggacttcgaactgttagacctcggcaaccatccgagctcagtgccagatcaattccaaaggcaaacctattgggcagttttagcatgttaagtaagacaaatcacactggcactacgcattctcccgagagctcaggtgcagaagagtgggcctttgagaggagggaatatgtgaaggatgatgagaacaatttggtctctcaatccgatgagtctgaggaaaatgtcgaacctatgaatgaggaatatggtgagcatatttcaggctatccaagagacaattccgactccagacccgtacagatgatgggtgatgggagcgacgataatgatgaggatgctgaaggagatgagggtgaggaagatggagaggactatgaagctgaagatcctggtgatgaggatgatgacgttgagatggatggggatgatgatgtcgaggtggatgaggatgatgacattgagatggatggggatgatgacattgaagatgatgatgacgacgacggtggagatggagcagccaacggagatgaggatggaggtggtacatcatcatattcttcagagtatagtgaatgatgagtgattgaagttgtgcaggcttgtggtaaatgatgtaacagaggctttggtgggctcaccaacgctaatgctgacttgaaaaactatttaggaggttgccagttctaaactgtcttgtgtggcttgttattagatagaagccactcaacattagaagatcggccttgtgtgtatacatacataccaattatcaaaagttgaaaatgagggtcgatcagctgtctgttttatgttcagctacttttttcattgttatatattgggagcgttctctttaagacggttgacatatttctaaactcactctcaattttgattttgtagcaag

SEQ ID NO: 30225 - DNA, 4662 bp, Zea Mays
tgaccgataccgtctccgacctcctcccttttgcgctagcttcagagcatcatcaccactccacaccaccgccccagctcgcttccctccccgctacacggtcgctcaccagtcaccacccaccactgcttccatgctcctcgcctcgtttccagctcgcgaaacttagctccagatcctctcccccccccccccccatccaccgcgccgcattaacctcagatccacccggcgagctcatttcagatccatccatgcgcttcccgttccttttcgccctccagctggtcgccttggcggcggcagcgtcggcggccgaggtcgcggtgacgcgctcttcgaggatggtgcaccgtctgtcagacgaggcccggctggaggtgggcccgcgtgtggggtggtggccgcagcgaggaagcggggagtactaccgcgcgctagtgaggagcgatatccagcggcagaagcggcggctcgcggtcctctcgctctcaaagggcggcagcaccttctccccgggcaacgacttaggctggctatattacgcttgggtggatgttgggacgcctgctacctcctttttggttgcattggatactggtagtgaccttttctgggttccctgtgactgtatccagtgtgctcccttgtctggctaccgtggaaatctggtatgcacccccttagttcagtaactttgatgttaatatctgaagatgtcgtattgtcaagcggctgtcagcttgagttgggacctacgagaatcttttttttcccaaagacatatttgcttggttcatgccaaattactgatgcagatgatgacctgaatcttgacatttttattacctaagacacaaatcttggttgaagaaactaatacattgcatgcggtttgctctaattccattgactattggatatcgtaggaaaaaaaatgcaaactgatttctaaacttggaaagtggaaagtaacatgactgatctgtaaacttcccaccatgtctctgggtcattttcagtttaaatttcactataatcactgttcttggctgcgttcaagttgtggtgcaaagtatgtacaccattatgtgaccataaaatatcacacggacaagaacaatccatctatgttttgatggaaattaatttctccactgttcagctgcaattgtaagttgcacaggcacaccgcacacctacatttcattgtcatggcttgcaagtttgatactggccaggtttttatttaggagtacaagtggtggtgtcatgtgtgaactttggttctcttctgttttgttcattttaagtttcttctatttcttcctaacaagtgcagaataagaggaggctaccatgattttaagcagtttagtgcttatttccagtgattgattggcaggtgctccatcataaatggagcatctattatgcaggatagagatcttagaatatacaggcctgctgaatcgacaacaagtcggcatcttccttgcagccatgagctatgccaatcggttccaggctgcacaaacccaaagcagccttgcccatacaacattgactacttttcagaaaatactaccagctctggtttgctaattgaggatacactacacttgaactacagggaggaccatgtacccgtgaatgcttcagttattattggctgtggtcaaaagcaaagtggtgattatctggatggtattgcaccggatggactccttggccttggaatggcagatatttcagttcctagtttccttgctagagctggactagttcagaattccttctcgatgtgctttaaggaagatagttctgggagaattttctttggagaccaaggagtgccctctcaacagtctacaccgtttgttcctctgtatggcaaacttcaaacttatgctgttaatgtcgacaaatcttgtattggacataaatgtcttgagggtactagcttcaaggctttagtcgatagtggaacatcatttacttctcttcctttcgacgtttacaaggctttcacaatggagtttgacaaacaaatgaatgctacaagggtgccttatgaagacactacctggaaatattgctacagtgctagtcctcttgagatgcctgatgtgccaaccataaccctgacatttgctgcggacaagagcttgcaagctgttaatcctatcttgccatttaatgacaaacagggggcacttgccgggttctgcttagctgtgctgccatcaacagaacccattggaattattgcccagaatttcctggttggataccatgttgttttcgacagagaaagcatgaagctgggctggtaccgctccgaatgtcgctacgttgaggacagcacgacagtgccgttgggcccatcgcagcacgacagtccagaggacccgttgccgtcgaacgagcagcagacttccccggccgtgacgcctgcgacggcaggcacggctccgctctcctgtgcgacgacgaatctgcagatgctccttgctagctcttacccattgctgttgctgacgatgtcgagtgtgttcttcgtctcgtgaacaaccgatatactactaatcgatagccttgtatattgtatgtgctttatttatggtgtttttttctttatgtgttgctctagaggtttatagatcagctgtattttgcctccgttgttggtccctgggatagcctagcaatagcaatcccccgactcgaaatgcagaagtttcagaaatggtgcggaaacgagcatatgccctcgcagtctgctactctgcttgcacatcatctatcgtctttgacacgcatgggctgatgggcgtggccaaatccacttagcaaaagctgcagcgaagcaggcgatttttacccgtcccccggaacgccggtgcgtgctccgctactcagattaacctactgcaacgcacaacagcagcaccattccactgcgctgcacagcacaaccgtcacacgagacgagacctcgcaccagccacgactactcgcctcccctttttccccctcgtcgtgctctcttgtcaacccccaatgcagcacgcacaccctctcctctctcccgtcccctcacgcagtcacagtccatctcgccatcgcattgcctagttcaaaaggcctccgaaatcgaacagtccctgccgggtgccggcctcgtacaagcaaaagacagacagttcccgcatcaaccggctagctagctagcccttcaggacctcgctgcattccccatgggaggcgccatgaggcagctgcttagctttctgggagcgatcaatggccgccccaccccagggagaagacgaacgacgacgctgcggcggcgcctggtgcgggacggtggagctgagggtcaggatgaactgcgagcgcgaggtcaagaatgctttctccggcatgcatgagaggttggtcatccgtcactctggtcccctggcctggcctggcccctacgcgttcgcgtcaagttttcgttgctcgccagcattgcgcccacgaccatcgcatggtggcatcactcttctcgtctgtgccctgatgatgagcctctctgcagtctgcacccactgagtcagtcagtaatagtataatgagggggtgtttggttctatggactaaagtttagtccgggtcacatcaagcgtttgactttcaaataggagtatgaaatatagacccaaccaactgtactagattcgtctcactttttaatcttcggctgagaaattagttttataatccgactacatttaataccccgaacggaggttcaaacattcgatgtgataggggctaaattttagcaggggcaaatcaaacaccccctgactaatgaccatcgtgtcctttcagaacaagcttttttttactgctgcagtagtgcagcacagcagcagcatatgccggcggcatccaacaatagcgaaagttccacttgaccacttcgaatcgaactatcgaagtgatttcctgaagaggagcccaagtttaccgtggcgattaataactctgatgaagctgcccgcctgcctgcaggagcagtggcgaatctagccgaaaatatgatcggagtcatcaagagcagctttgctatatcatacaaatttttatgaactttaacagtattttgctaaaatatttataaaatttatcggggtcggctgaccccgataaccccctagattcgcccctgtgcaggagtgcagcatgtggaggtgaaccggctgcagcagaaggtgacggtgacggtgacggtgactggcgaggtggacccggtcgtggtgctgcggcctgcggagggcccagcccacggggaagaaggcggcggagccgtggactggcccccataacactgccggctgctacgccccggcggccgtggccctctaccgcgtcgggccggcccagctgcaggcccacgacggcaggtgggcagacccgtacctggtctcggtgaggagcgtggaggcggacataggcgccgagcatatcagcaggttgttcagcgacggcaaccgcaacgcctgctcccagtgggtgagctccgtaaaaattgttgagaactacgttaccgcggatcaccagatccgctcccttttttcccgtcagcagtagagacgcgagaagttatag

SEQ ID NO: 30226 - DNA, 1529 bp, Zea Mays
atgattgaatcaagtgcaaataacagacattccacaccaaatgaaatggagcggtctgctgatgtgctgtctgctggtctattagaagttgcaaatccttctctctcaagtagattcttcctaaagcagcattggactgatggagaagatgatgtaaaagactctattaagcacaggcccttgtgggaatcttacatgcccaaaaataataaaggaaggagaggaactggaaagaagaaacatggaagtctgtacagaacttatgggaccagagtgatcccagtttttgtattatcactggccggtgtcgatgctgaacttctcatggaagaggagagtcttgtttggacaagtaaagatgttgttattgtgcttgagcataacaatgaaaagattcctctaagctatgtgtcagaaacgactaggcagtttgctcttccatctatcgcacagcgccacatcttggctggtctggcatcagcagttggcggtctgagtgcaccatatgaaagagcatcacgtattcatgaaagacatgtagtgaactggctgtgggctgcaggctgtcatccgtttggaccattctcgaactcctcacagatcagtcaaattcttcaggatgtagcactgagaactacaatttatgctcaagtcgatgctgctcttcgcaaaataagagacacatcagagtttgtccaatcttttgcatcagagcatcttaagacgccattaggagaacttgtgaaaggtaataaaaacaagtccaccactgagttatgggtagagaaattctataagaaggtaaccaatctaccggagccttttccccatgatcttgttgagaagttagaagaatacctggataaacttgaagggcaactcgtggacttgtcttccttattgtatgaccaccggctggtcgatgcatatcaaaacagtaccgatatcctgcaaagcactatttttacacaacagtatgtggaacgtgttctagctaacgagagagacaagatgaaatgctgtagcattgaatatagtcatccaaagcagtcatcccaggcttttgtctatggagggatccttctggctggatttcttgtgtattcactggttattttcttctcttcacctgttcgctaattttatgtccagatgcagaaagtcttggatgctttatggtaggctaggtttgtctggggctgtcaatcttcatgagggaatggcctgaactgtcttggatacagaagggctttggcacagttttagtgctctatttctcgacacacaagcaatcagacggctgatatatatgtaactgattcttgtctgcgataaactatagtcgatttcacagaagagctggtgcatgctatgaaaatatgaaatactttcatcccattttgcaacttgttactgcagaactgcacataacaccactgacagaaacccccgtttgttaataagccccccagcttcatgaggaccagccagcagacatgtggccttggactggtgcaaggacgtagtcg

SEQ ID NO: 30227 - DNA, 756 bp, Zea Mays
ttctggtttttggagctagcagagccagaagttaaatcacgtcttgatacgtacaagcaaaattctgaagctattcttcctacatactctgatttgcttaataagattgatggaaactgcccagccgaagttgtttttcaggcgatagatttcctgttacagaagatctgtgagaacacttcagcgagcaagttgaccaaaacaaatggaaaacgaccagattctgcggatacaggttcaaaaaatgagtggcgtggaattccaacgaggttgaataacattccacattctagggaaattagggaatacttctacaacgacgtgttaaaagctacaaaacttgctattgaagataaaaagactcggttgcagatagatatcaatattcctgaacttaaccctgaaatggatgtttaccgcataggaaccctcatggaacttgtaagagaactttctctatcctttgcagatgatgggaaacgtgtcaagccacttgataccaggtctgtgttcaaggctccatggggcaaggtgcatttgctggcatcccacttcaactggcaggaaccagaaaaattttggaattcatggactggggtgactatggggcgaagggcaccttcattaatattggagcagtaggtgtgtatgtgttgcccacttattctatacttcagacaatatcaattatcaaatgaaacgaagcatcgtagctttaggttgaatcatcatgcttgtgtacctaggtcgcctcca

SEQ ID NO: 30228 - DNA, 268 bp, Zea Mays
atatataataacagagtgtatagcgataaatgtcacaataacatcagagtatttattacatagcggaagtcttacaaaataaattataaatatagatcaaactaaatccatccttggtgcaataaagtcaactgggatacgccacctagatcgaatcgaactcctcgaagtgtggctcctcctgaaccacctgttcttctcccgtggggggtgtgagacagcaaaggtgagctcacacatgattataactcaacaagttgtggggaat

SEQ ID NO: 30229 - DNA, 2415 bp, Zea Mays
atggaccgcgcagacggaccgacgcaaccaggcaccatccagtgcatgcgcacccgcggcccagccatggacatggggtttgtcgagagccagccggagttgacggccgcgccggcggcgggacccggcacgggaagcaggctgccgggcgggggcggcgggcgcaagcggaagcacctctcctccatcgccaaccacgtgctccggcaatgttctctgagcgtggacgatttggtggcagacttcgagctgggcttaaagactgcagcagtggacagctactcaagaaaactggtcgagttctgcagtctccaggcgctgcagatcatcacgtcacgcgatataggggagaagatcagcgagggctcgctaggtcggttcaccttcgatatgatgctggcctgggagaccccgactccgtcggaccaacagatcaccatggagagcgtagcgaaggagagggaagataggaaggagacccttggagaaggtgaagctgtgatgggtgatgagacgtcactgttctattcagacatcatgcctcttcttgtgaatgaagagccaactgttggggaagaagcgtacgtgtggtttggatctgtgttccctttggcttgtgacgtggtcaatgctcgattcacattcgaagctctcactgccaccacagctaacaggctgcactaccctgcctatgacaggttcctgaaagagatggataagtccttcaagttcttccaagacttgccaactccgactggagttgaattcgctgaggatgagttcattttgcacatggagggcacggcagggacacagagagtggtgaggcacattggaaccactagctggccaggtcgagtgactctgacgaacaaggcactgtattttgaggcttccggaaaattttcatacgaatctgcaatcaaggttgatctctcagacaccggagtagaacaccaaatcagcacggcgtcaacaggccctttcggcgtgcctttgttcgacaaggccatcgtgttcgagtcactaccagagcctgtggtcttggagttcccggagatgaccagctcgacaaggcgcaacacgtggctcgctctgatcagggaagtgctgtccatccaccgtttcatctcagcgtacagcatagtgtcccccgtccacagatgggaggtgcactccagaaccatactaggagtggtacgtctccacgccgcgagggagatgctacggatgtcgccgccgccggcttccagcttcctagtgttctcgctgtacggcgacatgcccaagggcgacttcgtgctcgagcagctggcgagcaacctgaagcggacctccaccatcacccggctgagcgcgtcctacgtgttcaagggtctgagcaggtcttcttctgtcccacctctgagcgcggaggtggccgccgaaggccgtggcgcggacgacgacgccagtggccgcgagcacgagcggcccctggcgtccctggaggacaagatcggccgggtgcgagatgaggccagggaagtcaccgccgccaacgccgccgttgaagggatgaaggacgaaggcatctcggatagtcttctcgtgctggtggggttggtcggtcccgtcggcaagctgcggcccgcgatccagcggataacctcgtgggagcggccgcttgtcactggcagcatccttgccgcagcttcgctgatcatatacaatgaatggttcagttacgtgctagctgcgtccctggtgctggccgccggcgtgatggtctgggcgaggcagaggaagataggggagctatgctcggaggtgatcatcgatgcctcttcgtcgtcgtcgtcggacaagacaacgatggatagcatagtggaggcgcagcgaagcctgcagaaagtgcacaggtacatcgtgaccgcgaacgttgccatcctcaggctgtggtcgattgcgctagcaaggtcgccaaagcacacagagacggtgatctggatgctggccgtgtccgcggcggtggtagccgtggtcccgttcaggtacattctgatcgggctggtggcggggagcttcgcgttgaacacgagggtcgcgagggccgtgatgaacccgcagggcggccggcggtggagggagtggtgggagtccatacccgccgtccccgttcggacggtgcacagttgacaaaagtatattttcctctactacgtgaaatgatcgcagaaggaacccgttatagaagcctgtttgttcaggaagaataatgaagtcaataagaaactgtttgttcgcttgtgtctcttttcacctcagccagcaatttcaccttgtaatgaacaccgccatgcacccctgtttaattagtttcattcactaaattttagtttctgtcgcatcaaatgtttggattttagtttaaaa

SEQ ID NO: 30230 - DNA, 684 bp, Zea Mays
atgcctcctggctcgccgtcgtcgcccacagaccccacctcttccaaggtggttcctccgcctagttactgtagtcatggctcccctgccatcattctctccttcctctattgtctccttcctccagacagagaggcggcactggtacaggtgctaccgggcgaggtggagcctaatcgcatcccatggaggaccaccctccaatggatccaggacgtgaggcaccaaatcaatggagagaggtggcacagccgcgcaggtggtaccagcgaggtggagcccggtcgcatcccatggaggacaaccttccaattgatccagggcgtgaggcaccaattcagtggagagagcgtgtctacttcttgattgggttgtttcctttactgagggtctagagaacttggttgcatatgctagaatgctacatggtatctgtgctcactaatagtccaaggttttcttagaaaaacaagaatcgtgactgcaatggcaaatggaaggtgaaggcccttttgattgacaacttaggaaaagatggaatggaactcaaattttgatggtcggtcaagtgtgtagacttgaaatcatatatacctagttaggctcaactttagcgcaaactgttggtgaccatgttttttagttagtattttagtttggatttagagtacacttatgtatgag

SEQ ID NO: 30231 - DNA, 2791 bp, Zea Mays
acggttggtccacctcctcctgctcctctggcctctgcggtgcctcctcccggtcccgagtcccggccatgtcgtcgccgctggaggatgtcagcgtgggcatggaggaggaggatcagcggcccctgaaccgggccctgctccaccggagcgccaccaccaacgcctcccaggtggccatggtcggctccaatccctgccctatcgagagcctcgactacgagatgatagagaacgagctgttcgaccagaactggaggacgaggcgcaaggcggaccaggtgcggtacgtggtgctcaagtggaccttctgcttcgccatcggcatcctcaccgggatcgtcggcttcttcatcaacctcgccgtcgagaacgtcgcgggcttcaagcaccaggccgtttccgccctcatggactccgccagctactggacggcgttctgggtgttcgccggctgcaacctggcgctcctgctgctggcgtcgtccatcacggcgttcttgtcgccggcggccggcgggtcgggaatcccggaggtcaaggcctacctcaacggcgtcgacgcgcccaacatcttctcgctgcggaccctcgctgtcaaggtagtggggaacatcgcggccgtatcatcgtcgctgcacgtcggcaaggcggggccgatggtccacaccggcgcgtgcatcgctgccatcttcgggcagggaggctcccgcaagtacggcctcacctgccgctggctgcgctacttcaaaaacgaccgcgaccggcgcgacctggtgaccatcggcgccggcgcgggggtggcggcggcgttccgcgcgcctgtcggcggcgtgctgttcgcgctcgagtcgctgtcgtcgtggtggcgcagcgcgctcatctggcggtcgttctttacgacggcagtggtggcggtggtgctgcgcctcttcatcgagctgtgcgggaccgggcgctgcggcatgttcggccggggcggtctcatcatgtacgatgtcagcaccgtgttcgacgacctcatgacctaccacctcaaggacatccccaccgtcatcctcatcggcgtcaccggcgccctgctcggcggactctacaacttcctcatgataaaggagaggtggagcgcacaagctgctgttagcggccaccgtctccatcgtgacgtcgtgctgcgtcttcggcctgccatggctggcgccgtgccggccgtgccccacgacgggtccactttcgtcgccggacgggacctgccacgcgctgaaccgtttccggcggttccactgcccaaagggccactacaacgatctcgccagcctgttcctcaacatcaacgacgacgcgatccgcaacctctactccaccggcaccaacgacgtgtaccacccggtttccatggtcatcttcttcgtggcgtcctacgcgctcggcgtgctcagttacggcgttgtggcgccgtccgggcttttcgtccccatcatcctcacgggcgccacctacggccgcctcgtggcaatgctgctcgggggccgctccggcctcgaccacggcctcgtcgccatcctcggctccgcgtcattcctcggcgggacgctccggatgacggtgtccgtgtgcgtcatcatcctcgagctcaccaacaacctgctactgctgccgctcgtcatgctcgtgctgctcatctccaagacggtcgccgactccttcaactccagcatctacgacctcatcctgcgcctcaagggcctgccccacctcgatggccacgctgagccgtacatgcggcagctggccgtcggcgacgtggtggccgggccgctgcggagcttcggcggcgtggagaaggtcggcaacgtcgtgcacacgctccgcaccacggggcaccacgcgttccccgtcgtggacgagccgcccttttcgccggcgccggtgctctacggcctggtgctgcgcgcgcacctgctggtgctgctcaagaagagggagttcctggtggcgccggagcggtgcccaaaggagtacgtggccgagaggttccaggcggaggacttcgacaagcgcgggtccgggaagcaggataccatcgccgacgtggtgctgtcgccggaggagatggagatgtacgtcgacctgcaccccttcaccaacacgtcgccgtacacggtggtcgagaccatgtcgctggccaaggcgctcgtgctcttccgggaggtcggcctgcgccacctcctcgtcgtgcccaaggcctgcgataggtcgccggtggtcggcatcttgacgaggcatgacttcatgccagagcacattctggagctgcaccctgtccttctgaggagcaggtggaagaggctccggtggcagaggggcgccatggccaagtacttccgatcgctcatcgtgtgggtcgccaacagcggctgaagcagatacattgctgccaggaaactgctgctggctcctgcagattgaaggagtcatcatcattgggtatttgtgaaataacaacacgtgttgatagcttcatatacatatatgcatatatatgttcagtcaaaattttgtcgttgtcttttggtactacgtttgtataattttcattttagtgaaagaagacgagttcgccacattgttttatgtcttctatacacttgaacaggtggcgtcctttggacgccctgcaatgactaaatgaagcaagtccctgctgatcacaggcaacagaaggtttaacccacagccttagtgaatgataaatgagtaagtatgaaagagcttagaggataaatgacag

SEQ ID NO: 30232 - DNA, 1441 bp, Zea Mays
agggtttcggacaaccgtctctttccctctctagtctctactgcttctcggccgtcggcggctctccgagtccggtatccccgtctccccgtcggcgtcgtcggggttgggttcatcacaccgtcccgtttcctatgcacgccgtcacgcgcagaggcacgaagcgccggtcgtcgagcaacaaggctgttgggcccaggcacgcagccaacggaggggccactgccatacggcgtgcattccgccacccgtgaagccacatcgtggttacttcccccagccgccaatcaaacctaccagttccagccagagccagccttccccttcgccatggcggcctccgccgcagctcaacgtagatctgcaggaagtaggacgacgtacgagagggcagagctcgaggcgctcagggacgccccgtcgaaggaggctcacgcgcggctctgggccgacgtccgcgctacccttgtcgcctccgggttctccggcgtggcagagattggtgcacacagaaatggggatctggcggtttgtcacgaacaccgatttgtatctgctcatgaccatgctgggacgtctggagtggttgaagagtcgtttcatcaaggtgaagatgttgaatgtgaagatgacagtgatgatgactataacggaattctgaagcctgcatttgctgtggatggagatccagattttgagtctggtgagccacttgatggctttgagtaccttcggcgtgtcaggtgggaagctaaccaaattcctagagtcaaggtggccaagatatattcaagtgcagctagaaatgagcaaactccttatatgccagaaattccggatataccaaagtgcttacctgatttgcgtgcgtcaaaacaatgggaggacagatttatcgtcgactttgaggaaaccaggatggtgctctctgagcttgacaattctgatgaaccatctgtatctagtgggacaaaaatctcaacaaaacctggcagcgggacggagccacagactgacccgacgctgacaatgattcgcagcatggatgcagtgtcaagagctgcgacacttcggaactacatcgatatgattcagagcttggatgcactatcaaggaacaactgcatgtggctcttcgcactctgtgttgccgttcacactcccctggacgcggagacatgtgcctcactgaggtccttgctgcgcaagtgcgccagcatccttgccaccaagactgagatggacgatgaagtcgtaatgctgaatatactgatgacaatttcgggaaggtattttggacaggacgaaagctgaaaacagcaattgaaattggagatcaggataacaccattgcaatgctgaattctcaccgatagtttgatgtcagaatatattatatttattattatatatgtgaaagttatgtttcattttcttgtaa

SEQ ID NO: 30233 - DNA, 6180 bp, Zea Mays
atggcctcacccacggtcgcctccccgatccgggcgagccccgtcgacaaccccaccgtcgcgccctcactggcctcctgccgctgcgccttatcgctagatgctcgacatccccatccgcgcgctcgaggcagaggccagggacaccaagatgagcccgaccgcgaccgcctagccatcagctccaaagaagaagccaggggaccgatggacgtcagtgttccgtcgtggtggcccgctagatccatattcagcaagaaagatatctcgccatgccggcccagggccgcagcccgtcaccttcctccccccgcacccgccgtgacagccgcctccccacgcccgcttacccgactggccgcacaagatgcccacagtggcccccatcgcgcccacccgctccccccatccaccgcgacctcagccgccacgccgacgccatccccgtcctctagcgcgttgtcgccgtcgtcacaccgccaaaggtgcctgccccctgctaccgaggtcgacgaccagcagcggcaagctgccgagctcgacgacacgcacgccatgcttggccatatggacgagtccatcgcctgctacgagaaggggctccagatccagatgtccgcgctcgatgagcgcaatccctgcctccctgagacctgcaggtaggtgacaatgtcatcaagggcccctccccctttgtcgcttctcgatctagatctcgcctctccctaaagcacgggttgcacctccccccgtcacccactccttccttggcttctcccgggaaacgaccttcagtctttacaggtatgaggtcttattgtgtgccatcattttcttttgctattcattcccgaatccccactgtgccctccagtgatgatggggtatgagctctgaataacaaacaaggtgattgacaaggtttaggaggaaacttccaaaagccggtcaagtatggagtgcttaacatcactttggcaacttatatttttttacatgtttgctttgtttgttaacaacataatttatgggctgacaatgtgatcatgtattctttctggtagtcttcgtgtcactgcttgcagttgcaggggagggatcatggctttcttttattttccatgtgcaatgtttaatttaggtgatgaactccaaagcttatcccattgttttctagcaagagctaagcaatactggatggagaacatttatctttttaataacgagtaaaagcataatggcatgcttgtgtttagttctctgtttgttgaccaatcgctatatttaatcttgattttttttatctataacttgaatttcaaagattcaatattttttattcagacattttctcttctctagatattcttttatgcaaataacgcggttacactagatcagccaacattctgggaaataagctatatggtcagagtaagaggttcaagagttgatagttcaacaactttaactgagagcaaatctacaagaaaaaggaaacaagcaacctggaacctacaactgcaggagcttgcttgaaagtgaacaatcaaggttgtgtgtatatattatgcccgacatttttgaaggatattgcgagggccattgtatctgctggaaaaatcatttcaacttgtcgaacatggtattaggatacgaattggagtggtcaacagaaattctggacagatatgtcaaatttcagaatccacgatggtcctccaagaaataaagatgctcttgatcatctattgagaagtggaatactaattttttgctgcagcgtgatggataaaggtttttgcgtattcttgggtttttttcctttcctttttggctacacacaactctttttaaatatacattcagtaggtggcaatgcctcctatttccctaaaaatatagcgccaaagagttcaaaattgaattctcataatctgctattaggaaaagaggtcaacttctatattttttacatcaggtaatttggctataatacaacggcatgctgaggtcaacttctgtatttttttctgcaagtaacttggctataatacagcggcatgctccattctgaagctggtcaagaaataaatatagcacttgcaatattttccagtagtcaaacctctccattacttcaattctcgttctcatttttgactatgttcttcatgtcagttcaacataataattaagaggtcgcttgcccctgagacggcttcatggtattttatttgttttttacaaagtattttttaagcgctaaacttacagtgcactttctctattcgttttggtgctgcttataagtcttttgtgttttagatccatcgaagatggcgcttaatctcgagagctagggagatgaaatgccttttgtacatgatggaaggaaacaaattacgtacatgtatatgtggatcgaattgactgttgcattctgcctgtatttaagcaacggtttccacccaaaacgtctataatttggtccttcctagatgtgtcaaatgtgtttactgcactgcgtttgcttttgtggcagcgccctaatagttgtttataaagtctgatgttaacaaactattgtcatgctatgtaatatatagtcttaacatgttggtttgttgagtgttcgaatatcagttttatattattatgtcaggtgttattagtgttcaattttttaagttcttgttgtacatcctatcattacatgagacaatgttgtgatgtttacaatattgtgttatgtatgttatatcattttggtattatagtataatttaatttgtatcagtttagttctgtattggttgttgccaaaaaaaattatgagatattaaggtcgataataatgttcgtttttatataatcgttttgcactaatattttgttaatttttttgtataccgttgcaacgcacgggcacctaactagtatgagactatgagtacatcaagtgcattcccttagaactcttgttgtgtaaaaaaatgtgtaacatgtcttggtacagagattaatttggtttgtgttttttagactgcaattatatctgggttctcagccttgccatggttagtcaagcccctctatgattttatcagttgattcaggtggttgattatatggtggttcagagagctcgaggtgaatcacagagtacatatagatctctccactccagtcactatgttgggaatcctcagcctttggaggaatcatgagtgcatacttcagtggttctccagtcacttatggcgtaagatttgtctttggtgttacagcacttttgccactgttccgagtagcagagaaggacaactctggcaaactgtgaagaaaataaaagattttcacaagcggaatcttcagaatctgaataaaggagttcgtgggaatcagttgtaccaaaaactggttcagttttcgtattccaagcatactactggaagttcacactgatcggcgacaaactctcgcccaaggagaagttgaaggaggatcagcgtgaacacccactgaaagagagatggagttgaatgagaaatctgaaaagaatacgcaagaggtagatgagaagttccaaaacacaaacttgtatctcaagaacttagagatggagcttcgggagttacaagtgcttcataagcaatcagatagatctgaaagttttactgtgccaacacatgcacacactggtggtgcctgcatctagctattcagatcaaagcctgacaggtaccatagggcaaagtgaagaagaaacagaagagttgagcaagatcacgctagagaataaggatattcagcttgatatcaatataagagaagaatcttggagctcttcacaacaagtgaacttttacacagaaagtaccagctccagtgaggctgtatgtttatgagattgagatcctttttttgctctgtcgatccataagattgagattttttttgcttgtatacgaggtgtttgatggagccgaccctatggagctgcatgtttatgattttaaaggacctggtgtaaccttatcaatgtacaatagcgatgagtttattaggccttttgctaagtcctccatggatatggctctttcaaaaaagtcgtctcttcatctcagcaccaagaatacaatcatcaagaagtatgacgacaggcatggatcatctatgtttctacaagctcgcggtcacatttattaggccttttgctaagttcatggatatggctctttcaaaaaagtcgtctcttcatctcagcaccaagaatacaatcatcaagaagtatgacgacatgcatggatcatctatgtttctacaagctcgcggtgatcaacttgctattgggaaagaaactgcacgtcgtttgggaatgggtactaatatgtacccttcctctgctttactcagacagaataaggatgagtcaattgcttccttgccaattgatgaattgatcgagaaggctgatggctttgctggtgtctttccagaacacaagtatgagatcgtgaaaggcttgcaagcaagaaaacatatatgtggcatgactggggatggtgtaaatgatgccccagctttgaagaaggctgatattggtattgcagtagcagactctactgatgcaactcgtagtgcttctgacattgtcctaactgaacctggccttagtgtgattattagtgctgtgctgacgagtcgggcaattttccaaaggatgaagaattacacgatctatgctgtatcgattaccatccgtattgtgcttggttttatgcttcttgcgctgatatggaagtttgacttcccaccatttatggtcctgatcattgccatcctcaatgacggtaccattatgactatctcgaaggacagagtaaaaccatctccacaaccagacagttggaagttagctgagatttttgcaactggagtagttcttggtggttatttggccatgatgactgtcattttcttctgggctgcatacaagactgactttttcccgcggctgttccacgtcgaaagcctcgagaagaccgcccaggatgactttcagaagttcgcctctgccgtgtaccttcaagtcagcacggtcagtcaggcccttatcttcgtgacacggtcgcgcagctggtcgtttgtggagcgtcctgggttcttgctggtcttcgctttcttggtggctaagctgattgccactctgatcgctgtatatgccaactgggcgttcactgcgatcaagggcattggatggggctgggccggtgtcatctggctctataacatcgtcttctacttcccgctggacatcatcaagttcctcatccgctatgcgctgagtgggagggcatggaacctcgtccttgagcagaggattgcgttcacgagcaagaagaatttcggcacggaagaaagggagcgcaagtgggcgcatgcgcagaggactctccatgggctccagccgccagaagcatccatcttcgagaacaagacgacattcaatgagctgaaccagctcgcggaagaggcccgcaggagagccgagatggcgaggttgcgagaagtgagcaccctgaaggggaggatggagtcagtggtgaagcagaagggtctggacatctagaccatccagcagtcctacactgtgtgactgactgactgacgacgacggggtttatagaggtttcttcttatactatacaatctgtactaggtagcaataaggatcaaggaaggaacccctatatattggctgcggttcgcaggaaatgaatgatggtaatatttatgatgtcggtgtggtgcttctgtcgccaactctcgaccatactaccctcaactcacccccggcaccaccggcaggcattgatattcagagatgaggttttgaatgagacgttcattatttgtacgtatttggaaagtcgtagaacaacatgatcaatactttgttcagaaaaggaacgcagctggcactctagccctttctagtctgcaaaaaattactgcagcatttcgaatgttatcttatggggtagttgctgatgctactattgattcacccctagaagtattcacaaacatgaaatgcagttctcttcttcaagtttgatgatgaagatgtttagtactacatcctgatgaagatgttctgcatgcacatgtact

SEQ ID NO: 30234 - DNA, 1737 bp, Zea Mays
tatcatattttttcatgattatttgaatttggaattgttgaagatgtgtgacatgctgttctctcaattatgcctgagaattccatccacaaatgcgatgcaagttaggggtcttcagtcccttggtcaactttttggttatacatctaagaacatcgatagtcatttggaaacccttgcatctcaccaaagtattggaaataagaatatttgccggagtgagacattgcaagatattggcatagatcaatctggtcaatccacttctttctgtgaagcatcaatggcagcactgcttctgagagggctcgcgatagccccaatgcagcttgtagcccgtgtaccaacctctttgtttttctggccattgatacagcttgaaggggcagccagtgatgacattgcattgggtattgctgttggtagcacaggaagaggcaaccttcctggtgctacatcagatatccgagcagcactccttttacttttgatcggtaaatgcacagctgatcaggaggcactgaaagaggtagaaggcaatgagttcttcaggggtcttctggatgacacagattcaagggtagcatactattctgccgcttttcttttgaagagaatgatgacagaggaaccagagatataccaacggatgcttcaaagcctcatctcaaaagctcaacagtgtaacaatgagaaacttctggagaacccataccttcagatgcgtgggatattgcagttatcaaatgacctaggagttcaatgataagatcgtgatgacatttcaatggataaagctctaagttagaatcactacttctggctgtgtttattgcagagaacctgaagatgttccgaactaagaggaaacagtatgaaaggatcttactttggaatagagtatgaaatagaggaagcaccatgggagtaacactttttattttattttatgaactttaggcatttttctgcatcctgaacaaacttattctctgctctatggatgataattgcaatctcatgctcgaagattaatttttcctatgcatctgtgttgatggaccaaccctttccagtatcctgccacttcttatgatcaagattattttgtcgtttcttatgattgaaatgctaggctaccagaataacattctccatagtccctatttgtactatcgaggttactaatatttcttgtttgtagttttgcagatgctatgtgaatcatgtaaattattgctttggccagatgcatgtacagatccatgaatttctttattctttgttagactagtcacagtccaagggagtcacagattaacaagataatctgatgatcatcctgtgttatggacacagtgcattgtggtttaccaacctggacgacttgacaaaggtttaagccaaggtggcgtagatgtgactccctacaattttgtattgcagaaaccgttgagatctgaggcaaggcattatatatattttttgggcgagacatgctcggttcaataaatatttgtgtgttcgctttgcatatatggtaactgatcagaggagtgtagatttgtattgcggagtaacaatgtaaatgttaggtttgaatatactgatttcgagatgatgtaatccttctatactagcttagcttccatgttggttgtttaatttcgataagaggttgtttacttttatatgctgtttggtttacatatttgtgacgtgatgaataaccgataa

SEQ ID NO: 30235 - DNA, 2279 bp, Zea Mays
actgtcttgcctgttgcctctgcggctttgcctgcgctcacggacggtcactggctcacgctcccctcgcctgcgtcgcctcgcctagacaagagacaagacgcctagtcgcctccgatcgaaatcgaatcgagtcgggtgggctcgggcccggtcttgttgtcttgtctcccagctaggaatagcgcaacgagatccctcgcgcgcgcggaccccggagaggccgagggagggtgacagggcgtgtcctcgaccgcgaggggaatgggatcggagggacgggcctggaacggcgcgggcatggccgccggcagcggctatggcggcggggtagaggcgaaagcgaccaccacggctgtgtcggccgcggcccccgcggaggttcccacgtcggcggcctccgtcgacatctcgctgccgctcctgaagatgtcgcctcgcatcatagctctctgcaaggaattggtcgaagggtggtcgtcgattgacagctcgctcttctccatcgagaccgtgtccgggggcatcacgaatctattgctgaaggtttctgtcaaagaagacaacggcaatgagtcttctgttactgttcggttgtatggaccaaatacggacttggtgattgataggaaaagggaattgcaggtgagaatctgagtggtacgagattgtgtgttatagtcatattatactaacctagtaacctgcatcctatagtattctacattgggtctagtatgaccccttgtatttggtgtcatatttttatagtggcatattttcaattcttctagacatagcatagtcatggtcttgtagtagcatctgtcctaccaagtgcattaccttttgtttcatatctgtaccttttccctgacaaatggatttcatttcattctctgaaaattgctaacctagaatgatagtttttaagggttcctagactgtacacatagtataatttatctcggttctaaaatatttcctaatgcatacatctattaccgtcatggttaggcgataccatatctctcagctgcagggttcggggctcggctacttggaatatttgagaatggagtagttcagtcattcatctatgctcgaacactgtcaccagcagacatgaaagaacctaaaatagcagctgaaattgccaaggagctacgcaaattccatcaagtagacataccagggtctaaagaaccacaattgtggaatgatatattcaagtttttgaagaaagctgcagcattgaagtttgaggataacatgaagcagaagagatatgaaaagatctcatttagagaaatacaagatgaagttcaagaacttaaggatctcttggacattctgcgcgcgcctgtggtttatgcacacaatgacttgctttcaggaaatctgatgctcaatgatttggaagggaagctatattttattgattttgagtatgggtcatacagctaccgtggctatgacattgcaaatcatttcaatgagtatgcaggatttgattgtgactataatttgtacccagataaagatgcccagtatcacttcttcaggaattatctacacactgatagacctagtgaggtggatgcacaagatatggaagtactttatgtggaaacaaacactttcagactagcatcgcacatttactgggcattatgggcccttattcaggcaaaggtatccccaattgactttgactatcttggatacttcttcttgcggtatggtgagtacaagaaacaaagggagtcctgcttctccttggcacaaagctttctctccgagctaaaaaatggctagagcctgagaatctgttcacgagtttatactggtgtacgcatgctcggagcgggtacgcgttgtgatcatcgactgctacccagaaactctattatagcggttgtagcagcccctcattgttgtatctgatgttaggttcatcattgtctaaggactagtttggatactctagtatcgagctcaattcatgtgtatgagatggattcgggtgtaacttaaactaatttacacactaatccaactcaacacatgtggattggggtcaatactaaattacccaaacaaagcctaacagggaagtcaccagtggcaaattatgtacttatatttataataataaacacaatcctgatgggttgtgccctgttgaatttgttcttcgattaattctgccctgtgcaatctgttctgcacttccgagtatatagtttttaatgactgggtagtcctttgaaggtccg

SEQ ID NO: 30236 - DNA, 2202 bp, Zea Mays
cgcttgttggcctccgtcagcccgcgcctccttcctccgtcctccggctcggcggtccgccgccctccttcatcctccggctggaggccctcctccacccccgcctcgcggccctacactctcgttgggtcggcacccgtgcctcccattctctcctcttctctcgctcgagcgccgcggcctctgctcgctcggtcgaggctgaaggacgggacaaagcgcagattgaccaccgggcgtcggaaccgccgccgctgccgccgaaggggttataagatcagatggggacttcggtgcaggtgacgcctctcagcggggcgtacggggagggccccctgtgctacctactcgccgtcgatggtttccgcttcctcctcgactgcggatggaccgacctctgcgatacctcgcaacttcaacccctcgcaaaggttgcaccaactgtagatgctgttcttttgtcacatcctgacatgatgcatctaggagctttgccttacgctatgaaacaccttgggctgtctgcaccagtttatgcaacagaacccgtgtttaggcttggccttttgaccatgtatgaccatttcctgtctcgatggcaagtttcagactttgacttgtttactctagatgatgttgatgctgcattccaaaatgttgtgagactgaagtactcacaaaattaccttctgaatgataaaggtgaaggagttgttattgctccacatgtggctgggcatcttttgggggggacagtttggaagattacaaaagatggggaggatgttgtgtatgctgttgacttcaaccatcggaaagagaggcatttgaatggcaccgttcttggatctttcgtgcggccagctgttctgataactgatgcttacaatgctttgaacaaccaaggctatagaaaaaagcaggatcaagatttcattgaatcattaattaaagttctggcaactggtggaagtgtgctacttcctgttgacacggctggtagagtgttggaacttcttttgttattggatatgtactgggatgaaaggcgattgcagtaccctatctacttcctgacaaatgtgtcgacaagtaccgttgattatgtcaagagttttcttgaatggatgggtgatcaaattgcaaaatcttttgaaagcagtagagccaatgccttcttgttaaaaaaggtcacgctgataattaacaaagaagagcttgagaaattgggagatgctccaaaggtggttctggcatccatggcaagtttggaggttggcttttctcatgacatatttgtggagatggcaaatgaagcaagaaatctagtgctctttactgagaagggacagaaaatatttgctctccagtttgggacactggctcgaatgctccaagtggacccaccccctaaagctttaaaggtcactatgagcaagaggattcctttggtgggtaatgaactaaaggcttatgaagaagagcaagaacggataaaaaaagagaaatcgctaaaggctagccttgtcaaagaagaggagctaaaggcttctcatggatcaaacacaaaggcttctgagccaatggtcattgatgcaagctcatctcgaaaatctgtgaatgcttcacattttggtgggaacaatgatattctcatagatggatttgtccctcctttaaccagtgttgctccaatgtttcccttctttgaaaacactgctgaatgggacgactttggtgaggtcatcaaccctgatgattatatgatgaaacaagaagaaatggataatactctgatgcttggccctggagatggattagatggtaggatcgatgatggctcagcacgcctgcttcttgattcaacgccctcaaaagtcatttccaacgagatgactgttcaagtgaaatgctcattggtttatatggactttgaaggtcgctctgatgggcgttctgtaaaatcaattattgctcacgtggctccactgaaacttatcctggtgcatggatcagctgaagcaactgaacatttgaaaatgcactgcgcaaagaatttagatttgcatgtttatgctccacagattgaggaaactattgatgtaacatcagacttatgtgcttataaggtacaactttcggagaagttaatgagtaacatcatttctaagaagttgctagctctaaataatatcgaaccag

SEQ ID NO: 30237 - DNA, 1822 bp, Zea Mays
tccatgactgttctggaagctccaagcgttggcgaaaaaagtaagatatttctgcgaggcaaggaatccctcccccgcttctactctttcggttcgccggttcgccgtctcgcacacccacttcctacaccgccaccgagcactcgctcagtttcatacccatcctcgaagtcgcctctgtctagttcctgctcttccaccaccgcctgtgatgtatccccgaggcccggatgggggacgagatgcctcgtctcgccctatgcttgccactcccgccggcaacgacacgcgcgaggaggatgagatcaccaccgcggaggctcatgtggagaaagacgccgcgcggatggacgctgccctcctcatgcggactacgcccaagatggacgagtttcacaccgggggcgatctggactcaagtggaagtggaagcggcatctcggggccaagcgcctccaaaagacagctacaaagaaggggatcgtggcggcaacgagtcagcagcaacagagaagaatgtggtcgtggctgtaatgggtcagcagtttctgcaattttttggacgaccgagaggtgctgccgtttatgagtaactttccaggtaacagaatatcttatatttactcatctatttactctttgaaataattgctatcgaatgatggataattcttgcttttaatagttctatcaatttcacattgtttttacctaacaacttatgtctactatctcatagtgggaaaacagtatgccacaacatcatggtcagagtttggacattgcatgaagcacttgctggacaattgagaagaactcatgcctacttgcaggcatcatctcaaccatacaatgggattcattgaaatatcaggagggttgttgtacacgtgagtggaggtcgaacccttcttgtagggctcttaatgtatgaagtacgccatgctagctattgaatcaagttcaatgggattcgttaaaatataaggagggttgttgtacaagtgagacaaggtcagcccttcttgcagggctcttaatataagcctgtactacacgttcatccacgtcgagctcgtcggctcccaacgcaaccccttcttctctcacgagatcagtggtgaggacgacactggggatagagacctagggttctccaagtgggcctagaaactccatggcaacgtctcaggaaaaatgggcgcattgaagtcttgaaggactttcaggaatactaattttgagaattcgtggaaataaaaatagggttggctttatcaaactgcacaaaaaaatcagcagcacttctctttatcatgcaaggaaaatcaaacttaggagcatcttccaatttcgtcagcagctgagccgattgtgatctctgatcactatacaaccatggaaataaataatgcagctttgctctgcaaattttatacaatagttcttgaatcgatattgactactactatattcacaacgtcatccacaaacatcattctaagaaaactaacaacatatgatggtatgtaaagcatgtttagtgtcaaaaaatgatatgatatatgttaagtacattctataagtttttttttcttggaccatctcgcagtcacacgctaagatactacatatgactatctgcacaaatccttcaccacagttcaaactggccagatgtactccgcatggacatatgtttaggacaacgcattactgtttttctgtcattcaatgctattggccctctctactaacagtgcttcctgaatctcttctgttcgcagtgctgttcagtgttcttcagtacctgcaatagtcc

SEQ ID NO: 30238 - DNA, 2905 bp, Zea Mays
tcggagatacctaaaaaacgagcatagattttaatgcgcaatgctagaacaccaaaactattcgtggtttcaaaagatgggctcaaatttgccaggcttagttgggcctaaaaatttgctttcagctcgaatccacggtccaatctaacctgaaagattttctaaaaataaaactgacctgaaagagcgaaaggattctatactattgcttgagtgtcgccttgttcaacttctcgaccaaggcagagagagctttcatccggcagccgctgagcctgagatccctgcaccgcctcccgcccgcccgccggaatggagttcgccttagtcgagagtgaatcgttctctccttcctgccccacgcttatcatgccagcgctgtcgattggcaacgtggggcagctcgccgtcgaccttctcatatcctcgtcgagggcgaggcgggtggcctacctcgacgagccctccgtgctgccctgcgccggtaacgacgccttcggccctgacgccgtcggcgacctcgcactcgctctcgaagcttatgaatctacatctcataagctgggtttcattcagcaaaggtctccagttactacaggaatgatggtttcatttgcaaaaaatgttgctgatttcataaatagcatcgggaagaaccatattgtcattatatcaagtttagattctggaaagaggagagtgattgatgcatccaggtgtattacctttcaagttgcaatgaagatggttctgatccagaatatgagaaattggggtggaaaaagcttgaggattatgatccatctcagaaacggtggaattgtcttgctagcctagttgagggtggtggtctttcagaagatctggatgatgatactgatgagatgacaataaatgattactatgcaagcctgccatttgcagcactattctctgcctgcaaggctaaaggcttgaaagtttcttgtgtactgtgctactgctcggaaggcgacaacatgccagaatctttccagttagctgaagcaatatgcaaacttctaggtcatggccctgagaaattccatggaaatgggtcaaatggatggatcgttcccttgtcatggaaatcagtatatggaccaccacctgatatgtctatcttttagtgttgaattatgatcaggtaagtcaattttgatattggaaagggagctctatattttgtaatgtgtatctgtgttgtcattggctacaaattcaaacaattcacttacattcaatgattttggctagaaacagcatttccaaaagaaaatgagcttatatattccacatcatgggatttagtaaaacattctgcatatatgatacattggtttgcaacattgttatcgataactagattgaaacgagccttgttttgtaaagataatacttctattatggaagatctcttcttttgtttataggtcctctgtgtgaatttagcagctatcctttcctggaagcatgcaatttcagttaatagaatagtgttggcacaaaacggttaattgtcttcccaaatttctgaattattcttgttttgagcaattatattcattgaagattaacagctaccattgactattggactgcgtaagtttgataaccctaaaccagcgtcatccacattagcagtagtcaattagtcatcaatcaattgtctgttataatactatgatgacatgttaccataatgaataaaggcaactggaatggcccaaaagcacatcattccatgcaggccatgattcggtattaaagaaagcaacagtttgatcatcaagatgctgatctatgatgcaatctgatgtgatttcgtatcttctatgccttttgcataactgaatgctacaatagaaaatcttagaggtgggatgcgaaaattctttggtagtggtgctagcaaataagataagcactcagatatttgattttcttatacttctaaagtggagtaggtatgctagctcaatatctagagagtgaatatagatgattggttgaaaacaagtttaattagattcattccattataggtgtcctagtttttgaaaaaaatccggtttgagtctgacaaccattgaccataatttcagctataacttgtttatctgtcagtagagtctggtattgtctgccacatgttattttttttgaggtaatgtttgtctctgactgttgaccctgattttagctggagttattttatttatcagtagagtttggtgttacctccccacatgttttctttttgttgcttgagctaaagtgtgtcggttcagacattgaacatgaccttcctgcgacctgttctgttggtcataataaagttgttctttttctaagttttataggtgaagttgccatcacggaaaatgctgagtagaatcgaggatgttgaactcttaatttagacagtgtaccagaagtatccaggagggcaccatgatacttaacccttaaatgcatgaatcagaatatttttgtaactggtactgtggctactaagagtcagatctttgtcaactcaggtctgctaggtgcttacgcatgttgcttaccatcataccatgtgccgtttccattctaaccatggaattccaagcttctcgtctgccgttttggcagttttgcccatttggtttggttgattttgatgtggtggaagaatctttgctagtgcgtacccctttatgaaaagttgctactgaatggtggaactgttcggtgaggcaattccgtcggcgatgcctggttgtctgtgttaagtaaccctagttagggttatgtgggcaaataccgactttgcccctgaggggtctcatatctctatataaggaacctgtacaccccttcataagatagagaacagaaagag

SEQ ID NO: 30239 - DNA, 322 bp, Zea Mays
atatctttcatgtgtcgtcgttgaagcgagcagtgggttgtgattctacactaattccttagctgcatagctatctgatcccttgcaggtgcctctgaccattatgcaaacacgcctggtggagcgtggaggcgaattcctcactcaactcaaagtgacatggtcgggcatggcgaaggagtttgcgaattgggaggatgctgatgcacttcgcgagcagttcccagccacgccagcttgggggcaagctggttctgaaggtcgggggaatgtcaacatccctcatccgagtgagcacaaggacgacggtgagaagaaagga

SEQ ID NO: 30240 - DNA, 4306 bp, Zea Mays
cgtccaccgcatcaccgtgcccccgcccccgtctacgagcgaccctctgcgctcgcgcgaatcccgcccgagatcgccgccgatccgaagcaacggcaccgtgcccctccccctcgcgagatccgcgaccgccccatcccggcgccgcgggatccacgcctccgccctcgcccttccccacccccacccgctaatctcgcggtcgatccgcgcccggtcctgaccccgcctccgtcctcagcaccgccactccgtcccccatcttcggcgccgccgtctcccgctcccctggcacgcattcggggtccttgcgggcgacaagcacctccgtcccggaggcatctgccgctgcagcatagaccaccatgtcctcgctcggcagcaccgatgttgacgatggcaacgaggaggaggacggctccgcgagcacccccgagatctactgctgccactcccacgcagttcttgctcacgagatctgtgtgcaggttgatgtcctcgtggtgccacgccgacctcgccgccaccaagcgcgccacccatgtcctcaccgacctcgccaaaattgtaagaataggtgttgtcactgtcgtggtgtacgtacagttgagttttgagttagtgtttagcttccttaccagggacggatcgaagcaccataataagtgtttagctttcctccgcgcctcgggcggccgcggcacaggcgccgccgcgcccgctcgccgcgaagcacaaggacgagccggaccccgacgacggcaggcagagggtcactgtcttcttcggcacgcaaaccggcaccgctgagggctttgccaaggtccctactcaaactctgctcctctgtttgctgtgtttgcggtcccttctacagactacagccagagctcggtgctctgctcgcttgcttgcaccgctggctaagatcggatttgacggcacttttgggcgtggagatcttggtaccgtccagaagaagctcaaatctatttcatacacaagtgcatttgattttgttcctgatgttaggctgacctttaacaatgcgatgacttacattccttgtggccatgtagtgcatgactcgtgcccgcgccaggactcgttgccaatattgcactcttagtgcaaagaatagctgagcttgttacagataatatgggtggacctgtcaaagatgctaacgacatgctcacaaggtggctggagaagagtactgagctgagaacatcgctacaaacaagtttgttgcctattggttgcatcaagatagggttatcacatcaccgtgccctacttttcaagatccttgcctatagtgttgggattccatgcaaacttgtcaaagggagcaattatactggtggtgatgacgacgatgctataaacataattaagatggacaatgaaagatatcttaagttggaaaggcaattcgttaaattctaatcgaaaactcggcctgaatcgaacagctggatcatcaagtactgttgatgctaatgtggatcctactgtattgccacttgaacctaaaggtggccaactgcctttgttcagcagtggtgattggatgtcagacattgattctggatatgaggcagcagaaattgcagcttctactcaaacctcttcgggtgtcacaccatatctgtgttctgctggaagtgtttttggcagttcatggatgctggttaatcatgaccaatcagatggaccatcaacttctgctggtacatcatcgcagcagaaagttgtacctcaaagcgagcatcagcggaatttaaaccgccttccagatctgcaggaaattccagagtcaaaaaacctttttgctgaccttgttccttctggggataataagtccaagaaaacttcagtaccattcaaaggaccagatcataggaacaatgagttgcaaaagcgcagagagaacattgtccctaatgctggaagaccacatcagcggttagttatgaagaattggtctccttacaatgatgtttccaacaacaaacagtacaattatgtcgaggattcgtttgctcgtagaaatgttggtaataatgctgcaccatcatcatcccagatgccacgaccagccgcaagatctaaccttaattctagattgcataatgatgcatcatatcataattatgatagcattatggctggtacctctgccatgaacattacatctacagctgagaccgggaaggttcctgaaagggttatgcgtggtgatttggacaaaggccaaacaaattatagattggaggatcaacatgtcatagttcaaccaccacagggaagacttccatggggtattcctgcagaaggaagcgttccaatgaatagagttcagagtcaagcaaaacaacacttggaaaacatggatgcaaagcaagaccataagaaattgctccctgatccaaaaaaatctccccttgacaaattcatggacacatcattgccttcaagaaacatggacatgaggtcacagaggcttgacttcgatgatgtctctgagtgcgaaattccttgggaagatcttgtgattggtgaaaggattggcttaggtacttattttgctaccaagttttgatatacactcttctgcttttgaactactcccttcggtttcgttttaactgaggtcctagccttttttgtgtgaatgttaattattgatgttttacctattataactattttatgaccatgctacccttcattaatgataagctaacgcctcgtttcctccaacgtttcgtttgccgttccatgctagcgactgataacaagcagtacgccagccaaaaacagcaaggcgcgaatcgcgatagaaaaaaaacggcagtgcgacaatgtaaaatagtgtcctgaaaaaaaatgccaagctatgtaaaatatgccatgcaaaaataaacgtgctatggcaagactcgaacccaagtgctcgggtgtttttgctatagcaagcaaccagtaggcatcaaagcagatctggttgaggtggccacgatacatatttaataagggtacaacaggaaatcacacataattaatcactccttggtatgctaaatcatgtcctaaatgtcaattaaaacgaaactggagggagtaataacataaagctgttttggaaactaattttaaatatgctgaactgtatttcaagttgttagctttgatgggtatgctttttattggttgaataggagtgggttggttgcttgaacttgcaccttcctgatctctgcatgaaaactattgattgatttgcttcgttcaataggttcatatggagagatttactgtgctgactggaatggaaccgtaagtagttcattcacccattttagttttttgtatcttgagcttggccatttgttcaagatgttctgtggaagccataaaagaatcagatgagaaaccaaatcatggtcaatgcactgaagttttcatttattttcaggaagtagctgtaaaaaaattcttggatcaagatttttatggcgatgctctggatgagtttaggagtgaagtaggtgaacttttatctgtttctatcttggagttttcctaaataaactattcaattttcatatttactcagttcaattgttgatttattgtttgatatacggatatactttttgacaagattcgaattatgcgtcggctgcgccatccaaatattgttctctttatgggtgctgttacacgccctccgaacttatctattgtatctgaatatattccaaggcggcgaccagaatatgcatcaggcgggaggaatggggcggtcgctggagctgctgctgatccagtttttgatgccggataacgacacacgtcggcaggcggaggagcagatccgacggctggcccgtgacccgcaggtggtccctgcgctcgtccaccatctccgtacggccaagacccccaacgtccgccagctcgccgcggtgctactccgcaagaagatcacctcccactggcccaagcttccccctgactccaaggcatcacttaaacaagcccttatcgattcaatcacactcgaccacaggatgcaaagatttttcaaaggaactttgtgattgatctattaagttacgaggacaattcataccgctatgccatccctgcaaacatacaacagggacttatataggtctacatgatattgatggttgcaatgtagtggtgaaagggatagattaaaataacaaaatttatatgtatagccaggatcatcaatggattacaaaatcttttctcataacaatataac

SEQ ID NO: 30241 - DNA, 3348 bp, Zea Mays
ggagactggagttcacaactgttttcgctgtttctctctcccgtagcccagtttacctcgcctagggcgaccaccgccgccgccctacgccagctgcccaggtcttgggcggaccctttgccggcgacgagcacccaccacaccagatcaaactctagatattgccactctacgtcccagcatcctatgaccacatggtttagacagtgctgtccaggtggatgatgaattgtggtgcccaaacggaggcacgtggcacgcctcttgaagataggcagttcaagcttagctgaatgtcaacttgcctccacgtgcaagatcccagaaacattgctatgtctcgtccgcttgattttgctgtgcttaaatacaaaaaccaaaagcttgcggaacaactggaagtccacaaatttgagttctgtgctcttgagagtagatttaatgatctaaaagagaaacaaaggacacataataagacacttgttctagtcaaaagttattgggagcgactcatagcagatctgggtatagtttctgtttgcaaaaatgaatcttcacgttcaagctgcagtacagggaacaacaatatacgaaaggactttttaaatggacttttggaggctggtgccacagaaagttcaggttctcccaattgccaactaggaaatgacgtctcttcagaacaatcaacaacaattgatattctgcagaagctattccttccatcaagtggtccatggcatgtgaataacgagtttgtttctgctgctctcatgaagttgccagaaaatgaacacagcaggcaattgcacaatgctaccagcgatgtgttatccaagcttcatgtggtgatgcgtacagtagataatcttcacttgaaacacaggcagttagcagcgaactatcaaaaacaaagagattcgagtgcctggaacagagctgaacagaaacgtctgaaagaggagttgactagtgttgttgccaagttggaaggaagcaaacaaaaactggcagtactgaaagcacagggagacaataaacaagcaacaccgatcctggttcctacgctgggaaacaaaaatatgactgcagaaaaggtgagagataaacaaacagaactgcaagatcttgaagctactcacaaggagttaatggaattgatttcaaagcgtctggaggaaattagaaggctgcatacagagagaattgaaattttgaacaagttagcaacttttcagaatatactaacggatttcaaaagcattcactcttccaaagcttttcaacttgtcaatgaccaacttcagaagtcacaagcagaactggatgatcaccaaacgttgttagagaaattacaggttgagatggatacctttgtttggcgagaaaggcaatttaatcaaaaagttgatttggctgaaatcccccagaaggtttctgcatactgtgtgtctagaattgctgaccttgaaaaggatgtccagaaactgtgtaatgaaaagaatatgcttgtgctgaaacttgaagaggcttcgagagaacctggtcggaaccaggttatctcagagtttaaagctctggtgtcatcactaccgagggaaatgggtgccgtgcaaagtgaactgtccaaacacaaggatgcttccttacagttgcattctttgcgagcagaagttcattcactttctagtatccaaaccagaaaggaacaagaaattgaagaaatgtcatttagatctgcccatgctggatctgatataagccaacttcaatctctggtccgtgagctgagggaaaatacacaggagcttaagctatttgtggagttgtataagcatgagtccactgattccagacagctgatggaatcgagagatagggaactcgctgaatgggctcgagttcacattctcaaatattctcttagtgaaagtaaattagagcaacgtgtaatttcagccaatgaagctgaagcaatctctcagcagaggttggcaactgctgaagctgagattgctgaattagggcagaagctagaaacttctaggagagatctagtgaaacaatctgatatactgaagtctaaacatgaagaatgtgaagcgtatgttgtggagatcgagagcattggccatgcctatgaagatataatgtcacaaaatcaacaattgctacagcagattattgaaagagatgatcataataccaagcttttcatggagggtgttaaatcaaaacagtcacacgatgctttgcatttggaggtgcgctcgttgcaaagaaatttgcagcatgcaagtactttgatggatttgtgcaaccagaaaactatccgcctagaggaccagctaagaggttggtcagagcggttgaggagactgtcagaggatggaatgcagcagtctatttcattgggcaattatcaaaaaaagctgtctggtatgcatggagaagctccaaagctcaggcagtcaatggatgttctacaagcgaaggctgggagcaatcggctggaaattgctgagctgcttatagaactagagaatgagaggtttggtaaaaagagactagaggatgatcttgatctaatgtcaagtaaagctaattctctaagagagaagacagataattcagcagttcttcagaaacttctccatgaggccaaggagtacaggggaatattgaagtgtggtatttgtcatgataggcagaaagaggttgtgattgccaaatgctaccatctcttctgcagtcagtgcatacagaagccacttgggagccgtcagaagaggtgtccatcttgtggactaagcttcggtgttaatgatgtgaaacctatctacatatgaaacagaaggttggcgcctgtgtcgcagcaccaaaacaaaactgcttggcgcttactaatttccggtatatggtaggcggccatggtaattcagtcggtgatgtagcataagattatgtagcatttaagttgctacatgtgattgctggtacccgctggcatatatgatgctggtgttacctcaagcgccttttgtaaagtctgcttgccttgcccaatctggtagaatagcctgacatcgtcaaccattagttccttttaggagaaaaaaatatccaacaaatgaggattgatgcttcctgcaatagtgagcaatgtacaatatatagctttagtcagtttcattgttgtagctgacagtaagaatgtagttttcttttctttttaatataccggttatccagtttgtatgtttctggagtttgccaattctgtttatcaaaaaaaggagatttagtcatttctaaccatttttttcttgtcacgatatccaaaattac

SEQ ID NO: 30242 - DNA, 1198 bp, Zea Mays
ctacgactagggcagggacatggtgcacacataaaacatcacagcacgcatcactatagctcagaagatccggtccattttccagctctaaaactaaggcatagcggtaaacaccaccgaagtctcagcttctccgaggaaggggagcaattgttgaagcagccacttcaccttggggccatacagaaatggcggcttcttgcgcctccacactccctccactttccttcgtttcctcctccagttcaccccgccgattcaggcgctctggtgtggtggccatggccagcgttgggcagaaggtgtatgcgcccggtgtggcggtgtcggagggcaatggcgggctgccgaaaatcgacctcaaatccccgcacgggagcgaggctgagatttatctgtttggagcgtgtgttacttctttcaaagtccctaatggcaaggacctgctctttgttcgaccagatgctgtgtttaatggacagaaacccatcagcggtggaattccacattgtttcccccagtttggcccaggtcccatgcagcagattcagaagtcacagaaggagatccagctgtaactttggaactgaaagatgacacttatagccgttctatgtgggatttcagcttccatgcactgtacaagggaagaggtgacttttccaggattcgtcgactgcgtctaccttggtgcaccaagtgaactcatcctggacaatggattgggtgacaaaattgccattgcaaattcaaattggtcagatgcagtcttgtggaatcctcacttgcagatggaggcctgctacaaagattttgtctgtgtggaaaacgccaagattgaaatggtacaactggagccaaaacaatcttgggtggcagaacagaaaattgaactagtctgatgataatgtcttgcagcaactgcatcaagtagagtgagacgcaaatggcgctcccccagtgtcattcttcatggcacatgtcatcacaataactatacatgtgatgttttctgttaaaaagaataaatgatgcaaatcatgaatttttttctagcagtctgatgtgtactgaattgcaaatgtacaatttgaactgcatggatctgttgaaataaagggagtgcccatttgatctttgacatatctaatagcttttgcttatgctactgaaatatgtttctccagttcgctggcaa

SEQ ID NO: 30243 - DNA, 2346 bp, Zea Mays
cgctcctccgccgcgacgcaacctactcctccctcccctcctctgctttccccccatttcgcgtctcggggtttggaccagccacccggcggaggcggccgggcagactgggccgagcgaccggagcgccgccgccatcggcaaagccacgggacggcccatggagtcgcgagcgctcctgcacgcccggcccgccgccctccctcaccgcgccggcctgcgcctccatctcccgctcctgcgcccgcgtgcagtctcccgctcccccgccgccaagcccgcgctccagtccccgctcctcgcgtcgaggggccccttccttcaacggcacgatgcggttctgggcaacgggttcgtgaaacggagagcggccagcgctggcggtgatgtgtccttccgcgcccaggcggcggcctcggcggcggtgccggcgccgcagccggaggagtccacaaaaaagctccttggcatcgacgtgaagacgctcaagaagatcgtgccgttggggctcatgttcttctgcatcctcttcaactacaccatcctgcgggacaccaaggacgtgctggtggtcactgccaaggggagcagcgccgagatcatccctttcctcaagacctgggttaacctgcccatggccatcggtttcatgctcctgtacaccaagctttccaacgttctctcacgggatgcgctcttctacaccgtcatcttcccgttcatcgccttcttcggcgccttcgcctttgtgctctacccgctcagggacgtcatccatcccaccgcgctcgcggacaagcttctcgccgcgctcggtccgagcttccttggtccggtggcgatactgaggatttggagcttctgcttgttctatgttatggctgagctctggggcagcgtcgtcatctctgtgctcttctgggggttcgctaatcagattaccacagttgatgaagcaaaggaattctacccgttatttggccttggggctaatattgctcttatcttttctgggcgtactgtgaagtatttctcaaatttgcgcaggacattgggtcctggaattgatggctgggaagtatctttgaaaggaatgatgagcatagtggtactccttggacttgtcataacttccatctattggggagtgaacaagtttgttttgaatgatccttcacttccaaaggctgatcgtaagaagaaaaaggaaaagcctaaacttggcatgaaagagagtctgaaggttctgctctcctcgaggtatgtgagggatctagctaccctagtggttgcttatggcattagtatcaatcttgtcgaagtcacgtggaaatcaaaactcaaggcacagttccctagtccaaatgaatattcatctttcatgggtgatttctcgactgcaactggaattgcaactttcacaatgatgctgttaggccgtattatactacggaaatttggctggggtgtggctgcaaagatcacccccaccgttctgttgctgactggtgttggattcttctctctgattttgtttggacagccactgactcctatgcttgccactatgggtatgacccccctactggcagccgtttatgtgggtgccatgcagaacatatttagcaagagtgcaaagtacagtttatttgacccatgcaaggaaatggcatatatccctttggatgaagatatgaaggtaaaaggaaaggcagccattgatgttgtctgcaacccactgggcaagtcgggcggcgcacttatccaacagttcatgatcctgacgttcggatccctggcaaattcgactccataccttgggggcatactcctggtcatcgttctcgcgtggctaggcgcggcgagctcattggacaagcagttctcgagcctggctaagcaagacatggagagggagaaggctgcccaagaccaagggaaactagaacgctcgctactcagtaagcctgcagaaggcggcactggtgatgtactggtggagcagcagacaaatgggtcggcgacgagcaaagctactggaacagagagctcgccatcgaactcatccctccctccccccccccccccccccccccccccccccaattcaatagatcgtagttaggagagtgattacagcgagcagaaatagtcggcatttaaaataattcgtggctttcgagtttgtaacagcgtgcggcttcaagcctgcccgtaatcttcctttgtaataataacatgagcaaaatcttgacagccggcagcgaatgtcgctctggagatggcaaatgtgtgttttgaactgaatggtaaatgtgcggttatctcttgaatagtatcttggct

SEQ ID NO: 30244 - DNA, 5978 bp, Zea Mays
cgcgcatcgcacacgcgtctcctccctctgctcccagtctccaatctcctcccttccccactgcggcggaagtccaccaaagcgaaaccaagagcggcccgaccagatccaccttcttcctccccccttcatgcaaccaaaccctagggactagggctaattcccctcctcctcctactccatggcctcggatttcgacgagaccgacgaagccttcttcgacaagctagtcaactccgacgacgacgacgatcccccggccgccgccgccgtgggggggctcgctgcgctatcgctgaccgatcaacccgacgcgccgccgcctcgcgagtccgagcctcgtgaccagcctgctgctgctgctgcggcggcagcggcaccgacggaggatgcggagcgtgagccctcgccggaggtgtatcctgcggccgtgctgctgcatccgccccccgacctcgctgccaccgtcggggcagatccggccggggacctcctgccggaagacggagaacccttctccggggccgcggctgtgccagaggatcatcagggcctggagccgtcgctgtcgtcgtctctctcagcaggcaccggcgatggcagcgcgccggatcgcaccgtctctggccacacggagagcaatgccagttcccagttggattccagcacagctgcggaggggtctgggcatcagagcgccaaatcgcagctggagtacacggatcccaggtatctagagagcctctaccctggctggaagtacgatgacgctacgcagcagtggtatcaggtagatactctcagcgcgcagagctatgctgctcagaatactggtgctgctgtggcagaccataggagtgatggtgaccttcagcagaagtttggtggttcttacctgcaaaacacttcacacgcagggactgggcttgaacacaggcagacggcttctcagcctgagactgaggctggcaatcagcctgcagtggcaccacagaaagagggggaggcacagtgtgaacccaagccgatgcatacagaggtgggatatggggagagcaatgccacttcccagttcgattccagagctactgctgagggatacggggatcggagcgctgatgcgcaggtggagtacactgatcccagatatctagagagcctctaccctggctggaagtacgacgaggccacacatcagtggtatcaggtagataccctcaacacacagacttatgctgctcgtgatactggtggtgctgtggcagaccttgcgagtggcggtagtgttcagcagcaccaacagtttagtggttcgtacatacaaaacacttcacatccagagcctgctcttgagcttacagagccgacttctgagtcaaagcctcagcttgagcctgcggcggcccctcctcagaccgatgcttatcctgcggtggcatcacataaagaggagcagaaagagcatggatctgtaccggtgcatactaagcctgaagctcaggagattcctgccaatgctggtgatactgccacagtgacagagggtgggtccccagggtcagagaaaggcatccataccgccgtcaagcaagtgcagtggaacgactttggtgccagcactggtggggcggatctatttggtgacctcctgcccgatggagctgaagatgacttctttgagggcaccgtccctgtcagccaagacgtctcatccttggtaggtgctacaaatgttagcgcaccagatcacagcttctctgcaggagtgtataacactgccatgattagtgctggacacagcttctctgacggagttgataaaaatgctaactctcatttcggtcccagtggaagtagtgcagggtacggggatcaaagcactaatgcacagttgggctccactgatcccaaatacctggagagcctctacccggggtggaagtatgatgaggcgacacagcagtggtatcaggtagatacccacagtgcacagagttacgttgctgataatactggtgctgttgtagccgttgggagtgacaatacacagcaacatcagcagcagtttagtgcatcgtacttgcaaaacaatttacatgcagcacttgaaaccattgcggaagagagcagcaccaatgccatgagctgggtccagggtgggaccaacacaggacccccagaatacccaccgaacatgctgttctacgcagaatacccaggatggtactttgacaccaacactcaacaatggcaaacacttgagtcataccagcaaagtgttgcacatgttgcaactactgcagcagcctcagatgggttcgcagggacatgccataatgtagctcattacactgaggattcttatgcaagtagctataaccagcagagccagtggcaaccggattcgttcggtaataccatgcaggctgatgttttggggggcaagagcttgctaggtagttcctatggttctaatcagcaggctgggaatcagattgggcaacaggccaatgtggactctttaaatcacgagcctcatgtaaatacatttatgccttctacaggtcaatccactggtagtgagggaaatcaggctagctataagagtttcggatcttttacagggaatcagagttggtacagtggtttggagcattctacaagtaaggaattaaggtacaaaggatttgaaccttcaacaggtttccagactagtcgcaaggaattccagcctcctaaagatcaccaggctggtcacatggcagatgaacctttgacaagatatgggtatggtagttcaaatggggtcgtcaatacacaaaatttcgtaccaaaagagggtatgcacaagacacaaatgcatgatgactccactgcgcatacttatgctgcaagcaactattggggtactcagacctccatgggcagtgctcagcagcaactgactggtacaaatggtccatcccaacagtttggtttctcaccacatgagcagagatcatcagctggacgcccaccacacactgtggtatcctttggatttggggggaagcttgtagttcttaaagaaaccagctctatggctgcaaactttgacagcggaaatcagggcaattctggtcgaacggtatcagttcttaatattccagagattgttgctgataaaattgatcattcaagcatcgctaacggtggtgcatttagctacttccatgctttgtgtcgccatcctattcctggccctcttgttggtggaagtgctgcatcaaaggatctgaataaatggcttgatgatatgagtggcgtatatgaatcttctcagacagaattccagggaggggatgttcagaaggtgcttatttcgttgttgaaaatattgtgccaacactatggaaagcttcgttcatcctttgggtctgacccgtcacaagagtgctaatatgaaagggtatggagctgttgtccattgcatgagaaatcttccctcagaaagccagattcagactactgcccaggaggttcaaagtctcttggtttctggtagaaggaaagaggcccttcaccaggcacaagaaggtcacctttggggccctgcactgatccttgctttacaacttggtgataagttttatgcggatactgtgaagaaaatggcccactgccattttgtttctggatcacccttgaggacactgtgccttcttattgctggacaacctgcagatgttttcagttttgagaatcctgttaacagtggtttgtcttctccccaacagcctgtagaggctgctcctaaaggtatgctggatgactggcaagagaatttggctattataacagcaaacaggacaaaaggtgatgaccttgtaattacccgccttggggattgcctttgggaagagaaaaatgaggttgcatctgcccactcgtgctatttagttgctgaactaaatattgattcgtactctggaagtgcaaggatgtgccttattggtgcggaccacttgagatgtccgcgcacatttaccagccctgaagcaatccagagaacagaggtttatgagtatgcaaaggttcttggtaattctcagtatatcctcttgccatttcaaccatacaagctgatatatgcatatatgcttgcggaggttgggaagatttctgattcactaaagtactgtcaagcatctctgaaggtgctcaagtcctctggtcgtgcacctgaactagaagcatggaagcaactgtttattaccctggaggaccggatacgtacccatcaacagggcggttatgcaacaaatcttgcccctggaaagattgttggaaagcttttcacatcacttgataaatctttgtcccgaatgatgggtacacaatctgcaccgttgcctcaactgccgcagggtgctgcaaatgagagaggtgtttattcttctcctgatacaaaagtagtaaatagtcagtcagtgatgtccatggcaccattagtgtcatctgcttcagagcagtctatgagtgaaattggaggaaatagtgtctatggcagggaagttgcacataacagaagtatttctgaaccagacttcggcaaaaccccccaacagggtgctgctgtatcaagtaaggcacagagcacatcaggttcaggcagttcacgctttggatggttggtgcagaagacaatagggcttgtttcaaaatctcaccgccaggcaaagctaggggaacagaacaagttctactatgacgagaagctgaagcggtgggttgaagaaggtgctgagatccctgccgaggagcccccacttcccccacctccaacaaaagtgccattccagaacagcgttccagatcccaactccaatgctcctcccactggtggaggttattcctcaaatcctcccgagcctagttccgggatgccaccgatgccacccacccagaaccagttctcagcacgtggaaggatgggtgttagatcaagatatgtggatacttttaacaagggtggcggtggtggtggcgcaaatgccttcggagtagcaacatcttatagcaaaccagcagctccttcaatgtccggtgcgaagttccttgtgccaactccagtcaatgttgcttcagaacagatggctgagctaggtgcccacagtgaaaccgcccgacaggatgaatcgtcgtcctcaccagcgatggaaacatcatttagttcgccgccatcactgatacagatgcagtcaagcattccgcggtacccaagcggtgacaacattccacggtacccgagcggtgacaacattccgcggtacccgagcggtgacaacattccgcggtacccaagtatggataacgtcagctcccccacaggcagcattaacagctcgatgtcaaggtcaagagcgtcatcatggagcggaacgtacccagagcagttgagcagcactgccgcttccaggtcacctgatggacagatgacgcagtcaccatcgatgcctggaagaagacctccgcacagccgttccaacagcgcgtcttcttccgcccagctcaatggtttgggtgaggatcttcacgaggtggagctctgacacctggccgcagattttgaccataatgtgatttatattaatagctgcatgtgtctagagagcaaagcaaaggaaattaaagtgcggtgtccctttttcaatttttttacatgtgaaagactgtggatgccgctgcattgtacagatagttgactcgttcgccagatgaaaaatgtataacaagagtcgtaggttcaagatagggagaagatgaaaccgtgatgattcatcattgttaaaaagatggactgtctgttggaaaaataaagctgattaataaccgcaataatgtcggtccgcatcttggtgttcatattcttatttgtgtgtatgcatttctttgttcctgtgtattatattactttgttattttgcgagtcactggag

SEQ ID NO: 30245 - DNA, 1982 bp, Zea Mays
tttttattcccggctaaaaccattttcttttcacaaaagattacgtgccaacttccaagaggagagctcggaaaaggaaaagaaacgaaagaaaggaaaatcgaggtagaagaaggctatgtgatgtgaggggaaattacgtgagatataagccaaatccattgaattctatcgttagctggctgcttgagctgagttctttgattggcctccgtgctatactaatttctgaagacctcctggaggaattctctgcttcatttctcgagcggctcttacccgcttcgccggttgtccgatttgctgtgaagcaggagagcggccgccttcagtcaaggaaaatcgctgaagacagccgcagattgccagattcgtagttccgcttctgcttcggcgcacctgttcggtgtggaatgatggaggtgagcccgtctccggagcaaggagtgatggcgggaagggagccgttcgggctgccgaagaccccggcaacgccgccgtcctccgggggcacgcagggcctgcgcatggcgtacacgacggacggcaccgccatcttcaccccggtgagctccgtgccgcccgcgacggcgacataccagcccgtgggcggcagcgccgcgtctgcttcaagcttggctggcgtaggaggcaatggtggcgcgcccgtgcactcgggtggcgcgggtgagccggggaccaagaaaaagcgtggccggccaagaaagtacggccccgacggctccatgtcgctggcattggtgcccgcatccatggctggggagccggcgccggcggctcttggagcttccggtcctttctcgcctaacggcccgaaggcgccgaacactgcgccgtcagcgtcgccggacggcgcgaagaagcggggccggccgaagggctccaccaacaagaagcacgtggctgcgctcgggccagcgggggcaggttttacgcctcatcttatttttgtaaaagccggagaggacgtatcggcaaagatcatgtcgttctcgcagcacgggacacgcgcggtctgcatcctttcagcaaacggcgccatatcaaatgtgacgcttcggcaatctgccacttcgggtggaacggtgacatacgagggtcgtttcgagatactgtctctgtccgggtcgtttcttctgtcagagaacggtggccagcgcagtcgaactggtgggctcagcgtttcgctagcaggccccgacggccgtgtcctgggtggctgtgttgccggactcctgacggctgcttcaccggtacagatcgtagtggggagcttcgacgccggtggaaagaagcagccgaagcagcagcagcagcagcagcttgctccgtcaccggcgccactaaatctcgcgccgacgggcgtggcggcagggccgagcagcccgccgtccagaggcacattgagcctaagcgagtcgtccagtggcgccccgccgagcccgccgcacgcaggggccagcggtggccatgggcagcagcagcagcagccacagccaggtggcttctccggtctgttctggaaatgacgagacccccggacaccgtctgaccgtggtagaactggcagaaaggactaaaggcgcgtgaggcactcgtcgaggccgaagctcactcggtgagaagcagcggtagcttgtaggtggtgtcaagactgtgtagctcttgctgttgctgtaggtgtaaatcgtgcgttgtgattgtgaggtggttgcttattgtctgtcgtctggaatggatgccgtgtactgaacctgtgcccccaatgcagcatgtcggaagttcttggtttcttctgcttgggtgcatcggcttgccgcacgatatgcatccatgcccataataatacgtgtatagatccaccttgttgtgaaggtcacacacaactcacaatgcaaacttgtctgaaaagattgatacaaaatggcaaattttcgcgctgctgctggagctgcgcggcg

SEQ ID NO: 30246 - DNA, 1094 bp, Zea Mays
caaaagcgccggcgccgttcatctccccccccctctctctctctctctctctccccttcctctcgagttcgagtctcgatatcggcaaagcaggggacctacctattgtgcggctgcggcgcccgtcgttgattcatccgctggctcgcgctcgccggtggcgccggggaacagccagctcgagctcgctttcgcttcgcatcatgggagccgctgggttctgagctgcgcggccggcctgtttcagctgagatgaaactggaaaagaatcaaagttctgcatcacctgccacttcgaattttagagtgaatagcaattgccatggggtctggatcagggacactgaagcagaagaaacgagtgaaacatgcaaagaacaaatacttgaaacctggtgccctcgctcagattcgctatagcaggagtacaagcagggacattgggaagaaaaggattttgttgaatgcgaaagatgagctggagttacctccacagcctgaggttctcttagaaagcaatacactagttttgtcccctgcaagactcaattttgagccatttggtagtaatacagggcaggtattgccaaagactccaaggactccaaatgcatctgtgtcctgtggtgattcagggcttgaatcacttcctcttgatttgctgatcaagatcatgtgttgcttgcaccatgacgaactgaaagttgttttccatgtttcaaaaaggattcgaaaagcagtaagtataatctcttagctgttgcattctttatttgtaaattaggtaaaagcctcgtttttttttctcattttcttgtctgcattgaaatgatgacatattttcaaagaacagtaattgatgtcatctaggtgcggaaaaaagatagcattgccttttagcatatctctgacatatatactcttctcattctctgctcattaacaatgattgatgatgttatctgatattggaaaatgcaaaaagtgttgctttctattccattattaaatgacgtagtgcatagatgcaaaaaaatgttgcgtcttcaattagtagtttcccaccttgggattatgaactagcgagtcattac

SEQ ID NO: 30247 - DNA, 3065 bp, Zea Mays
gcgcccgaattgtgcgcggtttcttgcgaagatcgtcgtcaactttcggcgctcgctgggggcgcagggcggggaggaaagcagatagggcacggaaggatcggcattgaggcaggcgtccggagatggaccgtcggagctggctgtggcggcgcaagtcgacggacaagagccccgcagagacggagacctcggcgtcctcggcgtccgagaggatcactgatgaacaggatactgccaagagctccccaaactcgactcagtcgccggaggtcacatcgaaggaactggaagacggtgacaatgtgaaggtgaaggtattgagtgagaggctctcatccgtagttctggatattcgtgcgaaggatgatctcgtgaagcagcattccaaggttgcagaggaggctgttctaggatgggagaaggccgagacagagatcgcgtcactgaaggcgcagctgaacgctgcggcggccaagaactctgcgctggaggaccgcctcgtccacctggacggcgccctcaaggaatgcgtccggcagctccggcgcgccaaggacgagcaggaccagacggtgcagggcgcgctagcacagcaagcgcggcagtgggagtcgcacaaggccgacctcgagctgcgcgtcgtcgagctcacggcgaggttggaggccaagtccgagcgctcggtggccgccgccgactgcgacaccggctccaggctagccgcgctggagaaggagaactcggcgctcaggacgcagctgctcgccaagacggaggagctggagctcaggacgatcgagaaggagctcaaccggcgggcggcggagactgcgagcaagcagcagctggagggcatcaagaaggtggccaagctccaagttgagtgcaggaggctgcaggccgcggcacaacggaggccctccgtgaacgtcgaactcaggcgttctccgagctcggcctgcgccgagtcggtgacggattgccagtcggactgctccgactcatgggcctcggtcctcgtcgccgagctcgaccagttcaggatcgacaggagcggcgcgagcagcagggccgccagcctcgcgaccgcggacattggcgtgatggacgacttcctcgagatggagaagctcgcctctgcgtcaaaaggcgacgccgtcgaggacgcgagcgggcaggtgctcaggctcgaggagaaggtcaagaagctggcagccgagaaggccgagcgggagaaggcgctgcacgaggctcagcgcgagctgaggacttcccgccagcgggtaatggtggcagaggagagatcagctgagctacagcggcagctgaaccttgccaatggcgagaaacatgccatgggggccgaggtgaaagctgctgaggcgaagagaggagagctggagggcttgctcgagctcgcccgcgccgagatcgcggggttgctggacaaggggcgcatcctggaggaacggctcgagtctgagaaggcgctgacacttgagctcgcagcaaagtaccaggacatggaggcgctgagggcagagaagagggagctgagcgctcagctggagacgtcacggtccgaagccaagaagctcggtgacaagatcgccctgatggagaggaagctggaggtggagaaggccttgtcgatccgactggcgacgaaatgccatggcattgatgctctggaagcaaagaagaagggagtcgagctcgagctggagacggcgcgcgaggaaatcgcttcgctgcaaaacaaggctagcagcttggaactgcgacgagtcgaggaagagaaagcgtcgtctgctgcactcgcactgcggtgccaagaactggatgaccttagatcccagctggagtcttcgaattcacggatcgttgagctcaatgagaaggttaaaacgctcgaggatgtagtcgaggaacagaggccagtgacggtggaattggagtctcagctccggtcgaggcgcgctgaaatcagtagcctgaaggaggatataagcctgttgcagaagaagctggagagccagaagaacctgtcatcagcttacatatctgcacttggtgcttctgaaacagagaagaaggagctggctagtcggtttgagctcggagagaaagaagccgaggaattacgtgggaagatgagcttgcttgaggaacagatccgtaaagagaaggcacggtcatccgagtttgcggtaaaatgtcagaagatggaggaacaaatctcctgtagatctcttcttggccaccaaccagtgaaatcatctgcggcgatcaaagatcttcagctcagaaaggagacagagctggccaaggctgcagagaaactggccgactgccagaagacgatagcttcactgagcagccagctgaaatcgttggctgatttcgacgaattcccccctgaaactgagaccagtggcgctgactcagacgacgcctgggacagcgatctgaagcttctccaacccgcaagctatcccacgcagattggctgtttggcagtcacatgattcacgatcctcgttggcaagtggatagcgaaactgtttttgcttggcttccgccgcatgattgctgtgatgagattgccatgatgttccaccacatgtcatatagagttaagttaataggtgagcaaatgttcatatggaagctgtttatagagttgtttggtgaagcctcaaagggactcatattgaatattatctttgatcttccaatctccctgtcccttggaaacatcctcactgtcagaagactgcaaatagtgaaatacacatggcatgtcaatcaaagaatgtaagaataaaaaccaggggcaggttcatatgacggcacgttcccacccgacatgctaccacatgttcataaggatcttggatttgcaaattccaattgaaagtttgtacataattcagttctagcatcttgtatctgtcaagagaaaatccgggtcttagtaagctaacttctcgactgacaggacgcctagtagctggatgtatacacttcgtggtcgaatctgaatgttcgcatgattggcg

SEQ ID NO: 30248 - DNA, 1259 bp, Zea Mays
tatagcaccaaggaactgcctggaagatttgtataccttcagttacactatttatacaacattcatgttttttgcaaccagaagatgcttcaatatatggcgcctctgtacatagggctacatagttgaattgcacggctattatgtgatatacaatcttaactcagatttaggcatgcggtcactgattccatgtgacacgagcatacaacctgaaaggcagacagcccaggaactgaaacagcacaactacattccccctacggcctatgttgttattgtacattcataatacggactattcctacgacaatgaaacatgtgatttcgggggatgcggagaacaagaaactagggacaaaagaaagaataaaatcactgttagctcccaaagcccactgcaggccagcctctggcatccatttgttgcgccctggccaggtgatgagcaacacctgtgtgtgcttcggctgcaaagaggtcagctaatctgtacagggcgcctcttcccacttctatgatagccgacatctttcgatgacttcagtcacagctgaatgcgtttcccttgtcatcatgttgagctgcagatgaaatgactgcaggagaccaagatggtcaggtaaattacgagcaaaactagctataaggttgtcgcgggaaggaagatcgggaaaacaaccaagacattttttaatctagagcagtcgcatactatgtagacgtagtaaacatgccagaaaacgaacaaatatatacaacgtacataaagaatagggattagcatctatggacatgacaaattactggctcccagaaaaatggtagttcatgtatctctctcgaacgttgcttgagacagtacattcagaaattatggaaacataccacaaatttctctagcactggtacaagaactttcaagttgttgtccggaaggcaactagaaatggctcctcgaaccttcatactgtggcagcaaacatcagttcataagctgacggcagtggggtggggctcacattaaaattataactaattaagaaaagattatgaaataaggcactatgaacctttccgttgaaagaaaggcgagcacaagagctgcataggcctccacaatcatcatttcagcttcgcgttctccttgcaacagagattcttcatcatcctgagaattagaaacaaacatcaaataaatggctcatgagagtcatacgatatgcagaacacagttatacgtttctaggtagcatgta

SEQ ID NO: 30249 - DNA, 2997 bp, Zea Mays
aatcttaatcacaaaaatattgtcaagtatctgggatcactgaagacaaagagccacctccatattattttagagtatgtggagaatggctcacttgccaatattatcaagccaaacaaattcggacctattcctgaatctttggtggctctttacattgctcagtttttatatgaccaggtgttggaaggtcttgtttatctgcatgaacaaggtgtcattcatagagatatcaagggcgcaaatatactgagtaccaaagagggtcttgtcaaacttgctgattttggagttgccactaaattgactgaagctgacatcaacactcattctgtggtcggcactccatactggatggcgcctgaggtcattgaaatgtccggcgtttgcgctgcttctgatatctggagtgtgggttgcactgtaattgagttgctgacatgtgccccgccatattatgatctccaacctatgcctgcactgttccgtattgttcaggatgtgcatccaccaataccagaaggactgtcacctgaggttactgattttctccaacagtgtttccaaaaggatgcgatgcaaaggcctgatgcaaaagcattattgatgcatacatggttgcaaaacttaagacgagctttgcctggttctcttcggcaacctactccattgaggaacatcgatggtgatgatgaaggctcaagaggtgataatagcttgggtttttgcgacacaccaggagatattcaaacaactattacttctaatgttgaccaggagaatgggagtaaagaaccaattatggactctactgtacaaagtaaatctgaagagcttcatgatggaaatttaaaacttactgagggcagtagttcaaacagtgtggcgcttatgaaagataatgtggtccttaataaaggtccgacactagttttacatgagaagttaccggtggaatcttcatctggaggtgctgatttgaatggcaaagtaatggcacatgaactattgcaaggtggtccgccaggtaaggtagagctggagaataaagaaagttcaagtagtgatgtgttctcctttcaggctggaagacagaatattggcttccaaaaggtggttgaaccttcagttgttgaggggccaaaacagcttagtagatttagtgacaaacctgaagatgcctctttggaagacttatttccaccaaatgataaatggggagataatggggctgaaccttcaacatcaactactgtccaagaacttaaatataatggtgtacaaaatgcgttcttgaaggggctcaatgctagggtggagaagcaaaaagaaaatgataacgagtctatgaatggtggaaagctaattgaatttgccatgcaactagaaaatattgacgcgttgggttttggtgaacatattcctggagagagtcttttccctgtgcagaggtctctagacatggaagagagaatggccatctggactcgagtataaaagtttcaaatagagttcatagtatgaaatatgcaccttcgacaagtgcctctaatgaaggagcatcaacttctggagctgcatcgcaaacagcatctgatgtggcacgcgaatatcttgaaaaagtagctgatcttcttttggagtttgcacaggcagacactgtggtaagatctctgatggccagccaaagccttcttacaaggctttttcagatgtttaacaagatagaacctcctattcttcttaagattcttaggtgcattaatcatttgtcgggtgatcctaattgtctcgagacacttcaacgcacagatgcaatcaaacatctgataccgattcttgagctttgtgatggacctctggtttttcaaatacatagtgaggtcctcaatgctttgttcaacctttgcaagattaataaaagaagacaggaacaggcagctgaaaatggaatcattcctcacttgatgaattttgtcatgtcagactcacctctgaggcagtatgccctgcctttgctgtgtgatatggctcatgcttctcgcaactctagagagcagttgagggctcatggaggactagatgcgtacttaaatctgttggaggatgatgtatgggcgtgcacggcattagattctattgctgtttgtttggctcacgataatgatcatagaaaagtggagcaggcactgttgaaaaaagaggcaattcaaaagttagtgaagttcttccaagactgcccagaacagtattttgtccatatattggactctttcttgaagataataatgaaatcttctaggctaaacacagcaatggccaccaatggcttgacagcattgctcattgcaaggcttaaccatcgagacgctattgcccgcctgactctgctgaaactcataaaggttgtctatgagcatcatcctcgaccaaaacaggtcatagtagagaatgacctccctcagaagctacaaaacctgattgaagaacgcaggggtggacaacggggcggccatcaagtgttggtcaaacaaatggccacctcattgctgaaggcgctgcacatcaacacagtattgtgattttgatgggtcatgtgttttcctctcaagttagtgtttacgttttcgctagaggaagaaaaggggcgtccttctctttttgcctccttttctgctgtggtggcttctcacgagcaccagactcatttgttgtacctgatccctccttttttgggagaaaggttcaacgttttggtgcaggataaaatgggcttgctatcctccagtgctgtgtatatctagcgtatgttagtgaagaaattgcaaattagacaatctaattaaaaaaatttaaaccatattgacattttgttccgtgtgttagtagattttccctagcctgacccacttgcaccaagcaaaatggttgatatcgtggacgtctttaacaggatgcaagaaagcatcacatagttcttttgatgcattacattac

SEQ ID NO: 30250 - DNA, 3865 bp, Zea Mays
cccccatccgcgccgggcaggcatgggcaccgccgggtcggcgcgcgcccccacctagccgtcgactcggcgctgctcactcgcgctccacgcccacgcccacgcccaccgccccccgctatttatgcgtacttgcttgccgggagagtcgccggagagctgggcgtcctcctcccgttccagagcctcactgcttcgctccacccacccttaagcaagagtggtatctggtggttttgtttttcaaaagaagacagaaatgtcttccttgaggcctgcccagtcttctagttcatccagcaggactcggcagagctcccaggcacggatactagcacaaacaacccttgatgctgaactcaatgcagagtatgaagaatctggtgattcctttgattactccaagttggttgaagcacaacggagcactccacctgagcagcaagggcgatcgggaaaggtcatagcctacttgcagcatattcaaagaggaaagctaatccaaccattcggttgcttgttggcccttgacgagaagagcttcagggtcattgcattcagtgagaatgcacctgaaatgcttacaacggtcagccatgctgtgccgaacgttgatgatcccccaaagctaggaattggtaccaatgtgcgctcccttttcactgaccctggtgctacagcactgcagaaggcactaggatttgctgatgtttctttgctgaatcctatcctagttcaatgcaagacctcaggcaagccattctatgccattgttcatagggcaactggttgtctggtggtagattttgagcctgtgaagcctacagaatttcctgccactgctgctggggctttgcagtcttacaagcttgctgccaaggcaatctctaagattcaatcgctaccaggtggaagcatgcaggccttatgcaataccgtggttaaggaagtcttcgaccttacaggttatgacagggttatggcttacaagttccatgaagatgagcatggggaggtctttgctgagatcaccaaacctggtattgagccctatctaggcctgcactatccggccactgatatccctcaagctgccaggtttctcttcatgaagaacaaagtcaggatgatctgtgattgccgtgcaagatcggtgaagattattgaagatgaggcgctctccattgatattagcttgtgtggttcaactcttagagcaccacatagctgtcaccttcagtatatggaaaacatgaactcgatcgcatcccttgtcatggctgttgtggttaatgaaaatgaagacgatgacgaacccgagtctgaacaaccaccacaacagcagaagaggaagaaactgtggggtctcattgtttgccaccacgagagccccagatatgtgccgtttccactgcggtatgcctgtgaattcttggcccaggtgtttgctgtccatgtaaataaggagtttgaattggagaagcagatacgagagaaaagcattctgcgaatgcagacaatgctctctgacatgctattcaaggaatcatctcccttgagtatcgtatccgggagtccaaatatcatggacctcgttaagtgtgatggtgctgctcttttgtatggggacaaagtatggcggcttcaaacggctccaactgagtctcagatacgtgatattgccttctggctttcagaagttcatggggattccactggcttgagcactgatagcctccaggatgctggatatccaggagccgcttcccttggtgacatgatctgtggaatggcagtggctaagatcacgtccaaggacattcttttctggttcaggtcacatacagctgctgaaatcaagtggggaggtgcaaagcatgatccatctgatgaggatgacagcagaaggatgcaccctaggctgtcctttaaggctttcctcgaggttgtcaagatgaagagtttgccatggagtgactacgagatggatgctattcactcgttgcaacttattcttagaggtacactgaacgatgccttgaagccggcccagtcatctggtttagataaccagattggtgatctcaaacttgatgggctcgccgaactgcaagcggtgacaagtgaaatggttcgcctgatggaaacggcaactgttccgatcttggcggtagatggcaacggattggtcaacggatggaaccaaaaggtggcggacttgtcggggttgcgagttgatgaagctataggaagacacatacttacacttgtggaggattcttctgtaccaattgttcagaggatgctatacttagctctgcagggcagagaagagaaggaggttcgatttgagttgaaaacccatggctccaagagggacgatggccctgttatcttggttgtaaatgcttgtgccagccgtgacatgcatgaccatgttgttggggtgtgctttgtagcccaggatatgactgttcataagttggtcatggacaaatttacccgggttgagggggactacagggccatcattcacaacccgaacccgctcattcctccgatatttggcgccgaccagttcggatggtgctctgagtggaacgcagccatgaccaagcttactgggtggcacagagatgaggtgatcgacaggatgctccttggcgaggttttcgacagcagcaatgcttcctgccttctgaagagcaaagacgctttcgtacgtctttgcattatcatcaacagcgcattagctggtgaagaggcagagaaggctccaatcggtttctttgaccgcgatggcaaatatattgagtgccttctgtcagtgaacagaaaagtgaatgcagatggcgtcgtcaccggagtgttctgtttcattcatgttcctagtgatgacctccagcatgcgctacatgtgcagcaagcctctgagcagacagcactgagaaggctgaaggctttctcgtacatgcgacatgccatcgacaaacctctctcaggtatgctctattctagggaaacactcaagggcacagacctggatgaagagcagatgaggcaggttcgtgtcgcggataattgccatcgccagctaaacaagatactcgccgacttagatcaagataacattactgacaagtcgagttgcttggatttggacatggctgagtttgtgctgcaagacgtggtggtgtctgctgtaagtcaagtactgataggttgccagggtaaaggcatcagagttgcttgcaacctgccggagagatccatgaagcaaaaggtttacggggatggtatacggctccagcagatcctctccgacttcttattcgtttcggtgaaattctctcctgctggtggctctgttgatatctcttccaaactgaccaagaacagcattggcgaaaaccttcatctcatagacttcgaacttaggatcaagcaccaaggagcaggagtcccagcagaaatactgtcacagatgtatggggaggacaatagagaacagtcggaggagggcttgagcctccttgtttctagaaaccttctgaggctcatgaatggcgacattcgtcacctcagggaagctggcatgtcaaccttcatcctcactgctgaactcgctgctgctccttcagcagctggacattgaagccgtcactgcaaacaagtgccaaatgctgcccagctccctcagagttcattcggaaagcaacggtggttcgcggagaatgggaaatgctgcagcctgtaggatcaccgaatgcataagaaataagattgacttgtatggttgtttgttaggcggggaagttgtgcaggcataagttctctgaacttcagtttgccgagaggcttcgtg

SEQ ID NO: 30251 - DNA, 4086 bp, Zea Mays
ctcgattcgaaacccacacaagcggagcggaaggggaggccactcactaacccctgattagctgctcattaactccacccccgatctgaattggcagtagcagatcggcgtgccattgcatcaccgccagcagcagcagcaagaccaccaaacccaacgagagagcagccgaggcaatttaatgcgttcccctcctctccccatccctctctagctactctgtagattgacagagagacaagagcgctcttgctaccaatctcctcctcgtcgccgccgcggccgctctcgctcccacgatccggcgctgccacgagcttccagatccgccgcccgggcaatgctgtagctgcccgcgccgagatgggcggcgtcggcgccggctctctcgccctgctgcggctgctcctcctcctgctcctccgcgccgaggcctccgctctccacgcgactatattacctagcccagcaccaagtccatcaaaagcccctgaagcgagatcgtttggacctcgaatttccccttcacatcctccgagtgcactacctccaggatctcctggcgttgatgcgcgccatcattcacacaagcacccgcaccacagagagtcaaatcagggcccttcaccatcctcagcacccacacctgaaggttgttctagttatatctgcaccgagccactgactgcaacaccaattggttccccttgtggctgtgtcgagcctattagtgttatcgttgatctggacttagctccttatctactgttcatgagcatagctgagttagaagttgaggttgcagctgggacatttcttaaacaaagccaggtgaagatcatggctgcagttgcaagtatccaggatgaccagaagacacgggtgaccatttatttggtgccgctaagagaacagttcgatacttatacggcatccctaatatctgataggttcatggagaaaaaggttcagataaattcatctatatttggagattataaagttatcaatatcagctatcatggattgcaatccccgccatcatctctgcctggaggatcggatccttcaggaactgaagaatatcctataactgcagaggtgcctgatcagaagaaaaagcacaataaatcagatattttggtcatcgtggtagtgttagggtcttctcttggacttctgatgacatgtgctgttctgctgatcttactagtaagatggaagaaacttggacggcttcatgaggctatgacccctgcaactatcccagcagttaatagaagatatggcaccaggccaactttgtcaaccagcatggtgagctctgcgtcagcatcagtgttttcaacagtggctacttgcacaacatctgtaaagacattttcactagcccaacttcagaaggccacagatggttttgattcaagaagagttttgggtcaagggggctttgggcgtgtctaccatgggacgatagaggatggaaacgaaattgctgttaaattgcttacaagggaggacaggagtggtgaccgtgagtttattgcagaagtggaaatgctcagtcgattgcaccaccggaatcttgtcaaattgattggtatttgcattgagcggagtaaaagatgtcttgtgtatgagctcatacgaaacggaagtgtggaatcccatcttcatggcgctgacaaggctaagggtaagctgaactgggatgttaggatgaaaattgctcttggcgctgctcgaggcttagcatatctgcatgaagattcaaaccctcatgtcatacaccgtgacttcaaggccagcaatatattattagaggaagatttcactcctaaagtgaccgattttggtttagcaagggaagcatccaatgcgactcaacctatatctaccagggtaatgggtactttcggttatgttgctccagaatatgcaatgacgggccatcttcttgttaagagcgatgtctacagttatggggttgtcttgctggaacttatatcaggaaggaagcctgtaaacatctctgagtccaaggatcctgagaaccttgtaacttgggcccgtcctctgctaagccataaggagggcctggagaagttaattgatccgtctctggatggaaattttaacttcgacaatgtagcgaaggtggcatccatcgcttccatgtgtgtgcacacagatccatcgcagaggccgttcatgggtgaagttgtccaggcactgaagctgatctacaatgatccagatgaggcttgcgacgattcctacagtccaaggaattcatctgaccaagacggtgactacgaaggagacctggtctttgagagtggaagctggggctttggggcctctgggtgtctagactaccggaattccttaccgtttgtcactatggactacagttctggccgaatagaagggccgcacgaccctcgcgcggcattgtcagcgggatcccatgcccagtcaccagtgctgcagaatagatcaggccccttgcggatgaagaagaagctggcctccttctaccgctctagaggcagcattagtgagcatgggcacctgccacgccattgatcagtcagtgaactagtgttaggctgttagcttcggttgactctgggattgaggctggcgggggttgtcattacctgattcgtgcctcatgttagtgtacagttcgtggtgacccttcacccttgggtatgggtgttttctctctctctttgccttctgcttcttccccggaagcaatgaggatggggttggcaggtgctctctaattttcgcaaattgcggttcatttctcatgcatctgattggtttcttgccggagttctgggcatcatgttgttgtgactaggtggttgtactggatgcagttcgttgtaaacagacagtgtcagggatctacctcgcgttggagaggtgaactatacagccggctcagttcctcaaatgtcaggtccattgacgactagtatcatcattagaaagcccacgtagtcgagcgaggaggaaaggcggcgaaaaccctcccttgccttgcccagttgcccccaaaccccagccaccagctataccaatggcggccaccgcgatggaccatgacggcggcgacgacgtggtcacaccaggggagcttctcggaaactcattaaccctcgcggccggacgtggcgcctacgccgacggtcgctctgtgcgcgcgtcggtcaccgggcgccgccgcatcgtgccgcccgcacctggctccgacgaccagagatccacggtggaggtggtggggcacaaggcccatggagctgtgccgcagccgggaagcgtcgtcatcgcccgagtaacaaaggttatggctagaatggcctctgcagatatcatgtgtgttgactcaaaggctatcagagaaaagttcactggcatgataaggcagcaagatgttcgtgcaactgaaattgacaaggtggatatgtaccaatcatatcgtcctggggacattgttaaagctatggttctttctcttggtgatgcaagggcatattacctttccactgcgaaaaatgaacttggagtcgtttcagcacaaagcatagctggtggtacattggttccaatcagttggactgagatgcaatgtgatttgaccggtcaaattgagcaaaggaaagttgcaaaggtggaatagatgtgctgtggccctcctgataaatggtggtggcggtatacaaattgtggaccagtgacaccaggtccttgggcggactacccaattctgcgacgcccaacttcattacagctgcattgagcatgggtttttaaaaccctggctgaatttaactagacatgaatcgtagccatgggtcctgtaacccaaccttgggatctgaatcatagccatgggttctgtaacccagtaaccttgcccttgtgatttgttactctgtgagctaatgacattgcagttttccacctcgtgatttctacaagttttgttgcgcattgttgagaacttgagatctgttgctgtctttctggcatgatgtcaaatggctgtaccggacttgtttcaaacgg

SEQ ID NO: 30252 - DNA, 573 bp, Zea Mays
ccgtccaaactgcaacagtagctttcgtgcgaaggaacgtgcagggaagcacggctcaaacgacgacgctggaaggttggcggcggaatggagagcggacgtgagggacggtcctgctcaaagcatgggaggaggatcgtagtggtggttcctggttcagaggaccgagaaggaaatgcatcgaagctcgtgcagtgctcgatcggacggtgctggtcagagcacagccacagacctccgagctcgtggtagtggtgaagaattggtcatggttttgtcttgcttcgttattggaaatgggacatgtacatgtgttatgtgtagtggtgggaatatggaccgtttttttttaccagcaagaccacgaccgaaagtaggagcacaaagtacggtctggcacgaaaaaaatatgggtcagactatcacggcacgaaggggctgtaccgggcctcaaattctagcccgtcaggtcctagcacggcctaataaagctcatattatttaatttctttaatttattaaattatagattttatattattgtaatatttaaactttatgtggtaaaataat

SEQ ID NO: 30253 - DNA, 1803 bp, Zea Mays
tttacctgctgtttttgctgtatcctggcaatattcctttttactgtgatccatttccatttctgtgatgtgctcaactttacgtttggataaaagttagtaaggtaaagtaaacacattcacaaattcaagtactgagaagaaaaattgtacgtttcaaagtagttgtccaagttatgccaacttgcttttatgtaacgacagcaagaaaactgatctaagacctgcattgtggtgaattttgcagctgtccggccgcgtgtaccgcgtcaccttcaccaaccggctcaacggggccgcaggcgcggtgccgtgaagcagatacggaccgccgggaaactgtacctccacaagaaatgaacttccatcagacttgatagacacactactaaagtggatcccaagcaatgatgaggagcttaggcttcgactgtcctcccgtagcaccgccacaccgcacgcgtccgtggcggtcgaacatgcattttggagagaccaacttgaatgtgcggagcagtcgatcacacaatattttcataatgccattttggaggacgaacgagcaccggggagagtccaggaggaggcagatactgctgggacatgtccaagccagtggagatgcagtggagatggagatcaacattggcatggagaagctgtgaaacccaccgcagcagaaccccacccagaggaagtggcctcgcgtctcgtaagagtggcagacagtgatcggcgggttctttgcgacacgggctgctcttcgaccatgagcttcttgttactattcccccgcgacatttgtttggcatttctgttaacgattttctttgtttatattacactaaagtcaaagcctgaagccacgtcggcaactggatctaccattatgacataagcagaaatctaaataacacaaaaaaatcaggattactatatatttgtgcacaaagccacgaagaattgcatgaattgtggacaaagctgaaattcaaggatgctgaaagcctgcagcagacttctgacatggagagtgtgaatcttctccaaagtggggggccatgagatcaatgttgcctcggatcaatcacaaacaaggttgtctggatacacttcagttccatatacaagcttccctgcccaggcagagctaactgttgtaggttgcagcaaaggattggatgcaaaagggcgctggacacgtgctcgtgtggcccaagtgagcatgctaatcagccccttttggttccttgcacagcttacgttcaatctgtctctaagatacaccactgtcacggtaagtgttactaagaactgaatgatacttccatattttaaagccaaacctggcccaggcaccacccaggcaccagaggcctccaaacggtcaaggatacaccactgtcacggtcaagtcctgcagaagctgaaactgatcatggataagactttgccttgtgtcacaatgggtgcatttgctggtggtccttggatcaggttgctcatgggtggtgaatgatctgacgacttcagaagaggatagatctgagattacctttcatgcatgtcaaggaagttaagtagctgatgccatcaaagaaatggagaaacgtcaggtgaaccgcgagcagaattccgtggcgcatttgttagcgcagttagttaggactctgttcatacagctgttcgattaagccaaatacctgatttagttttatattggttgttgtcaaagaatttgtgaaatattgaggttgataatatatgtggcgttcgtttttatgtaatcattgttcactaata

SEQ ID NO: 30254 - DNA, 444 bp, Zea Mays
gaatccatttggattttggatgatccaaatccattttctggtacaatgtggtctaccggaactagaaaaggaagttgacgaaaagatagaccagttcagtgcatgggtggagaaacacccaaaccgcagaagccagacaccctggttggtttgtcaacaaaacagagcgcatctattgggagcaatggttcatcaatttgcaagtcatgttccccaaaagatacagcaagtcaaacagctccaaagggctgacaaacatccaagcaaatgccgtggaggagaccagcacaaggcgtgctgcattggaggcgtcgattaacgaagtgctgttccagatcataaagttcgccaacgagaaaaaggaccacattcctgctatccctgacaggattttcaatcacgagatcatgatcccaagattctctacatatatctcgatcaaca

SEQ ID NO: 30255 - DNA, 932 bp, Zea Mays
gactcatatagtcatatatagtagttatatacgtatatatagttatatacataatatatataatttatggctatattgctaaaacgcctagaaaagcgcctagaaacgcctaagaccgagtactcccgactaggcgctaggcaatgggtcaccgcctagattccgcctagcgcctagctgaaccttggttctcgttgcccatagattgatacctcaccaccaaaaaacatgactttttttttgtttctgtctacacgaagctacagtttatgtccttgctcaaatttccacatagcacctgatgttcttgatcttgtaggtacgacctctataagctaatgcatgagatgtggaaggactatatcaaagagcttatggatatgagcccgaaaaagaaatttactgagaaccttctttcagcagatcttcatggggcccttctaatagagtgtaaacggaatcatgattcgggatactgcagagacgtttggaattatatccgaggacaaccgcttccgggttaccaaaagctggttcagttttcgtacttcaagcagaccgctggaagttcacactgatcggcgacaagctctcgcccagggagaagttgaaggaggatcagcgtcaacaacgtgcgcaatcgctaatcagatagtttccaatgtgccagctgttctctcacaaatcttttgctccacggaatacttgcttttgtttaggtcctgccactgtagcatggtagttttatcgctctagaggcgttgacatttcttagcgacttactggcagctcgagttgtggaggggtgtgtgatcatgagccatgtactccggtgactgattattgattagtataggcgtagcaaggccatttacgtttgtttcatctagtcacacaaacctgtggcaaatatttattacgcattgtttctg

SEQ ID NO: 30256 - DNA, 2119 bp, Zea Mays
cgcccttcgattccctactcaaacgcagccgccgagcgcctctcgcctctcgccctacaggaggcaccctacagaacccaaccaaaaagcgccggcggcaaacagaacccaacccaaagcgccggcggcaagcgaagagaaagcgccggcactaatccgacgatggacgcgtcggccggcggcggcggcaactccctgccgaccactggcgcggacgggtcgaagcgccgcgtctgctacttctacgacgcggaggtgggcaactactactacgggcagggccacccgatgaagccgcaccgcatccgcatgacccacgcgctgctcggccgctacggcctcctcgaccagatgcaagtgttccgccctcaccctgcccgcgaccgcgacctctgccgcttccacgccgacgattacgtctccttcctccggtccgtcacccccgaaacgcagcaggaccagatccgcgcgctcaagcgcttcaacgtcggcgaggactgccccgtcttcgacggtctctacagtttctgtcagacgtacgcggggggctctgttggcggcgccgtcaagctcaaccatggccatgatatcgccatcaactgggccggcggactccaccacgccaagaagtgcgaggcctccgggttttgctatgttaatgacattgtcctcgccatcctcgagctcctcaagtaccaccagcgcgttctgtacgtggacattgatatccaccacggggacggcgtggaggaggctttttataccacagaccgggtgatgacagtctcattccacaagtttggagattatttccctgggacaggggacattcgtgatgttgggcactcaaagggtaaatattactccctgaatgttcccctggacgatggtattgatgatgagagctaccagtcgttgttcaagccaataatgggcaaggtgatggaggtcttcaaccctggtgcagtcgtgctccagtgtggtgcggattcattgtcgggtgacaggttgggctgtttcaacctctctattaagggtcacgcagaatgtgtaagatttatgaggtccttcaacgtcccgctgttgctgcttggtggtggtgggtataccataagaaacgttgcacggtgttggtgctacgagacaggagttgcccttggtcatgagctcactgacaagatgccacctaatgagtactatgagtattttggtccagattacactctacatgtcgctccaagtaacatggagaataaaaacacacggcatcaattggatgacataaaatcaaaacttctagataatctttcaaaactccgacatgctcctagtgttcagtttcaagagcgacctcctgaggctgagttacctgagcaagatgaagacaaagagaatcctgatgaaagacatgatgctgattctgatgtggagatgaatgatgccaaacctttgcaggactctggaaggatgtcaatagtgtagctgcagaacattctagaggcactggacctgtggctgatggagttggttcctcgaaacaaacctttccgaatgccactagtcgaatggccatagatgaaccaaacgctcttgagagttgagcaagagggttcaaacaaattgcaggaccaaccatcgatgcacctcaagtagctaatgtcatctgtagcctgtcgattcttttgcgcaaattcattaactgtaggcaagccatgcgtggactgaagcagggagcagaagcaagtgctcgaccaagaagttgtgcatctgaaatctatattttttgcgcgtcatatttgtattaccgacagttgcaaacgatggtttaatcatgaaaaatttgtctttccacccttggcttctgcagtggaaggggttgatatcgtagtatgcatcaattatgcattttgtccattccccatccccaaatgagaagtgggtagtccccgacgggttttgaatggccaacagttttaagggagggaagcagcccggaggccaaaaaaaaagcaacgagatgtacggcatcagattgtttgcaatgttttttttttctaaatttgatcatttatatcttacttttacgccacgttatctaaattctgcccctatttttctc

SEQ ID NO: 30257 - DNA, 1432 bp, Zea Mays
gattgcttctttggtaattggtcgtatagtccctcatcatcggaatggtggggtcacttatctttcccacacctaatgtggatccgaaggcagagaatcctaatgagatggttacagccggtgtgctttcaagccttcagaatttcctacgcaagtgcctcatagccatcctctcatatggcccaatgccgaagcacattgcatttattatggatggcaatcgtcgatatgctaaattcagaagcatgcaagaaggagcgggtcacaggatgggtttctctacccttattgcaagtctgatgtactgctatgaaatgggtgtgaagtacatcactgtctacgcattcagcatcgacaattttaaaagggacccaagtgaggtggaatccttgatgcagttaatggaggaaaaaatcaacgaactcttagagaaccgaagtgtaatcaacaagattaactgtaagatcaacttttggggtaacttggacttgttatatgagccggtgcggttggcggctgagaagctgatggcgagcacagctgggaacacagggctggtcttttctatctgcatgccatacaactcgacttctgagattgtcaatgctgtcagtcaagtctgtgcggaaaggatggaaatgtttcagagcgaacatattggcgaatgcaatggtcatgctgcaaataacggtgtgcgatcagagatttcagtggcggatttggatcgccacatgtatagtgccgaatgcccagatcctgatattgtcatccggacttcgggcgagactcgattgagcaatttcctcctttggcagacaacgtttagtcacttgcagaatccagatcctctgtggcccgagttctctttcaggcaccttgtttgggctgtcttgcagtatcagagagtttaccctgctctggagcataacagaaagttggctaagaagcagttgtgattccatgttacttgcaaggaggtatcatgaagggctattaacatcaaacttttccttctcaatttcctggtaatggtaaatgcaaagaagaacatactagcatataacattatgaatagatcaccatgtaacttaagtgtgattgctaccgtaaccatgtaacttatttgagctcgtacaaatgctgtgattcctaaatatatatatatatatagagtgcctggggtaacatggtgtgcgagagcatttctttgttttgcacgacaaagaccggatgcttcaaagcgcccatgtttgacaagtgaaaagaaaggagttcgaagtaaaacaataggccaatgtctgttttccatagtccaataagtagaccactgataatgtctgttgatcatattttgcatccagccaagtagaccactgaaaaccaaggtcatgcacgtacagaaatatatatgcaagtttaacgtctgatggct

SEQ ID NO: 30258 - DNA, 567 bp, Zea Mays
cggcccaaatagcatgccaaggggcaagcgcccaagctcacccgcgacgtcaagcctgccctaacctcgtgtttcccttgctcggcttcaccccatcgccgccgtcgcaacgtgcccgcctgtttcccttgctcgacttcaccccatcgccgccgccgccgtcgcaagcgacgatgctcgacatcaacttgttccgcaccgacaagggcggcaacccggagcttattcgtgagtcccagcgcagccggttcgcctccgtcgagctcgtcgacgaggtcatcgccctcgacaaggcatggcgcgaaaggcagttcgagctggacaagatccggcaggagctcaacgctaccagcaagaagattggcaagctcaaagccagcaagcaagaagaggaagcgaagaagctcatggagagcacagacgaaattaagaaaaggttggcagccaaagaagttgaggtgcaggaggccaagagcaccctcgacgccaagctcacgacgattgggaacatcgtgcatgagtccgtgccagtcagcgaagacgagggctgatcagccgtcgattaat

SEQ ID NO: 30259 - DNA, 1066 bp, Zea Mays
ggatcagttagaagattctaactagtacacaatgagaagaagcaacgcagtacataatgagaagaagcaacgaatatgaactgcagcatcagttagatgacagagggatggcccaaacactaccaagcactttaactagttgttgctgatgcatcgagctatctcatcatcgagccatgcactttgcctgttttagtgttttgtatgcgtactgattatgctgctcaaagcttacctcctgtttcgcttcagaatccatgtttagaactgacaggccctgcgcgtgctgtcatgatgtatggtcgtgtgatatttgaggcttcattgtatgtgaaaggtgctactagatctgatgacaaagaattgagccttctagctattacttcattggggaatttgtctgatgctcactcatccttgattgagtgttcttgcagtagcagacttagcacactggaactgatgcttggtaaaatcttacttactctgtggaagctacaattcacttgcgggacatggccagctgatggttttcgttgcatctttgtggccaatgctggcatagggacaatggattgtgttgcttgagactgcagatgatcgcgctggtgataagatcagccttgcacggcaggttgtttgtgttgactgtgatagagagctgaaggttgtggccagcattacgaatggttctgctacctatacagatgaaaagggcttcaaacctctgaaaatgggtgcaagctccaaggaacttgtatcggtggcttacgggacgtttggtttgaggaatcacttcatccaaaatatggtggtgcatcatgggtctattcctcaaatttggtggaatgaccccattcctcatattagtactaactaaataactataaggaatgaggtgatgatggatcaactcaatccattccacaaaccaaacaaaaaagtaaggagcgagaagacgatggactagatcattcctcaaaccaaacagcttattagggttggaagtcactgtttattggtcctgcttcccatttgcaccggtttagtttcgttgaaagtgctg

SEQ ID NO: 30260 - DNA, 6181 bp, Zea Mays
aaaatgatttaatgctaaatcgcgtcctcaaaaacctctcgttccgaaagcgcacacaacaacagaaaacacgcgcgacggccaggtagagacagatccatttctcaccttgccccacctccctcgccgatcggggtcccccgcgcccagatcgcttcttcgcttcggtgcggaggtggccgagggggaggaggagctcccggatccgccccgccgtcgtcggctggtcgtggcgcgatccgcgggagagcagcaatgacggcggaggggacggcgtgcaacggcgccggcgaggcgctgaaggcggaattcgcgccggagaaggtggtggccgtgtccctggaggagaagccggtcggggagcgcgagggcgaggacgtcggcgggccgttcttgatcgtgaacggcggcgattccgacgggcactccgagcctggctcagatctgggcaaggcgcccgacgaggaccctgcatccgaggaggacgacgtgcccaccttcaatgcagctccggacgcggccgtggccggagatcacgggaccgccgaagggcaagttggtgctcagggtgcggcactcggtgcttcgtcggcggacgggggtgatcgtgcttccgacgggtctgagggtagcgcggatgagagcagaggtgacccaagttccgattgtgttgccgaagtggcgcagcaggaggctgttggtgaagaggacagtggggcagctgctctggcgtcccgtgaatgcgaacctaccatcaccagtgctgactctgaggcacactatgtggattctgaggttgaagacaaggagggcacagtggatggtagtgctgttgttgatgccgttgaagcggtggtgcatcaggaagctagtacagagcaggatgaagatgctgctgtgatgtcctctggccatgatgatgccctaacgtctcccaagtcttgttctgctgccgtggagtccgaggttattagagaggatagcaaagaacagagtatcactgatggtgtggagccacagcagcagggtacagttggggcaagtactttggtggagaatgagcatctttgtgccgacatgatggctgattcatttgtagctgccaatgagcctgacagtcaagaggatgctgctgtgatgtcctctggccatgatgatgccctaacgtctcccaagtcttgttctgctgccgtggagtccgaggttattagagaggatagcaaagaacagagtatcactgatggtgtggagccacagcagcagggtacagttggggcaagtgctttggtggagaatgagcatctttgtgtcgacatggcggctgattcatttgtagctgctactgagcctgacagtcaagaggatgctgctgtggagtcctgcgggcacgatgatctgctaacttttactgagtctggttctgctgacattgagtctgaggtttatggagaggatagcgaacaaaaagagagcaacactgttgttgtggagatcgtggtgcagggcgtaggtagggcagatgtgctgatggcaaatgggcatctttgtgccgacacccaagctggttcttctgaagctactactgagcctgagaatcatgctaatggcagcaaactgactgatgttgcagaatcagtggagggggatgccggcagtggagaacaggatacaatggattcgtcgcaaaccaatgggcatatttatgttgccttgagtgctgattcttgtatagttccttctgagtccaaggcccattcctttgagacagatgggcaacgaactgatcagctacaagaggaagctccaaaacttgaagctgaagtattggagggagtgctaaaaccaactgaaaggaactgtgcaggtagtgttgagaaactcataggagaggaagttggcacagatgggcatgcaagcataggaggtacagctgatgcttatggggagcaagaagccaagcctatgcaggtagaaggtgaagtcacttgcggtattctcgaatttgaaaaagtggataaggatggtgaagagggtttgtgtgatgactacacggttggtgttgtttcttctaatgaggaaacagagcttcctatgaaggaaaaagtagatgaagctgtccccagtgttaatgttggtgggccagagaaagtaactgacaatacaagccaagataccaagacagttgattttattgatgaaatcacagcagagtcaaactttaaagctgaaaatatggttgaagtgaaaagtgcagctcgtgaagttgacaaaacagaggtaaaagatcttgcttttgctgatgaggctaatgtagctcctttacaccttcaacgtgactgtgaatctgttatggaaactatagagcatgagaaggtagaattaccaggtggttgtcaagctcatgaaattgtgtattcttcagaactagaaccgaagaaagagtttgagatgggggttgatggtgctgttccattgcaaggagctgcagcttctgttgcctctgttttccaccatgagccaatgtccattgatttgtctgagaatgatagcggtaaccattctggcccaactactgcgttggaatcctgtgaccatgtgcaaaatgaagagagcatatcccaagaaatttccatgaccactattgagcaacctatagctattgatcaagttgaacctgtcaacctgaatgtagatgaacttgtggttgatgatgatcaacctggttttgctccaaggtgtgaatctgctaggctggataaacctggatgtacttccaaaaaggatgattcaaatgagattgttgaagatagcaaatcactggaaaatcagttagaaatttgcaatgcagctactatgtctgatgagtgttcctccagaaatgcaaatgaagatccctctccaattaatatgtctgctgagtgttcctccagaactgcaaatgaaggtttctctccaattaatgaggcttctcatctagctgaggagtcttgcctttcagacaagtcatacaatgctatcagttatgaaaatggaaatgggcctgctaaatcttctgaggagcctgacaagtcatgcaatgctatcatttgtgaaaatgaaaatgagcctgctaaatcttctgatgtggttgaaaccagatgcgtggaagcattagcgccttcatctgttggcacggttgtcacggcagaacagaaggacaatggacaccgtgcttctggtgagtggcatggagataatgtgcaagtcattggacaacaacagaagatctacataattaaagttccaaagtttgccggtgatgatctctggaataagatccaggctgcacaggctcacttagaccacctgacccaggaaagagatgcaattaaccgtcgtaggcaaaagcaaaaggctgtatgtgatcaatacagggagaagcttgaggcagcacgtagagaagagcgggaagctaggactgcacatggagataagaagaatgatttaaataatgtacgttcggtactagggaaattgcaccaagcaaattcagctgaagaacttgatgagctgattgcgaagaaagagaggactatgcaacatgagaccatttctttgaaagaagaaaaacttttaattaaagagattaatgaattaaaagcccaacggaagcagctatccaccactatgggctcaaaggctgaaatcaatgaggcatttgaccaaaaagatcacattcatgaaaggcataagaggaaaacacaagaaagattcaaaagtctttcgaagatgaaagaacaggtctcagaaaattaacagaggaacaccgagcagctaatgaaatacgtcaaaaggcctacattgaatggactgagcttagatcagagccctccaagaagaatgaatacttcttcaggtacagggatgaccggaatgcagcagaaattttcagagctaatggcgatataaatggacttaaatcacactgtaatagtcagattgagggagtcatggaaatgtggaacaaaaacgaggaattccgcaagcagtatgttgagtcaaacaaggttagcacactaaagagattagggacccatgatggacggaaacttggccctgatgaggaccctccagtcatatcaagcagaagaccaagcagcatctatccattgtctgcctcaagcccgggagtggccactttagcttcaataccagcacctgtggtagctgctccagctgcagtctctgccaaagaggactcatttcctgttttggaagccccccagaccagcaagcgcaccaagtcaaaagcatctgatatctgtgcccagaccgagaacaactctgttatagtatcggaggcagaggctttggaacagactttgaaagagaaagctcgtctattggaggaacaattggagttagctaggaaggcagaggagttggcacggaaggaggaggaattaagcaaagagagggctgccgctgagaaggagcggcttaggatggagcagaaggctaaggccaaggaggccgaggagaggaagaggcggaaagccgagaaggacaaggagaaagccgagttcaaagcgcgcaaggaagctgaggagagggagaagaagaaagccaagaaagacaaaaggagaggcacggcaccagcagattctagcctcactggtgacgggcacgccgcggccttggccacagcagacactgacagcaacgcatcggacaacccgagggaagctgaggctcctcaaccggcggcggctcccaagaggctgtctaggcccgcagcggcaatcaagcagctgaacagggtgcagcccatgccggcgccgctacgtaacaggggcagaaggagactgcggcagtacatcctgatcgcggcggccgtgctatcggggcttgcgttgttcgtggcaggcaactatattcccaggctcaagtcggttcactcctaagtttatctgtaggaaaggggtgctaatctgtcgcggtgaacctgggtgtgattcgtattatttcgattattctccggttggtttgtactattttttttttacctcatataggttggttgtgaaagatgggggtgcattgtgttaaaagttgttttacaggatggtggtgaaatcttcgttagaacatggataataattagtactatagattctttcttgtagtagccttagcgtatatgatatttactggatatgtcgttcgccctatcgctctgccttaaatatctacataaatacagacatacagtagaataaatagacacaaacactgtatgataaacttgaataaatatctgatcgcttttgctcaacatacgaattaagcttagattctcctgcttctgccaatgttctcgacgaaggcctccccaatgccctccccgatggcctcgatgaggccgccgatgaccccgaacagcgcgttgacggtgaccctggcggcggtggccagcgcgctcctcttctccggcggcacgacaccgtgcacgtagagcccgttcaccacgtccttggcgcacctggcgtggaggtagtagccgcagggcaggcactggtacgcgtgctgccccgcgcgcctcgtccgcctgcacgcctggcacacgaagctcgtctgctccgcgccgtcccgcgccaggagcagcagcgggtgctcgtgcacggccgggagctccatccgccgcgccatcgccgcgcagcacgggtgcatgtcgaagctgcacgacgcgcaccggaacgagaagcccctcacgggcttaccgcacacgtcgcacctgcagcggaggaagccgcccgacgccggcttcacgaagaagaggaggtgcgggtgcttggggtggaacgggtgctcgtgcagcgacggcggcgccagcgcgcaggactcgtgcagctggaagccgcaggcctggcacatgaaccgcttcccggcgccgtactccttgcaccccatgcacatgaacaggtgcgggaagtcgaaccgggccagccggtgctccgggtggctgaaatgcaccatctcggcctcagcctccggcccgtccacgacgcgatctctcgtctccggtgcatcgtcttcggacgacgacgatggcagccggtggccgctgagctcccttgagctcatagacacgcacctgctgttcacgctgttgcttttacctctacctgtaccattgccattt

SEQ ID NO: 30261 - DNA, 4404 bp, Zea Mays
aagaaaacacaaacaccttagaatcggcgattcagtcccccttgagtccccgactccccactcctgtctcgactctttacctaagcttctgctcggccccatccccgtgcgtctcctcccggctttcgtctcgctctgagctcgcctctaccatggcgactagggtttagtagcgccgcagcctccatcactgccatcctcaactccgtaccggatccggaagaggcgtcggttcgtcctcaacgtcgccaacctccgctccccgtcgtcctcaccccctctatctcgtcaaggcttgatatttaacgggctctgggcagagtttaacaagtttcagcaatggggtttgataatgaatgtatcttgaatattcaatcccttcctggtgaatatttctgccctgtttgccggacacttgtgtatcccaatgaggccctacaaactcaatgcacacatctctactgcaaatcctgcttggcatatgtagtggcaaccacacaagcttgtccttatgatggataccttgtaacagaagctgattcgaagcctcttatggaatcaaataaaactcttgctgagactattggcaaagttgcggtctattgcctgtataataagagtggctgccaatggcatggagagctatccgcctgtaccacacatggtactacttgtgcatatgggaactctcctgttgtttgcaatcgttgtgggacacaaattgtgcatcgtcaagtacaagaacatgctcaactctgccatggcttacaatctcaaacccaacaagctgatggtagtcaggtgcagctagcggcggcaacaactcagccagtcacccaagacccatcacttgcttcagctggatctgctgcacctgcagttacaaccctaccaaagccatctttaactacagccacagctgtaacaagttctgcaacagcaacaggaggggcagctggtgcaaccacagcagcagtgccttcttcagccgcatctatttctgcttcccaaactccaacagctgagcaatggtaccagcagcagcagcagctccaatactcacaatattatcagcagcagcatcctggatccaacccttacatgcagcaatatcaacagtataaccaataccagcaggcgtatcagcattacatgcaaccttcaatgcaagtaccatcccaaaatgtggtgcaaggatctgcacaacctgcttcttatgttcagcctcaagtgcaatcctcccaactgatgatgcaagctcaaagtcaaccccaggtccatccattgacaagtcaaccgcagcttcagcagcatccagttcaacctcatccccaaagtcaccctcatctttcccatgttcaactacctgcagatcagtcacagcttcatcaatcaattcagtcagcccaagttccacagttccaaccaagtcatgttcctctccaaccatctggtctccaagtacaacctgcagcacatccatctgctcttactcaagttggtaaccagcaagttgctactcaagcaacggctcatcaggtgcagccacatgtacgagttcaacctccgcagcagcaacatattgttgcacagcaacaacatccacatctgcaagctttacctccacatcaaaatattcaacctcagatgcagttaaactctcaagttcagctgcagcctccacatgcccagcagcaagcttacccacaaccacaggcctatcctcaacaaacacatcatatgcacccccagaatgcttcatatacacagcagcaaacacaaggtgctcttttgcaacctgtacctgtgtcccatcaacaagcacatgtttctcatcatcctgcaccaatgcgtcctccgttgccaagtcaacagccagctttgcagccttttcagggaattcaacgtacaacacaacatggaaaacatattggatttcatgctcagtggccaccaatgggttccaacatttcttcccaggcaccaccacagggattccctgcaaactcatctgtttcttcacaatcagttcaaccataccagcaaggaatgtcttcatcacaacaggtgcattcccaacctggtcagccttatacacagcatcatgttactggcaatactggacatgttcaaacttcagctggcagatctatgactcatcttgcaccaacacagcagtttcagcaccaacaatcagcagtgcttagaactgagtcacctgctgctgcgcaccctattgggcagggttctttagatcttgaaaaacatacttcaaaatcagggaagtcagaaaatgcaattaatgctgctgtcagtgaaaataaaattagcggtgctgactcagctgccatgagacctacaaagcctcaatcaggtgaggaaaacatgaacagtgaacaaaatggttttgttggtgttagaaaagatgcagtgcaaactggcattgtatcacacggtttagatggttcaattaggagggatgggaatactgaccaggcaggtaattcacatggtctagttgtgcagggaggcaaagaccataaggcttcagatgttactaatcgtgagaaagaacaatcatttcagcaggcatcactgcaaaatgcaggggcactgggctcttatgtgcccccaggtgtggtaccacaacatccatctggaccagataaaatgcttcctcagcatattatgaatcctggtcataagcatggttcctctgaaaatatccgtcctccgttgcaacaaccatatggtttgtttcattctggaaagatatcaaggccatttggagagaaccagattcagatgcctatgtcacagcctgggggtatcagacctggtgatggtatgatccgacctcctgtggttggcccattacctggacatcatggtgcagtgttgtctccttttgatcttgaacatttgggccagccacattctctcggaatgttgaacagcaatgactttggtggtgaggggttcaatacttcaaggggtgctgcatatcccggaagacatgataatatcgaagacgatcggaaacattttccagcaccagcccttctggatggtcaaggcttgcaaagggaccctagacattttgagagagctttagttagacctgatggtttccttgattcagtacctggaaggcctccttttccaaaccatagaagtgtaggtttgcatgagggttttccaagaaaacaaaacacaactgccagtcaccctgacgtcctgtcacatggagcagaatttgatcatcacagggctattggaatgcctaatttcagaaatccaggcccatttgctcaagggacaagtggtggtcctggtgcgccccctaaaaaccagcttggctctggtaaccttcctggaaacatacaacatgcttttgcaggcccagacatccctccagctccttttaaccttggtgacatgcatccaggtgaccctcatcttgttgctgactattctcagcatggatttcctaaaactgcagcacactttggtttgggtggattctcgagaaatgggaattctggttggtgccgaatatgcatgtttaactgtgggaccgcagagaatctggatctgcatgtacaaacaagggaacatcagcaatgtgcaatggacattatcctgaaaatgaagcaagatgttgcaaagaggaaaaaactgaattatggaggccccaagtcggtcaacaacaaaaaggtttctgggaagggccattttcgtgggaataggcgctagtgttacctgattcagcttgatgtgaatttgaaggttgctactggtgcttttggacgtttcataggcaattgagagttgagatctcttcagacatcatgttcacgcggttcagagtatttgaagtggaacttaaactggaaagtgtaggataatttccagcagagggctcctgtcatacttgcttgtttccctaacgatgatggtggatgtgcctgggtgccgactactgtttgaacgaactgatcgtgccttgctcattttctaccggcatcggatgtttttgaccgactccagggcacctcatatctaccgttgctgaggtttaaattgtaaaattcccgtcctgtagttctttaattacaactaatgcaccaggcgaacgaaaattcttgtaatgtattcacaaatatttctagagaagtttgcagtgtaaatataacaatgttcgtttcaatggagtgcacctactaattaatgtaccttttaaagtctatttaatataggagtgttagtgtaagaaaccgattttccattcagtggtgtatgactaattaacctacctcccggtgtatgtaaattattgtaatatatttttaagggcactgatgaagttccttgtgtttaaacatttctatatgaaaaattcta

SEQ ID NO: 30262 - DNA, 508 bp, Zea Mays
tgtgacaacaagccacttacatgagcctaagttgtgctggcgccctgagaatccttaatctccaagtcttggctaagctccaagatccctgccccctgcccttttatctgcctgcttgaaagaaaggctgcagtgaagttcttctccctgtctgtgtgttttagctggttgctctagtatctctgcagtttgtgttgcaagtctgagttccctccccagccacctagttgatcggctccagtgccctatggtgctctcccttgtttggtgaccacgtccaccaaaaccccacctcactatgactaggattcctcgatggatttcttccgtgtggtatttgttccatgctcaaataagaacacctaaaagaagtggtgtttgaaggagtctacttcagtgcctgctcatcaagtggatggagctatctaactaaaggttgggtagaaggatctagaacctcctctctgcaacaaaggcaagccccggtgcatgcaaccccttccttgtg

SEQ ID NO: 30263 - DNA, 872 bp, Zea Mays
aacagtgtcgccactcgccacagagcgctccatcaacacgaccgccggtataaacgcagcccccctccggcctccaccaaggccaacattgctcaggctgctcccaactcccatcctccccctcccggagtacgaagtactagaaagagagcggctttcctctaagaatggcgggtggcggcgccggcgacgacgacgtggtggtggtgagctgcggcggcagaggcggcggcgaccccggcgcatacgccgcggtgctcaagaggaagctcgacctgtactgcgccgccgtcgccaaatccatggtgaacatagccgaggaagctgtcaggaggctaactgggatcaccctcatgctaccgaccgcttttgagaagcccacgagcagcgcgcccctgtcatcatgtccatctgatgcagcttctgcttctgcttctgccgccattgaagacagcgtgaagcatttcctccaggcgccacttgaaaacagtgggatcatcccaaacgcagcagtttttcagaccaagccagcttctctgcaccgtgttgctagcctggagaacctgcagaagaggatcgtcggggatgcaatgtattccgagaccgcgtcaacgacattctcagatcctgaagctcttgccgataggtaaaggttgctcctgtcctgtgatgaacagccgtgtgatgctctagcggcctaagtgcttctggtaatggaagttgtagcacccatgcgcctgggtggggtctacacagtgatttgtacactattttgaaggttaataataattgttgagaaatgatctcatccctttgtacctatataagtaaagtattccattaataaagagaatagagttttcactcttcat

SEQ ID NO: 30264 - DNA, 1319 bp, Zea Mays
aatagacattaaatgctcatattaaataaggaataaaatatggtctcctatgtcataggagataggagatatttcctatatattaaacccggttcaaaacgtggacggacacgatatccacgtctgcgcaaatgattctaatcactcgattgccaatcaacggcccacgttggtcgactttcatcgcctcttccctcaaattctctggaataggaatcgtctcgactcgctccctcgtttctttcgcctccgaacacttctgctcgaaccttgtctcccgtcgcctctcttcgttcccgtcgtagcgtccctcttccacctcttctctccccgcttccttgtctaaatcgattcatcacccattgctttcgtccttactgcagtgtccattttggttgtttggtgaaatttgtcgctatcttcgtcgactctagttcgtcgtccatttcttaaagttcaaataggcctgctttgtccccttttttctcccgtcccgaggtacgcgattgcagcagatccggcttcctccgcttcagatctccttcaatcgtcgtcttccacttcgcgtttccctctccgtactcatatggctttgtctgcatgaatgctttactggtcgcgaagccctttgttttctctagtttgcagttcgcatagctgcctcctttggatctaagcctcacggactgctgcatgttgctacccccgtcgcttccattcccctgcaagcccacgctctgctatggatttcccacctaaagttgtttgtccattcatgacccatgttcatgtgcaatagctacaactttcaaggtatttgagagattgctcaaaaagtttgccagatctaaagcatcagttgaacggtcataatagtgaatcaacaaggaactcggcggagcatctctaaaaggttcagcttggttgtaatctataaactggaggaatgtagataccaatgacgtcttactccatcagaagctactagctcctaatgaagaaccaaatttctgaaaaatacggactacaacattatccgccattttagtaatttatgaaactataaacacggtttttgtgacatgtaaatggtattatcttccaaaaaatttgctattttgtcacttctgttttgggctctctgctattatgtcaccccgtgtctatgacttatgggatcatttatcatctgtgtctataatttatgggcctaatggtaaattagtgaagtccacaacttagagtgacaaaatagcaaatggctctcttcttctacatgcgcctgagaaatgcaatacacccttatctacattccatgt

SEQ ID NO: 30265 - DNA, 1313 bp, Zea Mays
aaatagtatccaattctaattcctaaattttatacagcgcattgtcagaggccctcctgagctgagtcccttccctttcccccggtccagtggcggacgccctagccaggcaccacaggccacagcctgggctgccccactgcccctgtcgccgtcgggcaagcgccgtccaacctgtgcgtcaccgcctccgccttcagtttcgcctccagcaggggcgccgcgtggggtattcggttcgtcgtcgaggagagagagtcacttctgccgagggagcagggatggagccggtcgtggggatcgtggtgtcaaacaagatgcagaagtcggtggtggttgcggtggaccgcctcttccactataagatgtacaaccgctatgtcaagcgcacctctaagttcatggcacacgacgaggctgactcctgcaacattggcgaccgggttgtagggtggggattgggctcgagaagggcggcggcgctggggcgctgtcgtgaccctggctgggtcgcgcgcagggagaagattccaggagactctggcttcatctgggaagccagaataaattggttaggctggacccttctaggcccttgagcagatataagcactgggttgttgctgaaattcttcgcagagctaaggtatatgttccaccagctgcaacagcgtccagtcagtccagtgaacataatagcaaatctcaaaaggctggtgttgctaccaaatgatccatatgcagttactcaagcaagatgcagctatggctttttttcttcttctgtatgtttgtttggaatgtggatgccatgtttagccatggaagaaaaaatagcacgcagccaccatcttcgcttaatttagtttgttctcctgtggtgtcctccctttaatggtagccatcgaggatataattaccatattcaacaagaccagtggatactatatcggcagttgtctttgtatttgcatgcatggttggcaggtgtctaatactgctgaaatgagcaggcggaaagatccgaagagtaaagggttgtttggttcttggctacctgtctttaaactttaaggttaataagtcaaattgaagaactaaccttagatagaaaaatttagttgaactataacaaattagacaccacaccaaacaggccctaaaatgctgataataatctatatgaactggttgtctttgccgtgttcatattcgtactatcaggtggatgaatcgttttctgtgctgtttgctgcatactcgtaaattcatggtgatgtgcaatcaagattcggaaagtagacctcgatttc

SEQ ID NO: 30266 - DNA, 2070 bp, Zea Mays
cttttctcccctcaccctttctctttctccctcgaccgccccggatctatctcgccgcgccggcgcgcagctgagccgccgaagcgaggaggcaatcgaggcggacgaagcgccgcaccaaattcgacgggggatcgagcaccagaggcgtagcgcaaaatgttcaagttcctcaaggaggtggtcgcgggatccggatcgggactcaaggacttcccctacaccatcggcgagccctacgcatcggcttggggctcatggaaacaccaccgcggtacctccaaggatgatgggtcgcctgtgtcaattttttctctgtcagggagcaaccctcaggacagacacatggttgctggtcgcaacggtgttaagagattacgaacagtgcggcatccaaatatcttatcctttttacacagtactgaagcagaagctgcggatggacctgccatgaaatacacaatttatattgtaacagagcctgttatgccactttctgaaaagctcaaggaactgaatcttggtggtacacagagagatgagtactttgcatgggggcttcatcagatatccaaagctgtgagctttctcaataatgactgcaaacttgttcatggtaatgtatgcttggccagtgttgttgttacacaaaccctggattggaagcttcatgcttttgatgttctgtcagaatttgatgctaataatgaagcctctggtagccccatgttgcaatttgaatggttagttggaacacagtacaagccaatggagctgtcaaagtcagattgggcttcaattagaaaatcacccccatgggccattgattcttggggactagggtgtttaatttatgaactattttctggtgcaaagctggctagaacagaggaccttcgaaatactgcttcaatcccaaagtctctacttccagattaccagaggctcttgaattccacaccttctcgtagactaaatccttcaaaacttattgacaacagcgagtttttccagaacaagttagtagagaccatccagttcatggaaattcttaatttgaaagacacctttgagaaagacagtttttttcgtaaactccccaatatagctgaacagcttcctcgtgaaatagttctgaaaaagctgctccctgtattggcttcttctcttgaatttggttcagctgccgctccagccttaactgttttgttaaagatgggttcctggcttcctgctgaccaatttaatatcaaggtcttgccaactattgtcaagctttttgcctccaatgaccgagctatccgagcatgtcttttgcatcacataaatcagtttggggaatcaatgtcagctcaaattgttgacgaacaagtttttcctcatgtagccactggcttctctgatactgatggtactattcgtgaactgacattgaagtcgatgctcgtattagcaccaaaattatctcagcgtacaatctcaggatctctcttaaaatatctctctaagctacaggtggacgaagaacctggtatcaggacaaacacaacaattcttcttggcaatattgcaggctacatgaacgatgggacaaggaagagagtactgatcaatgcattcacagttcgtgcattacgtgataccttccctccggccagagcagctggaatcatggcactgagtgtcactagttcatactatgaaatgacagagattgcaactcgcatcctgcctaacattgttgtgctcacatttgacccaaatagtgatgtccgaacgaaggcttttcaggctaccgatcagttcttgcaaatagcaaaacaacaccatgaaaagcttaatacaggagacaacagtgtggctgaaagtactggtgttaagttaaagcctggaaatgcaggtttacttgggtgggccatgagttctgttacacaaaagggtaaaccttttgaccatgccccaatatctactgcaaatgccaataattctcaagcatcaacaacctcgactgccactccagttctgttcactttaaaagatctgcaattgagtatatcaattcgattgcca

SEQ ID NO: 30267 - DNA, 778 bp, Zea Mays
atggaaaggaaaagcgtcgcgtaatgatgaaacaagtggccttgggacaattacgatccaaaagattagcatcatttgtgtcatccttgagtggagtcaaattgaaatcatcgcacaagaaagccaccataagcactctatcagtgggtttgaacaaagccgttgctgttttgggaaaagtaattctgttcataagacatgacaatgttgctccgctgtattatttaatatgtgacttggaacggtcatattttatactgtcagtgtatgggctacataatgatgcaattaaagacggtgatcaagtggtattatttgaaccatactaccgaatccttgatgcatcatgtaaagacaagcactatcagttcaaatcaatacgagtggactttccagaacaaattctagttaacgagagagttccagcacctcatcatgttgcacgggcatcaatccatgcacacaacaaatcttgaccggtgaaaatttgggtactgtgtggcgtcaataccgtgagcaactgccagctgggcatatcatgtgtactcgcgtaaatgtgtagtgacatgttaccctatggctcaaaatgtgtaaggaagacttgggaacatattaaccatctcatttctccaattttcgttagttgttttcatcaaccttagaccatgatgacacctcaagccgtaagaatcacaagtagtttgcgtgcgtccatgcacgtgtgaagtttttacaattccacataataattgattccagacaaaaaaatgtagagctc

SEQ ID NO: 30268 - DNA, 508 bp, Zea Mays
gaaaagccgagccaatcattgccctaaatgcgcgccggcccccagttcagatccgtcacagcagtagtccgcagctgcgtcggtccgccggcctccctcccgctcggcagaggagcgtgcacgcacgcatgtgagccgcataattccctgcgccggcagctagcatccccttgggccgtggcaatgggcgcggggacgaagggtcctgcgcccgcggcccccgtgatgttggctgcagcggtgctcagcggttcttcagcctcgacgtcggcggcctacgcatctgatcccatttcggagggaggaagcggagtgcgggcagcagactcgtcggctcggctcctcgcccgcgttccttagggtatgtacaatggtgtttaatatgtttaaggggttatttgcaaaaaaactttagagccgtctctctattaagagacgtctctgactcgtaaaccaagtagcaacagacgcttcacttcacactatacgaatttgtcgtctgttctat

SEQ ID NO: 30269 - DNA, 407 bp, Zea Mays
cggatgggtatttgctccacccgtgttacaccacccattgtcatctctctattcccagatgagccggtggccggcttgaaacaagactatccttggaatacgccaatcatccgcaggcccaatcgacggtgacggtgtcctgttccagatgaggccacgggagtctggagttcgtcgtaaatcagctcggcggtcgccgtcagacacctgatgtggctgccgcgacatacctttttctgctgtgggtggtcctgtggtatatgcatttcattttgtcacggacgattgccgtcgcctcgtccggcagtgcggtcgcctgctcacgcttgatccgtgtcgcctgcacctgccgccctgttcgccgcgagcgggattacgcaggaaaaattgatcgtatgacgtatgcg

SEQ ID NO: 30270 - DNA, 1776 bp, Zea Mays
ttttctttctctaaccaatccatcaaatgtaatttctcaagttgatttttattgatccctgttggccaaggccatccaactaccaaattccagccttttctctgtaccgtgccactctttcattaatggtagcaggttttcacaaatctggtcatgaggttggcttcatatggttaagttgtcttccacaattctatcatgccttaataagcatgctaaaaaagtatttgttccttttttattttccagatttgagtggtacaaggctacaagctttagttggccacttgtactgttctctaccaatatattatttggcaaatactgttcttcaggtgtccacttgagacaccggaatgatctcacttcattattatccataaaaaaatatgggaccaacgagttaggaaaatgcagtcttttcaatggggaatggataccaaacccctctggtccagcctatacaaatgcaagctgtcgatttatcgacgatcaccagaactgcatgatgaatggtagacctgataaggaatatctacattggaagtggaaaccttatggatgtgatcttccaccatttgatgcagtaagatttctagattctgtgagaaacaaaggttggggactaattggtgactccatccttcgtaaccaagttcagtcattgctttgccttctgtctaaggctgaagaacctgttgaggtttaccatgataacgaattcaaaaacaggagatggcacttccaatcctacaacttcacagtgtccatcgtctgggctcctttcctcatcaaatctggtatttttgagaatgaggatggcgtgtctacctctgaaatacagctccaccttgatatactcgatgctaactggacaagtcagtatgagagctttgactatattattatttctggcggacaatggtttctgaggacagcggtctactgggagaacggtgcagtggttggtggtcataattctcagaacaagaacgtcgctgaacttggttttgagcacctgtatcagaaaactctacaaaacgttttcaacttcatcgtctcagcgaaacacaagccagtaattttcttcaggacctggtcacctgatcacttcgaggatggagagtggttcagcggtgggtcttgtcgcaggaaattgccctacaacaagggagagtacagagagggtaacatcgagcgtgtcatgagacagatcgagcttgagtccttcaacaaggctgtagccgcgcttaggggttcagcggacatggatagactgagactgatggatacctacagcctctcgtccttgagaccggacggccacgttgggccttacagaacaccctatccctttgcaaggggcagcagtaaatccacgcccgttcaaaatgattgcttgcactggtgtgtaccaggccccattgatgcatggaatgatcttgttatgaagatggccctggatccatgaaaaccttatggatttgtatggtgtgctcttatggagtaagtagcagctaagtgggcacaaaaaagtgtgtccgttttggtttagctgtaaaataggagtgctagcaaatagagaaacctcagggttggctttgttgcaaagatatgtgtatgttgttttaaagctttataagtttcaactgggcagatactgccagttgttcctggtttaacaggttggccctcgatgctgactgttcaagcgtaccatgaattttgagatggtagcaagaagtaaccttcaatccaccgttcagccaggcatga

SEQ ID NO: 30271 - DNA, 1841 bp, Zea Mays
ccgccacctcgagcacccgcacttcgtcgaggtgccgctggcctcgccggaggggctctatctcagagatgtgattaatcacctgaacatggtgcgcggcaagggcatggccgcgatgtactcgtggtcctgcaagaggagctacaagaacgggttcgtgtggcacgacctttcggaggacgacctcgtcctcccggcaaccgacggcgagtacgtgctcaagggctccgagctcgtggaccaatccccttcgggtccattttaccctgtcactgtcagcaacggcaaccagaagcaacagagcaggccgaaagagggcgcgcggcagccactgccaagagaccaatccgacccatcctccccgcctagcgtgacagtcagagaagccaaggcccggcggtcaccgtccgtgccttcgcaagacgaggaggatgacaccccgtctccgtgcagggatcgctccatgtcacagccacaggagctggagccccagcggaacgagaggaggacgcaaccgccagcgagcgggtctgcgagcccagtggagctcagagctcacaggcccaccaccggctgcacggacgccgcaacccagaccgacgatctcggcagaaggccggcgggccgcagggcgctcgagctgccgcgcaagaagagtctgagcacggaccacgacgccgtcgtccgtgagatcgcagagtaccggcagagccaccctcgccggtcggcagacctccacgggatctcccgggagctcctgcgccagtgcatcactactccgctgaccgtaccctcgacctgcgccaagtccgagagcctagagtcgctgatacgcgcggacaacgtgatgacggacagcttcaggatcctcgaagaggaggacgtcgtcgcgcgcacctgccccaagctgaggccggcgagcgtgctgatgcagctcgtcacctgtggctcgctctcggtgaagggtcacggggacgctggggtcgttcggacgtgcaagccgaggttccccaacctcaggttcctcccctcgccgctgatctcgcgcaccatgatgatgggcgagctcgactacctgtcggaaaaccccaggttgatggggatgaagctggaggagaaggagtacttcagcgggagccttgttgagaccaagaagacgcaaagagatggtccggctgagaggtattcggcgcttaaacggtcttcttcctacaatgcagaaagggccggcgaggctctggactgcacaagacgcgaagaggataaagccgacgacgtgtcgtcgcgcacgaggtgcctcccgcggacgccgatcctgtcatccttcctgcacccgaagggcgactcgctcaggtctcccgtctcggactgccggcggagctcctcggcccggcgggactacgacgcggcctccggggacgggagcaggaggttcgccgacgcctccgtcgcgtccgcgaccacaggggccgagtcgttcaggaaggaggagaaactcgtcaagatcgaggaaagctgtcgtccggagcccgtgtcgtgatccactacaccgtcccttgcaacgacagcgacgaaggctctgaacgctcggaggagtgacactgctgttcagctagacgacccattttttcttcccgttttttttttcactttctcccttagaaacattaggcccccttatcattgtataagtgcctgttataatgtatcattcatgtgtttcacttaaaaagatgtctcatgagactgcatggtagagtgtgtaaaatagaggacaagaaacggtttgtagaaacaagtttgaaatatgggatgaaatagaagatctggccatatgtgca

SEQ ID NO: 30272 - DNA, 5884 bp, Zea Mays
atcgagggggagagggaccgcccgcgattgctacggcctccatcgcagcgagagcttgaaagcgtgcttgcctgccattcccagctcccagttcctttccttcttcttgctcgtccacccagaaggaagccatccaaccgcggagatgtgggagcccaggaggtcgtagcgaggggtttccttgattggtgaatcttcgatcaaggatggagcaccgggctttgctgctcggcgtggcgctggcctttctgctggcctctggctcccagggcttgaaccatgaaggttggcttctcctagcgctgaagagccagatgaacgacactctccaccacctcgacaactgggacgcgagggatctaacaccatgcatctggaagggcgtcagctgctcgtcgacgcccaacccagtggtggtgtctctcgacctcagcaacatgaacctgtcaggcacagttgcgcctagcattggtagcctgtctgagctgaccctccttgatctgtcctttaatgggttctatggtaccatccctccagagattgggaacctgtcgaaattggaagtgcttaacttgtacaacaacagttttgttggtacaataccccctgagctcgggaagctagataggctggtcacgtttaatctgtgcaacaacaagcttcatggcccgatacctgatgaggttggaaatatgacagcacttcaggaattggtaggatacagtaataatctcactggctcactacctcgttcacttggcaagctgaagaacctgaaaaatattaggttgggtcagaatcttatatcaggcaacattcctgttgagataggtgcatgcctgaacataactgtgtttggtcttgcgcaaaacaagctcgagggtcctttacctaaagagattgggaggttgaccttgatgaccgacttaatcctatgggggaatcagctttctggtgttattcctccagagataggaaactgtacaagtctgagcacaattgccctctatgacaataatctagttggccccattcctgcaacaattgtgaaaattacgaatcttcagaagctatacctttacaggaattcattaaatggtacaattccatctgacattgggaatctttctcttgcaaaagagatcgacttttcagagaatttcttaactggagggataccaaaggagctggccgacatcccaggcttgaatttactctacctcttccagaaccagcttacaggccctattcctacagagttgtgtgggttgaaaaacttgagtaaacttgatctgtcgatcaattcactgaatggcacgattccagttggatttcagtacatgagaaatctaatccaactgcaactcttcaacaatatgctttctggcaacatacctccaaggtttggcatttatagccgtctttgggtggtggatttctcaaacaacagtataacagggcagataccgaaagatctttgcaggcaatcaaaccttattttgttgaatttggggtctaacatgcttacaggaaacattcctcgtgggatcactaactgtaaaacattggtgcagcttcgtctcagtgacaacagtctgacaggaagtttccccactgatctctgcaatctggtaaatttgacaacagttgaactaggtcgaaacaaatttagtgggcctattcctcctcagataggcagttgcaagtctcttcaaaggctggaccttacaaataattatttcacgtcagagttgcctcgagaaattggtaatttgtcaaaactcgttgtcttcaatatctcatctaatagactaggaggaaacataccactagagattttcaattgtacagtgttgcaacgccttgatctcagccagaatagctttgaaggttcgttgccaaatgaagttggtaggctgccacagctggagctgctatcttttgctgacaataggctaactggccagataccacccattcttggtgaactatcacatttaacagcactacagattggtggcaatcagttatctggtgaaataccaaaggagctgggtctgctgtcgagcttgcagatcgccctgaatttgagttacaacaacctctctggcgatattccatcagagcttggtaaccttgcactgttggaaagtttatttcttaataacaacaagctgatgggtgaaatcccaaccacatttgctaatctgtccagtttgcttgagctcaacgtctcctacaattatctctctggtgccctcccgccaataccgctttttgataatatgtctgtgacctgttttattggaaataaaggattatgtggtggacaacttggtagatgtggatcccgaccatcctctagttctcagtcatccaaatcagtcagtcccccattgggcaagatcatagcaattgttgctgctgtcattggagggatttcacttattcttattgcaataattgtgcaccatatcagaaaaccaatggagacagtggcccctttgcaagataagcaaccttttccagcttgttctaatgtgcatgtttctgctaaggatgcatatacatttcaggaattgctcaccgccacaaataactttgacgagagttgtgtgatcggaaggggtgcatgtgggacggtgtacagagccatcctgaaggctggacagacaattgcagtcaagaaacttgcttctaacagggaagggagcaacactgacaacagctttcgtgcagagatcatgactcttggaaagataagacatcgtaatattgtgaagctttacggttttgtataccaccagggttccaaccttctactctacgaatacatgtcaagaggtagtcttggtgagctacttcatggacaatcatcctcttcacttgattgggagacacgcttcctgatagcacttggtgcggctgaagggctttcatacctacatcacgactgcaagcctcgtatcatccaccgtgatatcaaatctaataacattttacttgatgaaaactttgaagcccatgttggtgattttgggttagcaaaggtgattgacatgccatactcgaagtcaatgtctgcaattgcaggttcatacggctatatagcaccagaatatgcttataccatgaaggttactgagaaatgtgatatatatagttatggcgtcgtgctgctggagctgctaactgggcgtgcccctgtgcaacccttggaactaggaggcgatctggtaacatgggtaaagaactacatcaaggacaattgtttgggtccagggatcctcgataaaaaaatggatttacaagatcaaagtgttgtcgatcatatgatcgaggtcatgaaaattgctttggtatgtactagcttgactccgtacgagagaccaccaatgcggcatgttgtagtcatgttaagcgagtctaaagataggacgagggtcagctctgcatcctcgcctgcctctgatgattcttcaaagaaggatgactcataatgtatttataatatgttcgattagccaaaggtaatacacatttttttactgacttttcctagtattgatagtaattagtagggttcttgtaatctgcattcattatttgtgtcagcatttcgtagggagaaatatgatagtggttcatagtttcgtagtgtcattgtatgccgttgtctcagaaaggtttcagactagcatgaagcatttgaggcacgtgacggtcttactgatgccgttgtctctcagaaaggcttcctcttctctgcagatgttcattgttcagttaattctatatgcgtcggtgcattcttactcgagttacaagtacactaggaacacctgtcaggtagccaattctgtaatattctccaacatgaactgcagtgcagatcatatgtaatcatcgatcatatgcaatcgctctttgtagctgttaacctgtagcctctgatcgttgttgctgagtcgtctttctcttccccttggcatgtccgtaccaaaaaataagttatgaaaccacgaagtcgcgcccaccaacggacgctgcctctaaaaaagcagatcagcgcgttgtcgcagcgtcggagcacaagcgacatcgctccccgggggccgtcggccggcgaccggcgacttccgcagtagaaccaactccacccacccatccacttggccagcagcttcttgcctgcatcaattgccatggcggcggtggaagcgaagaggagcccacactttgttctctttcccttcctggctcacggccacgtccctgtcttcctccgcctggctggcctcctccgcgcgctccgcccagggctcgaggtcacgctcgtctccaccccgcggctcctgggctccctcacgctcccgcctgcctccccacccgtgcgcctccacgcgctcccgttcgtccccgccgaccacggcctgcccccaggcgctgactccctcgccgatgtccagatccaccagttcatcaccttcttcacggcctccgagtcgctccgccctgcgttcgagaagttcgtctccggcatcggttccccagtctgcatcgtcgccgatgccttcttcgggtggacggccgaagtcgcgcgcgcgcggggcgcgtcccacgcggtgttccttcccggcggcgcgttcggcaacgccgtgttcttctccgtgtgggagcacctcccgcacgcccttacggccgccgacgagttcccgctgccggatttcccagacgtcgttctccaccgcacgcagatcccgaggttcatcctctctgccacgggggcggacccctggacggccttcttccggcgcgtcatcgcctcctgccgcaagaccgacgctctccttgtcaacaccgtccgggaactggaaccctccggcctcgacatgctccggagaagcttcggcgtccagccatggccaatcgggccagtcctcgcagagccgacggccccgtcgtcagactcgcgggacgacgccagcatcatccggtggctggacacgcacccgccgcgctcggtgctgtacatatcattcggatcgcagaacagcatcagcgcggatcagatgatggagctcgcgctggggctggaggcgagcggtcgccccttcctctgggcgctccgcccgccgctggggttcgacgcgaaggacgtgttcaggcccgagtggctcccggctggcttcgaggagcgaacggcgagggcgaatgtgggactgctggcgcgcgggtgggcgccgcagatgcggatcctgtcgcacccgtccaccggcgcgttcctgagccactgcgggtggaactccgtcctcgagagcctgtcccgcggcgtgccgctgatcgggtggccgttgggcgccgagcagttcttcaacgcaaatctcgcggtcgagtggggcgtctgcgtggagctggcgcgcgggaacctggagagctccgcggtggagagcagggcggtggtcgaggccgagcggacggtgatgggggacacggcgaagggtgatgagatgaggagggtggtggcggcgatcgcacgcaccatggaggccgcgtgggaagcgcctggcgggtcggcggcggagagcctggaagggttcctgcgatgcgttgaaccctgagatgccccgctttgagatggttgcgcgaggaatctgcaactaagtacgcgcgcgggaaatctgtgttaagaattcctcaactacaaaggacgacggattgatgggattacggctcctgttgcattgtaacagaaacggatttgtttggttcattaacgtgtagcctgcaggattggatagcgcttctgggtagagataacgagcagacagtggtgcaaacgtttacgggcataaaaaacggtgaaccaaacaacaccttaaaa

SEQ ID NO: 30273 - DNA, 2911 bp, Zea Mays
ttctagagattcgtatgtatttagtgttttgactggacattccagctaactaactttcgtctcacaggttaacatgtgtatatgcttcttgcaaagtggaagaaaaccatgtttctgctgaggaacttggtaaaggaattcagcaggaccaccagatcattctaaataatgagatgattcttcttaaaactttagattttgatctcattgtttatgctccatatcgatcgattgaaggatttattgatgacctagaggatttctgcagggcaggtaatggtccattccagcgtttgaaggagttgcgccaggctgctatatcccatgttgacaaaatgatgttgactgatgcacctcttctctatacccctgggcagttggcactggcggctcttcacaagtctaatgatcttctcagggtcgtcgattttgaaagatacttggaaattatcttctcaaggcaacattctgattgtccaatcgaacagtttgttcagtcgatcaacgaaatcaattacttagtcgaccagcttaatatacctactgtcaaagacatgagacacgtggaccgcaagctgaaacattgctgggatccaagctcacatgacgagcataacaagaagaaagaaaagaagtcaaagcacaaatcgaaaagaacatctaccgatgcccaactataggaagcatatggtccagcagtggctttgtgtaagagtacaacggtgaggaatttcgctaggctgtctagtgtgcttcattatgtatgctatcatgttaaccagtggagcagcttcgtttaatcatttcattcagggcctccaaatgatcgaaactgaactcaggcatctaagcacagcagctctaagacagctttctacaccagctgaggcatacctgaggtcaagcaattttgtgacgatgtgggctatggaacttcattgctccaatgggagagttgcagcaaagatacaaactaagagatgtaacattggatgcctatctccaaagtacggagaacttcaaattttatatggccgactttgtgtcagccacaattacttgagttccttttgttacggatgtagcattgtttattaagtttaaacgccgaatccaagatgatccacctgctgttgtgaatcgttttttaactgatcagtgattttgaatctggattgtgtatatgtgtagagcttatcatggcaccagattgttgaataatttctgttatttctattggttctgttttccagtgaccggaagtccaactctaattcagacatcggtgacgcgctaacttgtgtgttggcccttctcagttcagtcagacaaatttccctgtgttcagtcagggtaaaaacgctagaccttttggtagaagtcgacatatagaatggtaaaaagttaacagcacgaatgcccgaaagctcaaaaatgcgcacttgttcagcggagaaaacatggtgcgtgcaagcgccacagctcaactgttcagttgtcttcatttcctcgtcagcgatagcaaggtagaaacgatccctgacggccttgccagcagaatagtagtgtaaaggccggagagagcgtatgtacaaacttcctccacttgttggcaccatgtttacagatctcaatgtgagatcaggagttcaggactgcagtgctggttattttgccacaaacttcagtttggcgttcgactgcttcagcttcactgtgaggtacctatgccgagcaaatatcaccgccactgccgttcgccggatcagcctgctgctgttcagacatcagcaccgcagcttcttggagagctgcgtgtaactcgttgtgcatatttgacttctccaaggtaaaactagcgccgttcatacatggactagatcgtttccttgtcttctcttcaagtatttctttaactgcctgcgatacagcagcggcgccaaagaagttccccagcagcgcggcgtccgtcgccgacaacccccacagcaatccggctgcaaagcccgcgagaaaactgtctccggcgccagtagggtccacctgtacggcggggaacggcgcaacgtgcgcctccccaccgtcccagtacagccggcagccgtccctcccctccgtgacgatcacacagcactgccgcctcgtcgtttccaccccaacgtatggcgcctcctccgacgacgccttaacgaacgccactcggggcagaagccgcgcgtacggggtatcgccaagcgccacgtgaccgacggcgccgtcaccgtcgaacgcccggatcagcgcctgcgcgtccacgagcaccgtgcggcagagcctgatcatctgctcgagcgtctccggtagcacctccccggcgacgccgacagcgaggccgtaggcgaagcggcggtcgggaaggtcggcggggtagatcgggtcgcaggcgcgcacgcgccggagctcccggtcgggggcgtgcgccgaggcggcggtctccgagaactgggcgtggaaggaggtggttggggacgagcagagcagaggcggatgccgcgcggacgccggcgcgcgggcgtagatgaagtcgtgacccaccttggccacaacgacaaagggggatgtctcgttgagcgcggcgccctggggcgaagcggcgtcgagcacgttggacacgaaggccgcagccccgccgagcgtctcccccactatgcgcccgccccggattagcacatcgtggcagtagctccccaccaccagtccctcaagcccgggccctcccttcgtcgtaattagcagctgctgattctccctttcctcatgagcgtcgtcgggctctgccgcgagtggcatcgctgcggcggcggggggaggcgccacagttcgggggcggagagggaagcgtgggggtctcggggcggcgagagagaagagg

SEQ ID NO: 30274 - DNA, 1142 bp, Zea Mays
tgttagttcaagatgaacattactggttcaatatgtaaggttagaagtgcataagtgggaaaaaaatattatacaagatcatatcaaagcagcataaaattctagcatgattgttaaggcagtgaggcaacctacggcggtctacaaccttttttccttttaagcacctaaggcacgacgcaaggcgacttcatagacatataaggcaaataataacaaaaaatgcataagtaaatagatagaccatagatattataggacatacaagtcctaatacatagcatagtttgcaaaataacatagttgacagttcataagaactaacaagttcacaatgcatagttcataacttcataaactaacaaatagacctgctaatctgaaaaattatgaagggccaacaaccaggttacgatagcccatgacctccactcggcacacaggcctaatccaccacgccaacatatccccgttcaggcatccacctcgggtaaccatagaacctaagctgctgattttcttccacatccccagtcaagcacctcggcacagcgggcagggcgagcggatggcgcggcgggcaggcaaagcgccgggtgggtggcgcagcgtggcggacgggcaccccgttcctatgcgtccacgacaagcgctaagacgtcgccgtggacgccaccgtggacgccatagacgccataagcccagatggtaaggcgtccgacctccagcgccttagcgcttaacaaccacgaattcgtgtgagtgcatattatatgcaaacaatgtcagaaacagacctgtgctgcccacttaggaagggacatccaaacttcaaaggtagaagccccacaagccgtggacatggaagttaaaggctcgcttgatggtaacttgtcctcactatttgatagagcacggactaactggctcttctcaataatttcattcttgatgtggctctctagaagctgcacagacaggtgaacaccatgtgactttacacagcaagaccaaaaaagtatccaaggtcaaaggaatatatacctggtcatcaaaacaagtttgtgcgctaccagaaacgaggagtgacacatgggaagaactgcaagtactgatatcacagcgcatagtaaccatcccac

SEQ ID NO: 30275 - DNA, 740 bp, Zea Mays
cgattctgcagtgactctttagcaaagttagacgaccgaaggggtatgggacgattttggccattggatttcaatctgagggttcggattagatgtacatcactatgaaccattatacgattgtgatcgttgatcaaaagatctgtggcacagattagttttaaacgaactctcatcttgtccctccatcttccgatcaatggtcgcgaagccttctagccgaacggtatgcacggtccgatccgagccgttagcggctggatcaacggttgtcgctgtgtcatcctccgacctcctcaccacagaccaaacgcggcgcgccgccctacctcacggcaaaagggcgcaccggtgacgagtcagccatgaatcgatgcctaagcactgtttctaccggagccacgtgacgaggaggatgaggcggacttggatgaggactacttactggatggtgcggcatggagggctctgccctctgcacgcagcggaccaatggcggaggttcaactccggtgagtaattccggtgaccttagtggacttccccgcctgagtcggccatggctatatccagtgaacacctgtgaacctgcacggccaccgcacgagggaaatcattggtgtaaatgtgggtcgacgacggcttcattttccctcacggagccgcaactaggatagttcttgaggcgacgaaggaaggaggtggcggctcgagctggaggacaaaggggtcgagtttta

SEQ ID NO: 30276 - DNA, 2298 bp, Zea Mays
ggcgaagcgggttggccgaggtcgaggccgggaatggtggcgggtggcggcgtggcaaaagctactgctctgctctgctcgctgcccgctcccagagtctgatccaaacgcctcgctggtgtcatgctgatgcgccctcccctcagttctttgcttgtgggatgagtggaaggaaggccggtcctcgctgcagaaagagggagaagacttcatctgcacgtgctgctgatgtgcattagaggatccgtgctgataatatacagctgacacccacaagatcgactggataagttcgagcctgacggcatcatgggttccggcgatttgagctcggagatggagaggacggttcttggcctgacgctgtgggtctggattgccatcggcgtggtcgcgcttctcgtggcaatcctgctgatgatctgcatttgggtggcgtcccgcctgaggaccaagagaaccatggacagcctgaggcagacgcagatccccatctactccaaggagatccccatcgaccgggtcggcgggcgcagcctggcacagacaatgcatgagcgcgagcagccgagcttgccgccgccggacaagtacgcgaaccgggagccggccggggcggctgtggggcacctggcactcagcaagtcctcggatcatgacaacatgagccaggggagctcggtttgcaatgctgaccgtgctggcactggcagcatgcactccggtgaggatgggagctcaggacctcggaggaaacccaactctcctgcggcgttcgtgtcagcttcgcccttggttggccttccggagttctcgcatcttggttggggtcactggtttactcagcgtgaccttgaacttgctaccaaccgcttctctaaggagaatgtgctcggggagggtggttatggagttgtgtaccgtggacgtctggtgaatggaactgaagtcgcaataaaaaagatctttaacaacatggggcaggcagaaaaagaattcagagtggaagttgaggctattggccatgtccgacataagaatttggttcggctgttgggatattgtgttgagggcgtaaacaggatgctagtatatgagttcgtgaacaatggtaatttagagcagtggcttcatggagctatgcatcagcgtggtgtttttagctgggaaaatcgcatgaaggttgtaacaggcactgcaaaagcgcttgcttaccttcatgaagctattgagccaaaagttgtacatcgagatataaaatcaagcaacatattgattgatgatgaatttaatggcaaagtatctgactttggattggctaaacttttgggatcagacaaaagccacattactactagagtgatgggaacatttggatatgttgcacctgaatatgctaatactggaatgttaaatgaaaagagtgacgtttacagttttggcgttctcttgttagaaactgtgacaggaaggaatcctgttgactacagccgatcttccaatgaggtcaatcttgttgaatggcttaaaacaatggtggccaatcggagggcagaggaagtggctgatccaagcttagaggctagacccagtatccgggctctcaagcgggctcttttggtggcactgaggtgtgttgatcctgactctgaaaagagacctaagatgggccaggttgttaggatgcttgagtcagaagaagtaccataccgggaggatcggagaaatcgtagaagtcgcactggaagcatggatattgagtccattgcagagggttccaactctgcggagtttggaaagaaggtagaaaggactggaagctctatatctgacagatctcaaccatgaggcctggaaatctaagctatatcaggaactgtctcagaaacgatgttaatcaccaaggtgattgctgtcctgataggggatgctggtaggtgacagaggcaaggcaggcccaggtattactgcctaagtattaggctttagttttcaggtgcagtagaagcattcttggatgaggaacctcctggtctcctcttatttgtataggtatatgttggtgcctgaggaattcctcttggtttgggtgtttaacatttgttcggttcttttatttcttgcattgttgccttcttaaatcagtttcacttctccctgatgaaatgctgaacatgaggttgtggacttgtggtcttagcgatactgcttgtcattgtttttcatatgtttacctgcggcctgctctaccttatcccatgagttcgttggcgaaaggtttggcaacatacgctgatt

SEQ ID NO: 30277 - DNA, 931 bp, Zea Mays
taccaaacgagcccaaacattgtggttttagatgacgagctctgctggttagatagatggaggtgccaatgaacaccacgcaatctggtcctcacttccctgtgcagcatcggtccctctcgttagacatcaagggaaataaaacagatattgttatcaataaatacgaagatacctttctggtgattgtgacccaaatcggctgcatgggaaccatactagctgccaagaaagatgaaagtgttttctccgacccaacctacaacgtgtctgttctttttgggaagagagatgagccactcctactagcttgcgcacgtcaacttattgagcacataagtggcagtggctcagcccggtcattggtgatttctctgggtctgaaagatcattctcagggaacgctgaaggatattactgtagctgtgatcgagaatcgcctttggtgatgattgaatagctgagctgggcatgggaacgctgaaagatactgtttagcattgcgcaataggagccatcgtttataccatgcactaaattctggtacttttgtagttagaccttctatctactgggattaacaaaaggtgggtttaagctgctgtcaaaattggagtgtcaactttaacgctaaacaaaaggcaatgtacactggtaaagcacttctgagtcgaatcatgattttcgaggctatctgacaatttcagctatccgtgctggggctgtcaccgtggagctctgtgcgtactcctttgccgtctaggactagctaggagagctactgtactcgccactcacatcacggcttaatagcctagtctcgctcactgtattcaaggagctgttgttgttgttggtctaagggccatctccaacaatttctcctatacatttttctttatctatactttctaatttattttacaatctc

SEQ ID NO: 30278 - DNA, 3197 bp, Zea Mays
atgccggcgggaggggccattgtggtcgtggaggtggtgcaggtggtcgtgccgggggcagtggccaagccgccagggagcaaggaagaggcggccgcgtcgacggggatgaagagcgggctcgcgcgcttggtccggcgcacgggcggcgcggagaggccgacgtcggcgtggtctgttgctggcgggcgcgtgctctgggctcgagccgccatccccttgccggcgacgcagatcccgatgggggggggctggctcgacaatggcggcacgcagattcggcacggggcggcgccgcgaccaggcggaggagggaggcgagcggcgcattggcgggtccacgaccgagggggaggagagccagtggaggcggaagacgagtggaggttcgccagagtgacgtggaggctgacggtaacggctgttggccttaacaccgaatggggtttattaatggccagcatttcagaagacaacaatgaagaaactcctctgcaggtgcggttgaatggagtagcaacattcataggtattgcaggcctttctgttgctgctatggtcctcgtagtcctctttgcaagatattttacaggacatactacagattcagatggctctgttcaatttgttaagaggcacactagtgtgaaatctgcaatatttggttcaataaagatactaactgttgcggtaactattgttgtcgtcgctgtacctgagggcttaccactggctgtcacactaactctggcttattccatgcgaaaaatgatggccgacaaagcactggttcggaggctttctgcctgtgaaacaatgggttcagcgacaactatttgtagtgacaagactggtacattaacattaaaccagatgactgttatgcaatcgattgtcggtgaagtaaagctgcaacctcctgctaatgttgataaactgtcatctactgtagcctcacttctacttgaaggaattgcacagaatacttcaggcagtgtgtttgaggcacaggatggtagcgtcgaggtaactggttcaccaacagaaaaggctatcctatcttggggtcttgatcttcgtatgaaatttgctgaggagagatcacgatcttctataattcatgtctctcctttcaactccgaaaaaaagcgcgctggggttgcagtggttgcgagagattcaaatgttcatgtacactggaaaggagctgctgaaattgttcttgccttgtgcacaagttggctcaatgtggatggctcaacacatgaaatgacacctgataaggctaatcaactcaagaaacttatagaagatatggctgagcaaagtcttcgatgtattgcttttgcttatcgaaatcttgatatgaaggatgttccaagtgaggagcaaagaatcaactggcaattgccagataatgaattgactcttattggaatcatagggatgaaggatccttgtcgccctgaagtaagagacgctgtcgaactgtgcaaaaaggctggtgttaaggtacgaatggtaactggagataatctgaagacagctaaagcaatagctcttgagtgtggaatactcgatgactcagaggcatctgcacaagctataatagagggaagagttttccgtgcttacgatgatactgaaagggagaatgttgctgacaagatttctgtgatggcacgatcctctcctaatgacaaacttctcctagtaaaagctcttaagaaaataggccatgttgtagctgttactggtgatggaacgaatgatgctcctgcattgcatgaggcagatattggtctttctatgggcatccaaggaacagaagtagccaaagagagctcagacataataattctggatgacaatttttcttctgttgtgaaggtggttcgctggggtcgctctgtttatgcaaatatccaaaagtttattcagttccagcttaccgtaaatgttgcagctcttgtcatcaatgttgttgctgctgtttcctcaggaaatgttcctctaaatgctgttcagcttctctgggttaatctcatcatggacacactcggtgctcttgctttggctactgaaccaccaacagatcaacttatgaggcggccaccagttggacggagagaacctcttgtgactaatatcatgtggagaaacttgtttattcaggctgtctttcaagttgctgttcttctgactctcaactttaggggtcgggatcttttgcatttgactcatgacacactaggacactctagtaaagtgaaaaatacacttatattcaacacatttgtattgtgccaggtgtttaatgaggtcaattctcgtaaaccagaagaactgaacatcttttccggagtttcaagaaatcatcttttcttggcagtagtgagcataactgttgtgatgcaggtgataattattgagttcctcgggaaatttacatcaacagtgagactcaactggaagctttggcttgtttctgtagttattgcttttctaagttggcccttggcttttgttggaaaattcattccagttccgaggactgaattgaaggatctcattgtaaggtgttggcctaaacgtggcgagagtgcagcacaacagactcaggatgacagaatggaagtaccagtgtgaagctgttcttgagcaacttctcgaaattatcaggtgttagtgttggtgcacatagatggtgttggctaattttgggtgctgatttttctaaccatcctaccttgttgcctggctatgaattctatggctgtagtcagcaatcggggaggtaaacctctgctgactcgtgatctagaatttgaacactgtaaacaaaatatgtttattgtagcctaacgaaggtcaggacctccagtggtttattgcacaagttgtgcagtcggtcccagaatcatttggggaaggcgctataaacagtttttcttggcaggagtggagtgtagctccttttcgctaatatcatttttacttttagatgcaatcaagaacattttgtcaaacactctaatagtaattggctgattttgttagagttgcctttgctatgccataattgtatttcagaaattgactggtggtatgtattgcgagtgtaaatccactattattggcggtatgtgataacaaaaatatttatggtgccctaagataagcaaattctgatggtg

SEQ ID NO: 30279 - DNA, 4898 bp, Zea Mays
ttattccataagttccaagagtctgtatggggaaggcaagaaagaaaatacaaaaggaaaaaaaaaaatagtcgtcttcttcctcgtgaaggacggtctaggtgagattgtcctcttgtcgagatcctcacgtcccggtcctcaccaccggtggcgacggggtgtgacagttggtaccagagacggtgtatcctcggcgtggggggcgacggacggccaccagctcttctctgcgctagctatcggggtggcgacgacgattgttggcgcgtcgacggcggatccagcggtccggcgtggtgacctcattgatccggcgcgacctacctccttcagctaacggtggcgctccagcggcccttggctcgagttccgttttgttccgcgatggcttccctttcccccggcaactccttcatcgaggcggtgtcgacggcggtggttgcggcggatttggcggtgctgggctgacgggaggtctcgatttggcggtgctggtggcggcgactccatcaagttgcctgtgtgctccctcaactttcttcctcagatccccttcggcaggcggcgtgcccacgacgccactgtttgggatatctggtgacgagtgctctcagtcacggcactggtgacgggttccctttctctgagactccaaccactggcggcaacacgggatttggtgcgtgtgtgcggcagctacgggagattgtggagctcgagtggctctgcatcccgctcgtagcgctcagatcgtgattggctgctttcatcctctacaatcactagttgagcagattttgggtgagcgcggtgttaatttgttgatgctaaggcaagccagtaacctggcacacaacatgttcgatgatatgtcatttacagaggtggtctgggatgatgaaggggcactattcgatgaaatgcattgcacggatgtcatctgggatgaggagacacatcatggctttgactcacatggcctattgcagcaccatgctgaagcaatggataaccagatgcagggcaaggagaaattggctcaaagtggagattactatgatgagaggaaagtcaatattgaaccagacatcaacaacttgctcattcatgtcaatgaccatttctctatgttggtgattggtgcggattctaggcgaagtgatgttgtgtgggacgaggacatgttatctgacctcgatactcatggtggcttattacagttactggcatgttgtaaagatgatgagctcaaccaggacagagacactccttttctcttgggccttggtatggatcaggtggatgagatgctggccagcccgtccagccttggcatgaatgaggacttgccatctgtacctgagacacatggctcgttattgcagcaagtggcatgggacaggaagcactttgcttatgaaatgtgcacgcttattgctgagatggtcctggaagatgttctcaccgatgttggcaacctcgctttcagcattgattcaagcatgcagatcagtgatcaaccttccaaatatgcgctagtcatcgatgcttatctgctgaagacgcagtacaaaaaaccatacatttctataagccaatgggatccaggaatttggtgcaaaggtactatggcccatgagcagcaacagcttgagatatataggatgtttgagaaacaatgggattcagttatccttaaatggttcaggaatccttttgtgctgctgcaatcatgcaatggggaggatctgaatgaacaaggcacagtgcctgtaaatgacattttcgatgtattggctgctggccaggagttgaattttggcaacgtcaccttgatcatttatgggggatgccaaggagcaatgggtctgcaggttctttttgcagaattacacccttggcaccacaatgtctttacctccatagaattagcaatacagtcatggagaatcaatggtttcagtccaggaagctgcaagctcaacagacaatctatacttgttgctactaacttgcagttcaattataaagcttccaagtttgtatcctttactgatacttatcagatatacaagaacacatgcatttgtatcggagaattggaacctgctagttggagagatacttgttggctacctgagatctcacatgccaatgtgtccacacttgctagtgaggaaatagataacatgcttttccaggttggtgattttcatccaggagagagtgagcagcttgagctttacatgataacattgatacagtgggatctaggtccagtagaattttacaaatcaaactgtaggtgccctgctgcagaactgatagggtggtgctgattctagtttgttcatacaatctgtttatgttatgctgaaagctagtttcttctttatcatgaggtactacttggcccaacagtcatggaatttctgggatctttagtcaccaagatacaattcatggtcatgcggttgtttggggacaagcaaccatttgtgggggtggaaaggatatatggcaacacaggttaaagtcgtgttttaaaatggaaatgcatgctacagtcctgggtgtcaatgatgtattgcagcatatcagtgcttgttctctattcctgcagcttggtcgcagaaaactatatagggtggtgatgacttctgttctaaggcccagagatttgctgctgaagagctatacaacattcttgaccaagtcgatgaactattgttgcttcctgaccaaaagctcgggagaccatggtgtgacactgatctaatatgtgaaccgattctgtcttggagactcaatggtggcagcccaagcaaatgtttgttgcaactcaagacatacatagtcagacagtgggatccaggaatttctgggatctttagtcatcgagatacaattcaaggtcatgcggttgcttggggacaagcaacattttgtgagggtggaaatgtaacatccatgaatagcaacatgtccagggctttagctgacaagcgggccacccacccatgggacccaggtggaagaccagatgctgggtataagttccaagagtctgtatgggggaaggcaagaaagaaaatacaaaaaaatagtcgtcttcttcctcgtgaaggacggtctaggtgagattgtcctcttgtcgagatcctcacgtcccggtcctcaccacgggtggccacggggtgtgacatgatactaggagatgtaacggagcaaagaattctgagaggagccaaagatgaggataagggatactgaagatcctcgtcgagctggacaaggatctcaagtctgctctgtgcgatttggaagacgtcctggatgttattgaatatcgctgaatcgagaagaaagtcatcggtggtgacaaaaagttgatcagcactactatttgcatctgggcgctgcaagctattggcgattggatcacctactggaagcgtagctcgttcgggcaaaagctgttgcagtgcgcgcgcccagaaccagtatcagaagctcagggaccttggagagaagctgcagaagtgcgctcaggatctggatctgaagttttgggaccttgtagctaagctacagcagtgcgcccagaacctgaatcacatgttctgggactttcaagctaagttcttgcagtgcacccaaagcctgccactgtatatccatcagggagcagctgggcaaccaccaatgcggcaatgcctgattcacccgccgcaagatccactgcagaattcagggatgacattgaacaaggaccatcgacgcctgatgatgcaccctcgaatccaccgtcgcctaatgccctcccgaatgctgctggctccaccactggcaatcaacacggatcagctgaggaggcaccgacgcctgatgcaccctcgaattccctggtgcagatgatctgcgactgattggtctatgggtttacagcactccgttctttttatttggctgcgcgtcatcttcgggactggtcatatgaaccgattggcatcaaagaatgatggtggtactgcaacagattgggaccttcctactaatgagataatcagcttgaggaaaaggataaagaacatagaatatattgtcagtgagacaaataaatcacctctgtcgaaacatagtagcagcagcacaaagaatgaaattgatgacaaggaaagcagcagcaccaagaacagcggcaatgtaaggagcaccaaacagaaggaaattgactacgtatacagaagcattgaaaagaaagttaaagttttcggtcgagacaaggtccatgaagatataaggtgcttcataatggaccggctaccgatgcaccaagctccgactccagtaaaccttattctgtgattggcatatatggaattacaggttctgggaagactactctggcacaatatgtttgtgagtatgagaagggcagctaagaccggtgttatgccaagtgacattgaagtgtacatagctgaccataagggaccagacccttccaaacctgaggagttgtgcagtcaggcttgcacagatcggctgaatatggtcaagaaatggtgaggcgccatgaaaaggactacgaccggagaaaagcaccaatcgatcccatggtggtgtatgctactggaggcagaaagagtcatgggcggtactccatgtttaatggagtgattgactccagagaggttagatctcagaggtcggggtcttcctccgaacgatcaggggctagaactcatcgccaatcagagcatgagttggaggttgcaagggtgcaagaggagataaggcaacgtgatgcattccaaaggcacaacatgagtactttgcctcattcttggcgcagcagcagaccgtgcttcaagaatactcaggacatttga

SEQ ID NO: 30280 - DNA, 1444 bp, Zea Mays
ctcctacagtcaggcgctggcaaagccactcatcttcggttttccggttcttcccagttcccattcggtcactcggaccggacatggcgatgagtttcttctcgcccactaccaccccttcatcctccgcatccctcctccccatccgccgccagtgtgccaccggcccctccgtgtccttccccctcaagccccaccgcttccgagttcatctcaaacctccgcgctcctcccgaacccgaatccacaccctctccacctcctccttgaagatccccaccgagagcattctctcttccgtggtctccacctcgacgaccctcctttttgtgctcgtcgcaggcctcctctccctctccggcgtccgctcactccccgccctcgcctgcgctccggcgccgacccagcaaccgcaagaaaccgaagaacaagaatccaaagagaagaagcagcaagaagaggctggtgagaggaaagaggacgtgttgccgcagctggatgaagaggacgcggaggatgacgaggtgcggatgtattcagcgattctgagccgcaactctggcgacgtggacgcgctcaagtgcgctctatacgctaagatgaggcgcgcggattggggcggggcgctgcggttcgcgcgactgctgcgcgacgccgagcccagcgagttggagtggcgcctgatggtggcgcagctgcacgagctcaagggggacctcgccgaggctgagcgtcacttcagggagctcctggcagaggagcccctcctcgttcgggctctccatcttgcaacttcagagagaagggtcccggaggagcgcaacataaagcttttgatcgcacaaatgcatgttgtcatgggtcagttagatgttgcgtctgagaaactacaaaatcttataaatgaggatcctcgggattttcggtctcatctttgccagggcattgtgtatgcacttttagacagaaaagaagacgcagatatgcaatttgatgtatacagaagccttgtgccggatgaattcccagataagagttttatcagtgatgttatactggcggctaggacggagtcacatgatcggctacaaaaggaatttgactctgagtttcaagcgaagaaatgatacattaagttttgtatagatgaggcccaaatactcctggtaggctaaatggttgcatggtaccaatcttacaaataaaacataacacagtaaaagcatagtgaaaagaggcgtctcttatcaggctatcaccaattttcctcatttcctctccctgttagtctctgcagacatttctcagtgaaatataatatagcgaagacaaaattctgcttgaagttaaaagctgtagtatccaaccagatggattgatttgttgatgttcaaatgtagaatttgtgaagcttatattccgtcccttcttttttgcgttggcc

SEQ ID NO: 30281 - DNA, 2544 bp, Zea Mays
ccgcaaagacatcagcccagccttccccaattccggccacacccgctacgcctgtggtgccgcctgccgcctccccttcctcttcgcttcccgtgcaagcttcaccgccgccatctcgtcctctcgttgcgatgcttccctttccgcgccgcggttcctctatccccgccttccctgcccgctccggctcttgcacctgaccaagtccgccaatctgttccccttttccgtacgagggtactatcgccggccatttcgattcggggttgatcggatcagcgtaggctgatgggtcgcgatgctgagaagacctctccgccggtgccatcgtcggaattggaacaggaagaagacgacgactgctacctaagcgatcaggaggacgatgccctagaagagtccgttctccatgtcctcgaggacgagcacctcgaggactgccattggtccgcctcatgcgtgatcaccaaggaatccctcttggcagcgcaggtgactgcggaggctcccccatctgaaggaggatcttaggaaggtgatggagctgctagggttgagggagcaccatgcccggacgctcctcatccactaccgctgggacgtggagaggatttttgagcttctcgatcagaagggaagggatagcctcttctcggaggctggtattcctcttcagtacaccaataatgctggtccaacctcctcagcggaggtgacctgcaatgtttgttatgatgatgtgccaccctcgtgtgccttggagatggactgcggccacagctactgcagtgattgttggactgaatatttcattgtgaaaattaatgagggtcagagccggcgtgtcagatgcatggctccaaagtgcaatgctatttgtgatgaagcaataattcggaaactagtcattgcgagacacccagatattgcagaacgttttgaaagatttttgctggaatcatatattgaggataatgatacagttaagtggtgcccaagcacaccacattgtggaaatgctatacgcgtcaaaggtgatatttattgtgaagtggaatgcacatgtggatgccagttttgttttaattgctccttacaaacacactcaccatgttcctgcatgatgtgggagctctggattaagaaatgccatgatgaatcagaaacagtgaattggataactgtaaatactaagccctgtcccaagtgtcacaaacctgtggagaagaatggtggctgcaacctggttgcatgtatatgtggacaagcattctgttggttatgtggtggtgctacgggtagagatcacacgtggtcaagtattagtggccacagttgtggccggttcactaatgatcagactaagaagaccgaacaagcaaggagagacctctatagatatatgcactaccacaacagatacaaggctcacaccgactctcttaagcaggaagcaaagcttaagaatgagatccaagggaagatatccatttcagaaaataaggagtcaaagataaaagattattcttgggtcataaatgggttaaacaggctattcagatcaaggcgtgttctatcctattcgtatccgtttgcattctacatgtttggtgatgagattttcaaggatgagatgactcctcaggagagagaactgaagcagaatttgtttgaggatcagcaacaacaattagaatttaatgttgaaagattgtctggtttccttgagaaagattttcaactttttaccgatgatgaggtcatggatacaatgaagcatgtcatcaatctttccaatgtggttgataggctctgcaaacaaatgtatcagtgcattgagaatgatttgttatatcctctacgcacacctcacaatatcgctccatacaaatctaagggccttgacagggcctcagagctcaatattagctgggatcctgctgaacaaagttcacagtcaacaaaacatagtcaggaggatgaacacaggaaccaaccagcatcgattagtctggggaaacgaactcatgagttgcatggctcgagttctggtaataggggggataatagggggcaccgatctaacaagcgagaccgggtagatgccaatggcggtggtgatgcactttttgatctcaatgtgccagccgaattggtggacaagatctgaagcttcattatctgatgggtgatggcacatccctttgaactgtacagctgacttaagcttcctcaccaacataaaggcaaaaaatactgttcttcttagcccccttgccaccatagagtatacctccatgtcaaaaaaaatttaccctggtgttaggatcccaagatatagagtagcttttaagttctatatgtcgcatttcatgacgtgatttgaagccaatgttcataattctgataaaactagttctactcctcaagcaagatggggatattttggaatgtaacttgaccatgcatgtgttgcggattccagatataatgtatgcagcatggtgaagggaattgtttgttgacaagagtgctggtgtttta

SEQ ID NO: 30282 - DNA, 193 bp, Zea Mays
gcgtaaataacgattatattaacatattacacttcgaacatacaaaatgtcttaacctttattcatcaaagtacagcgaaacaaggacatccatccacaggaagatgaccggggtaacactaaactagcatccatggagttcagcatcatatcttcatctgcaaacttctgatcaaaattaagcaagggtgag

SEQ ID NO: 30283 - DNA, 2367 bp, Zea Mays
aatgccacgcgcggctctctctcacctgtctcattctcacccacgcgcttctctctctcaccagcaggccacgccgccgctgcaccaccgctctccggatcatcggctgtccccctcctcctcctcctcgcccactcaccggccatccctgctgcggtgccgcgcgttcaagcaggaggccgacgacggcgacggcgacccgactgaggccgacgcgcggaagcgcaggaagggcccgatgtacaagctcaaggcggcgatccagggcctcgcgggatctcgctccgccgccgcggaggtgtatgggggagagtaccagttccagcgcgccgtcgagaatttgtgcgagccaaggttccccaatccactcacgcgcgcgcatcgctgtggtttcctgtgttgctttccaccctcgcgcgctcttcttcttcatggagccatggcaggaagcggcaacaggagatttggccgggatatggtgtctagcagcacacatttctcccaatggcagatggtctgggttggagaccacgttcctggcggcagagtcgatctgcaatgtggaggtccaatctggccaccgatgtcagctcgctccggagccaattccgattccctagcagtgacgacgttcagatgcagcttcagatgcagcgacgacctctctctccatccatggatctctaggcaactgggaaccaggcatcaaaatgaagggaaccaggaatcgaaacggccccgagaatcccaaagcacgagaaggggaacaagggaactaggcatcgtgaagagagcccggggtgatgaattgttacggttcatggacggagcaagcaaggagcctctccgcaaggtaaacactaacacgcgattcctcttcaatccccggtcgtttcccgagatctggtgttataacccttgtagcttcgactcctagcttcagttggggggcaataacggattcggaaattttgggctgaaagttgttccttgtgttgttgaggtgctggaggggagtggttaattgtggtgtagcgctatggtgtcaaaaggtggatggagtccgtgacattttctcattgatttattttagagctgcttttttgtgtgccataattaggcttgcccaaccggtgcaggtgacttatttagcatgctgaactgtaggtagtattctagtttgtggccgtcgtgcaagtacatatgtgttggctttcagttcaaccgtctttacagtattcggaaattgcttaaaattcagtgttgatcatagaggcagcacaaatgtttcctattcagagctggtaatggtatggtcattactctgaatcatagtatcagacaatggctggcatagtatttatccaccatgaaaacacaattagcttgcaggtctaaatttggcatcctctacatgaactgaaaccagttaacctcttacgaagtaagaatccttggccttgaacaaatcaaagctaccatgcttgatggaaccaaacatttcctcaccagtaacacatttgttgaaacaatactttcattacactccaggtacagccgtacagtgttcagcttaacctcatgatttcttactactgcaggtctaacatttacattggtaaccttttttttatctttccagcactgtcggtccagtcactattcccttatctatacttcatgggacttgaaagtggcgaaagaggagcaagacattgggttttatgctggttttgttggggctacctatttccttggaagggccatcagcgccatgccatggggcatgttcgctgacaagtatggaaggaagccatgcatcgtgatcagcatcctctcagtgattgtgttcaacacactgtttggacttagcacaacttactggatggcaattgtgactaggggattacttgggttgctatgtggtatacttggacccatcaaggcttatgcttcagaagtctgcaggaaagagcaccaagctctgggaatctctcttgttacatcttcacgagccatagctcttgttattgggcctgctattggaggcttccttgcacaggattccggctctcatcaagtgactcctttccctcacattgactttgcggacagatgtctcaattctagtggtggagctacgaacaacaatccgatgtcctgatcgagagcgatggagctaatgtttgaacttgtgtgtttgaacttgtgaactaaaaatgtgaactatggatgtgaacttgtgtgaatatgtgaacttatttatttagacatatgtgaatttgtgaacttatatatttggacttgtgtgaatttgtgatatgaacatatatcaatgtgtttgaaatctgtattgtatgtgatata

SEQ ID NO: 30284 - DNA, 1836 bp, Zea Mays
gtcgaagtaccccagaggcccagacaaaggcatctccaatctcctcgccccccacggacctgaaccgagaaccgttaccgccgccggagaagcgccgctcgctcaggaggacagccatggcgccggagccggaggatgatattatgaacgagaagaatccccgcccgctcgacgaggatgacatcgcgctcctcaaaacctatggactggggccgtattcgactagcattaagaaggtcgagaaggagatcaaggaaatggccaagaaaatcaacgacctctgtgggataaaggagtctgatacagggctggctccacctagccagtgggatttggtttcagataagcagatgatgcaagaagaacaaccgttacaagtagcaagatgtacaaagattataagccctaatacggatgatgccaaatatgttataaatgtaaaacaaattgcaaagtttgtggttggattgggagataaggtctctccaactgatatcgaggaagggatgagggttggtgttgatcgcaacaagtaccagattcaaatccctctcccaccaaaaattgacccaagtgttaccatgatgactgtggaggaaaagccagatgtgacgtacaatgatgtcggtggctgcaaggagcagattgagaagatgcgtgaagttgttgaacttcctatgcttcacccagaaaagtttgtcaagcttggtattgaccctccgaaaggtgtcctttgctatggcccacctggtactggcaagacacttcttgcaagagctgtagcaaaccggactgatgcttgtttcatccgtgtaattggaagtgagctagttcagaagtatgttggagaaggtgctcggatggtcagggaactgttccagatggcccgctcaaagaaggcatgcattgtattctttgatgaagttgatgcaattggtggtgctcgttttgatgatggggttggtggtgacaatgaggtgcagcgtacaatgttggaaatagtaaaccaacttgatgggtttgatgcaagagggaacatcaaagttctcatggccactaataggtattttttcattctactcgtgattccagatccttttatgtgcttaactcgtactcaaacacaggattttgaatatgtgaacttctgcatgaaacctttataggctccatgccttgagttgatatggcaatttattggccgtatcctaggccctggaagctgaccaccttttcccccctccaggcctgataccttggatcctgcacttctgcgccctggtcgcttggacagaaaggtggaattcgggctacctgacttggagggccgtacccaaattttcaagatccatacacgtaccatgaactgtgagcgagatattcgtttcgagcttctggagctgatataaggagcgtttgcacagaagccgggatgtacgccattcgcgcccgcaggaaaacggtgacagaaaaggattttctcgatgctgtcaacaaggtcatcaagggctaccagaagttcagtgcaacacccaagtatatggtgtacaactagtcggcgtgtcttcatgggatctgttgtttctagaaactctggatctttttcatggttgtatcatcatgagattctctatgcaaaggttgttgtttgtttagcaaattggatgccgagtgatttgtgacctgtaccgcatgtttttaagataacaaggttcttcgctcggtggttcactgctgcttgtgtctatgactgatgatgtgcacagggcgcaaagttcattcggaaaactgacgcaatgtaaacatcaggtaacgcaggttgttgtttctctgacg

SEQ ID NO: 30285 - DNA, 1553 bp, Zea Mays
aaagccgctcggttcgctcacctgcctgtgttgcctagttgccttgcgacttgcgagtgggcggcggagtgcccgagtcggtgcggccgtgcaggagcgtttgctgtctccgtttccgtcccgttccctttcgtggactgttttggaaggcgttgcgatgagacgctgctgcggcggcggcgaggagtgcatccctcggcgatgagcagaatcaccacgggatcttaatctcccttgcctcgtttgcggagagcctgcgctgtcggcggcggcgcacccccctccccttcccccggtgcttccgtctgctggctggactcagttcttccaactcggcccttaacaagagaacgacgaccatgccgatgcgtggcgtcgatttcaagtggtatgatgggttcttcctctccatgctcgccactagcgtaattatcgtttccattaattggaagaggtatcgcctgtgtgcccacccgctccacatttggatagtggtggactacaccactgtcttcatcttccgcctcctaatgtttgttgataatggtctcgctgcaggaatgggattttgccagaggaaggacaaaagtggggcttcttgatatggctgcttttcagttactgtgggctcgcctgtattgcttgtgtagctattgggaagtggttacaccgaagacacgcacttcaacagagagcacaacaaggaattccagtctctgaacatggggttttagttgatatgatccgtgttcctgactgggcatttgaggctgttggcctggaaatgagagtgggtcaagatactgcatatcatcctggtctttatttaactgatgctcagagagaagcagttgaggcactgattcaagagcttccaaaattcaggctgaaagctgttccaacggactgcagtgaatgccccatctgccttgaagaatttcatgttggcaatgaggtccgtgggctcccatgcgcgcacaatttccatgtggagtgcatcgaccagtggcttcggctgaatgtcaagtgcccacggtgccggtgctccgtcttccccaacctggacctgagtgcgttgaacaatcttcggtcgaccagcgagccggaccatccatccgccagcgccagcaatgtaacgacggcaactgcagcgacgagatacgtgaggtcgcagccggcaggtcaaagctatttggtgcggttgcaggggctgctgctccgccctgtccggcacgatagcgtggagagtgacggtgagccggcggtgggcaacagtcgcttggttggcaccgaagagctgcctagcatacttgtagacgatggccatcagctgccagatcgctgactgatttgatgacctgatggatccagcatacttgtcagcataatttaggatacttgtcagcttttcttttacagttttcttttgcaaatgaaatgcgagttttgttgaaagaattttttttaactgaacactgaaataagcaaataaaattatttagctcaaaggaaataaaattacattacttaaagaaatcacacaatacatacaa

SEQ ID NO: 30286 - DNA, 732 bp, Zea Mays
gttctgcgtacgccattattatccacaacactcatcgatctacacacatacatagtttcttctactacacgacgacaaacatggggaagcctgcgaagatcggagagtggggtggatacgccggcgatcgtcgggatctgagggctactccggaccggctgatcgaggtgaaggtcacggcggacaacagcagctgcatccgctccatctccttcatctacatcggagccgatggcaaaccgtacgaggaggggccatggggtttcggccatgctggcacggagtacaagagatggcaacggattgatctgtgcaggttcgacgagagcttgacggagatctccgggaccacgggcccagcctacaacattgacaatctggtcaagtctctcaaattcgtcaccaacaaacgcgcttacggaccgtacggcagggacgagggcaccccgttccgtgtcaaggtgatgaacaacggccacgtcgctggcttctttggccgctctggagattgcctggacgcgatcgggctctacgtgaaccccaactaataactaaaacgatggatcggatcatctgcatgcatgcatatgcagtatgcatgctgcttgcctgcctgtaacgaatatgaatgcataaaataacgcccctgctgctcccatgcatcagcagtgtgtaccactatgttatatatatatatattgtatttcgctaccgaataaaaacataaataaa

SEQ ID NO: 30287 - DNA, 1832 bp, Zea Mays
ccgccagcgacatgacttgcgccacccggagccccggcttcctccgcgaggccgagctccgcctcctccgctgcactctcccctcgctgccctcttccccgcccccacccgcttcccctccccctgcgcatccgctcggtcccgccgcggcctctgcgatcgctgccgttgaggccggcgactacgaggctgcgctcgccaccgccgcgccgcacttctttccggcattcgccccctctaggcctcctggctcagccgcgcagttctacgccgacctaggtgccgcagctcgggcgttcctgctggtcgatggggacggggcagcggcgggagaggggttcgattgcaggtgcgcagttgtgctttccgctgcagtggccgcgctgctcgcgttcacgcaacagaacgtgactgggcctccaaggaagtttcccacttttcctttttcaatgtcatcttttgatgaaagatgctatagtaatcttggagacacatgggatgcatgggcttctgacaatttagcttcttttggctctcatgttcatgggaaattttcactcttgcagttcattgtatttgcaaggcttttgtttaccagcgtacagagtctggatctctctgattgctggagcgtgtcatggtggttgtttagaatatcaatgttgcagcagaacatcttggatgagttatcatcgtctctgtttgatcaagtgcaagtgtacaagaataagatgttggatcattttggtgaactggaaaaggtttctacctactgggattgtttactgtctgatggagaaggttcttattttgtttcagctgctttcttagaggctggaatcgtggaatacaaatatggtcgggttgatgcttcaaggttgcatctcaatagcgcacaagaagcatgtggtctgcacctttcccttacagggatccttggtttccgaacaatataccaggtggatgcgaagtctcaaatggtgcttgttgcgaagaccaataagtcaggccctgatgaaggacaagtgacagaacccacagtagctcagaatgacaatgcagctttgaaaaatgcaaggagcttcgttcctgttgaagacgatgaattctgtgacatactaagaatgcccagactggtgcaagatgggagtaattctgccagtgaagacgccacgaaccccagtgcaaaaatatcactatcggctatacagcaggctgctgtacttgcacaatgcttgtatgtgagccggaggagtcgtgttgatgaaatgtctgggtgggagatggcaccatacatagagtcgattgattctcaggatgaatcttactttgtggtcaggagtttgtgcgatatactgcgtgttagatgggagtcaacccgcagtcggacaaagcagcgggcattactaatgatggagaatttggttgaagatatcagcaaagaattccctgctgccccacaaagagttaaaatggtttttgcggttcatatgccaactcttcctgcattgaggaaagaatatggtgaacttttgatcagttgtggcatagttggagaagcactggagatatttaaagatcttgaattgtgggacaatttaatatattgctatcgattgttaggtaaagtggctgatgcagttagtctaataaatgctcgactttctgttacaccaaatgacccaaggttatggcatagtgtatatctaagtgcacaatgaaagctatgtatctaaaaaaaccaaaacgtcttataatttggaatggagggggtactttatctatccaaaagtttaagggggtgtttgaatgcactagagctaatagttagt

SEQ ID NO: 30288 - DNA, 3522 bp, Zea Mays
gtctagaagctgttgcaaacatgccgttgcatatattacagcaggcagaggaaacctgagcgcaatggcagtgtatttacacctatagctgcaatgtattccagtggtcatgcactccctgttgcaaataggagccacggtttggtatttggcagtctgagcaaggactgggacgacattcgccagcgcaaggatcagttggtcaacttccttgctagtcttgaacgagcctctggagattctgcggcagctggcaaaatcgaagatagcaaattggccagtcctgtggagccaactgaacaaaaagagaaggctgccataatcgttcttgattcagacgatgaggacggaaatggttcaggaaacagtaagttggcatctgagactaacaaagaactcggaacatctggattgattaataatatcgcagaaaggatgacgtttaatgggagccaagcatttggaaccgtgcatacttatggagataagaacacacagattgttccgtatggtcaatgttctgctttagtgaatcagtttcctttgcaaaccagttggcaaccatctattcagtttgagagagtcgtgctgcagaaaaggcctgaggagcagcgaatgcaagatcttgtggctgctagcatagccgagaagagagcagaaacacaagtgttcctttcacttcccacagagaaaaagcgaaggagatcagaccccagtctgcatgccagtgacgatactgctactgtccctaaacaaagaaaaagtaaaggtgccacagttgtagcagcagctaatttgtcattggtttcacaacaaactgctacatcaccagaacctgacatggttatagaggaagaggagaaacataaaaatgaaagtgatggtcttgacgattattggaaagattttgcattggctgttgaaagcacaaagcttgacgaagttgatgaggcggcaattgaaaaggaagataatggaaagatggaggacatcgattgcaatcatgacatccggattcatgaagatttgggtcatgtatgccgtgtgtgtggcttcaaggagaagaacgaatggctatggaggacattcaaaagatgctgatgagatagattgtggtactgttaaactgtctgaagatttcatagtcgcagatattgctattcatcctagacatgctcggataatgaaaccacatcagttggaaggtttcaactttttggttaagaatttgattggagacaagcctggaggttgcattctagctcatgccccaggtacagggaaaacatttatgcttataagcttcattcagagcttcatggcaaggtatccatctgcaaggcctcttgttgtgctgcccaaagggattctaggtatatggaagacagaaattaaacgatggcaagtgcaggatataccagtgtacgatttttactctgtcaaggctgaaaaaagagtagaacagttgcaaatcctcaaatcttgggaagacaagatgagtatactatttcttggatacaagcagttctccacaatcgtcactgatgatgggggcagcaatgtcacagctgcatgtcgagacaggctgcttaaggttcccaaccttctgatacttgacgaaggacatacacctagaaatcgggagactaatgtactcgaatcactaaatagagtggaaacaccacgcaaagtggttctttcgggtacacttttccagaatcatgttgaagaagtgtttaatatcttgaatctcgttcgcccaaagtttctcaggatggaatcatcccgtcctactgccagacgtataatgagtcaagttgaaatagttggtagaagttcgaaagggcttgctgatggcgcattcactaaggcagttgaagaaaccttattgaatgatgagaacttcaagagaaaagctcatgttattagaggtcttagagaactaacaaaggatgttcttcactattataagggtgatatcttagatgaactacctggcttagtagacttcagtgtgtttttgaagctcacacccaaacagaaagacattatttataagttggaagcacatgatcggttcaaaagaaatgcagtagggagtgcactgtacattcatccatgtctttcagaactttcagaggttaatgctgagcatagggctaacacctttagagatgatttagttgatagtctggtagattctatcactgtgagagatggcgtgaaggccaattttttcatgaatatcctgtcacttgctaattctgcaggagagaaagtgctagctttcagtcaatatatatctcccatgattttctttgaaaggctgctggtgaagaagaaaggctggcatgtggggaaagagatctttatgatctctggtgatactagccaagaagacagagaattggcaacggaccattttaacaactctgctgacgcaaaaattatgtttggttctatcaaggcatgtggggagggtatctccctcgttggtgcgtcgagagttgtcattctggacgtacacctgaacccatctgtcacccgtcaagcgattgggcgtgcattcaggcccggacagcagaagaaggtgtttgtgtacaggcttgtagctgccgattctgacgaggtaaaggtccatgagacagcattcaagaaagaagtcataccgaagctgtggttcgaatggagcgagcactgtactacggaagacttcaaacttggtcaaattgatattgatgactctggtgacgaactgttggatactaaagcaatccgcaaggatatcaaagcgctgtatagaaggtgagcttccctccttcccttacaattgttttgcatgctagttgcctcatctagtgcctttgtaggtaggtaacaagctttgtggccactggacaccatgtacatattgcagtgctgaccgtcgagctgatccttaaactgaagaaagaggtgacggtgggtggctctacgatcatgaaaacgatgtttcctgttccatttcattgtatggcagcagtgttttcttttaacagatatagttttcgctgcagggtgttgcggtggctacattgcgcggtcattcccagctatatccgtggaatggcggcttcttttgttcgtagtatgtgccaacttggggcagcagtcagctgatccccagacacatttctagactcttttttaggctcaagtttctgagaattaacctgctatggcgtttagccttaagtaaatatttcgttcgcaacaataataacccagtaaacctaatttgttcttgtgcgtttgtggtggtggttcttgaaatttacctggcgccttcttcctgggctagatgctatgcaggtgtcacaggttggtttgttggcatgtagaatcgggaaatgctaatctcgaaagctcgtagtttccttttcccccccgggtgacatgtttattcacctcttactagttaccacgtccatttccaactataagatatgatactttggcttttgaagatacattacttttatt

SEQ ID NO: 30289 - DNA, 2543 bp, Zea Mays
attggtaatacaacaaagctgatttcaagatttttcttgaaatgattgacggcatgaatgaactcagctaagatcctgcaaactacaatgtagctcaacagacgtgatcccacaaaagggagaatattcatccatcatcatctatgataacagtgacagttcataagggtatagaggacaacataactggctcaaatctgggcgacagtgacatggggtgagagaaaatgcacagcgccagtttcataatgcaaataatgcagcctaaaataccagatagaaccatcgttatttaggagacagatcatgaggggtacttcagtgagggcaggacaacataagcatattcttagaagatcaacaattgatcgttgagagtcgagcaaagcacatagtcttaacaagaaacagatttgccatactaacaagaaacagttttgccatacttctataacccatacatttgagctactaagctaacaaaacctgaagaaaaacctgaggggccaagttctgcagtataattgattggtggccatctcaagtgaagcctacatcatataaaccttggtcctcaacttcttgacatgtcatctgatttctcccccttgatcttcttaccgacgatcaccctttatgctcttcttcctcttctttccctcctcggtagcacgcttgcccttcactctacccttcttgccaacctcctggctatcatcaaccatgatgctcttcgtcttcttctttttctctgtatccacctgaacttcttcctgcatcacaacaccctcctcaatctgctccttcttattcctcttcctcttggaactcacattggcaaatacctctcttccatcggcaccagcattcgccttcttttcgatgacctccccagatccaacaatgtcaggctcaggcacctcgattttcatacccaactccggcacaacctggtaaattggtagggcaactgaatccacagccttcagatgcagcgccctgacattgccccacttctttggcaccttctcgacagcctcctccaccgcggccatcacattgtccacgatatcctcctcctccatgtccagcctacccaccttaatccccgagcaggtccctgaccgcaggtacagaaaagcagagccaagaaccctgcggacctgctccggccatccgatgcgggtgaaatcgactccaatcggagccttcttggtggagtagaacgccttcccgaggacgcgcggcagcagggggaggatggcgcggtcggcgacgaagaggtcgtgggaggctgcgagacggcgccgagactcgtacgggcggtaatccgtgcggagcgtagagagcgggatgacctcggagacggggaaacggtggagcgacatggacgcgtggaggtcggaggcggaaggggaccgcgacttggtgcggtcgtccgagatgacgcagacggaggcgccgtcgtgcccaacaacgggatgtggcatcgggaggaggcgcggcttggtgctgcgcgaggcggggatgcggcgtagcgagagctggaggaccacgatgtcgtcgcgctcgtcggcgaggaggttcgggcgcgcctccgcagcgcgcttcttcatccacgttgtcagggaagcgacagcgctggccaccgtctctcggggcaccgggtgtggtggctgcggcggcgacatggtggcggcggcgcgagagggagatcagaggggtttagggtttggttgatgtggggtgggaaggttgtgtttttatagacttcacagcatttgtccctatggcaagtgggtccaggctccgtcatttgcccatatgtctctctatggtaggtgggtccagactgcggagaggacgctccgcaactagcaaaggcggggtgctgtagcgccggcggcccttcgccgactcgcccaggtgcgcgcgggacaggcaacaacgaccagcaggagtccggcggtgtggggcagcagaagctcatcggtgcggagcattgttcacacaaactgactttattcctgcaggactttattcttgattgttcctgatcgaaacccgaactttttggcaaatgagtgccggtggtgcttttggcggaaataggggggtgaggcctgtacctcctgaaaaaggtgtgttcccattggatcacttacatgagtgcgacttggagaagaaagattatcttggctgcctgaaatctacaggattccagtctgaaaaatgtcggcagttctcaaagaagtatttggagtgtcggatggagagaaacttgatggccaagcaagacatgtcagagcttgggttcagaattgtggatgaagcgggtacatctcctgacaagaacagcaaaccggagagccctcctaatcagccaaaggattaaaaaaatagctgtttggctttgatgtagcttttgtatgtttcttcatcccaaagatctgtcaagatctcaaacaaataagggtataatgaaaggacgatgttagtttacatagtaaccaaatttgaaacttatctgttggctgttttga

SEQ ID NO: 30290 - DNA, 922 bp, Zea Mays
ttctgttcaaagacttattatacttgttgcatgtttgtagggctgattgatcttgctatcaagaacaactgcctgatcggtggtgacgacttcaagagtgggaagaccaagatgaaatcggtcctggttgatttccttgttggtgctggaataaagtatgtgctgtacgtgggagacagtaagagggctatggacgagtacacatcagagatcttcatgggcagcaagaacaccatcgtgctacacaacacctatgaggactcgctcctcaccacaccgatcatccttgatctggtgctcctggctgagctcagcaccaggatccagctaaaacctgagggaacggacaagttccactccttccacccggtggccaccatccttagctacctcaccaaggcaccactggttccgcccggcacactggtggtgaacgctctggcaaagcagagggcggtgctggagaacatcatgagggcctgcgttggcctggccctagagaacaacatgatcctagagtacaagtgagcgaagtggcgtggcctgcagctggatatgcaggaggctgcatggagggaactagagaggcgagaatagctgtgggattatgttggcttctcgtgttttcttttgtgttctttcctggtcatcgttgtcgcgctattgtattttatttgttggactctcgtgccaacaatgtcatcaaacgtgtatggtggtgcgtgcctgagactgacaatgtacgagggaacttctaccgacaggtgtggcacgtactctgcaatgacgagacaatgcaaattgtggcatatatcgaagtctacatgataatgatggttgaaatgtagtagtgaaacaactacataaaaataacaaaaattatgtatagccaggatcacaaatgtattatgaagcattttct

SEQ ID NO: 30291 - DNA, 2213 bp, Zea Mays
gcccaaaattacggcccctctctttctctctctgactacctccgtatgaggcagcttgtgctcgttcgagactgagacaccccaacacgcctccctcagcgcagatctcgccgccgccgagatgctccgccgcggcgtgcttcttctcgcggccatcctcatcgccgtcgcacactcgcccctcgcgtacgcctcggaggccgagcacaagtataaaacagaagaacctgttaagctatgggtaaacaaggttgggccttacaataaccctcaagaaacttacaactattacagtctcccgttttgtcaaccatctgaaaaccctgcacataaatggggtggtctcggagaggtccttggtggaaatgagctgattgatagtcagatcgatataaagttcataaaaaatgtggacaagggggccatttgcacaattgaacttgatgttcaaaaggttcagcaatttgctaatgccattgaaaactcatattggtttgagcttttcatagatgatctgccattgtggggttttgttggggagactgacaaaaacaatgagaaaaagcactacctttacactcacaagaacattgttgttaaatacaatggtaacaggataattcatgtgaatctaacacaagagtcacctaagcttcttgaagctggcaaaaagttggatatgacttattcagtgaagtgggtgcaaacaaatgtggcatttgcacggcgctttgaggtttacttagactacccgttctttgaacaccagtgtcaatgatattgatgaggacactaagaaatgattatgcaaaatatgctcgtgaagatgatgatctggaatcacttgagcgagatgttaatgaagaatccgggtggaagcttgtccatggtgatgtgttccggcctcctcgtggccaggtgtttctttctgccctagttggtattggcactcagctggcggctcttatcctgcttgtgattgtgttggccattgttgtcatgttatatgttgggcgaggagctatcatcacaaccttcattgtgtgctacgctcttacatctttcatctctggatatgttagtggtggtctctattcaaggaatggtggaaaaaactggataaaggctatgatccttacagcatcactttttccattcttgtgtttctcgattggattgttgttaaacactattgctatcttctaccgatcattagcagctataccatttggcacaatggttgtcatgtttattctttgggctttcatctccttcccgttggttctattggggactgtagttggtagaaattggagtggtgctcccaacaacccgtgtcgtgtgaaaacgatcccgcgcccaattcctgaaaagaagtggtaccttacaccttctgttatttcactgatgggtggacttctccccttcggcagcatcttcattgagatgtacttcgtattcacttccttctggaactacaaggtgtactacgtctatggtttcatgttgctggtgtttgtcatcctcataatagtcaccatatgtgtcactattgtgggtacttatttcttgttgaatgctgagaactatcattggcaatggacatcattcttctctgctgcttctaccgccttgtatgtgtatctatactctatatactattatcatgtgaagacaaagatgtcaggatttttccagacaagcttctactttggttacaccttgatgttctgtcttggattgggaatactttgcggtgctgttggatatttgggctccaccctatttgtgaggaggatctacagaaatatcaaatgcgactaaacttggtctaggctgctagcatgtcttgtcacaatatggtgcagagtaataccttgagcttctgattgacttcggaaattacacaggaggttgctctccctttcgttactcttttcatcttttttggcctatcttcctggacgtgtggaactgcccatgataaatgtatacctagttggagaattagtcagagtactggaaagtacatgtaggtttttttggtgcggcctctctcggtcaattgtaggagtacattgatgaatattactgcagtgcagattccagtgggctagattcgcccctcttatgactgtttctaactacgtaccctctccgtcccaaattagaattcgttttagggaattaatgaattcatacaatagttgatc

SEQ ID NO: 30292 - DNA, 2024 bp, Zea Mays
cctgagtccaccccccgtccctttccctctcctacctccacctccacgacaacaagcaaatccccatccagttccaaaccctaactcaaatgctcgctttgactgcctcagcctcatccgcttcgtcccatccttatcgccacgcctccgcgcacactcgtcgcccccgcctacgtgcggtcctcgcgatggcgggctccgacgacccccgtgcagcgcccgccagatcggtcgccgtcgtcggcgccggggtcagcgggctcgcggcggcgtacaggctcagacagagcggcgtgaacgtaacggtgttcgaagcggccgacagggcgggaggaaagatacggaccaattccgagggcgggtttgtctgggatgaaggagctaacaccatgacagaaggtgaatgggaggccagtagactgattgatgatcttggtctacaagacaaacagcagtatcctaactcccaacacaagcgttacattgtcaaagatggagcaccagcactgattccttcggatcccatttcgctaatgaaaagcagtgttctttcgacaaaatcaaagtgttgggagcttctgtgaacgccactttggaagagaagttgttgactattttgttgatccatttgtagctggaacaagtgcaggagatccagagtcactatctattcgtcatgcattcccagcattgtggaatttggaaagaaagtatggttcagttattgttggtgccatcttgtctaagctagcagctaaaggtgatccagtaaagacaagacatgattcatcagggaaaagaaggaatagacgagtgtcgttttcatttcatggtggaatgcagtcactaataaatgcacttcacaatgaagttggagatgataatgtgaagcttggtacagaagtgttgtcattggcatgtacatttgatggagttcctgcactaggcaggtggtcaatttctgttgattcgaaggatagcggtgacaaggaccttgctagtaaccaaacctttgatgctgttataatgacagctccattgtcaaatgtccggaggatgaagttcacaaaaggtggagctccggttgttcttgactttcttcctaagatggattatctaccactatctctcatggtgactgcttttaagaaggatgatgtcaagaaacctctggaaggatttggggtcttaataccttacaaggaacagcaaaaacatggtctgaaaacccttgggactctcttttcctcaatgatgttcccagatcgagctcctgatgaccaatatttatatacaacatttgttgggggtagccacaatagagatcttgctggagctccaacgtctattctgaaacaacttgtgacctctgaccttaaaaaactcttgggcgtagaggggcaaccaacttttgtcaagcatgtatactggggaaatgcttttcctttgtatggccatgattatagttctgtattggaagctatagaaaagatggagaaaaaccttccagggttcttctacgcaggaaataacaaggatgggcttgctgttggaagtgttatagcttcaggaagcaaggctgctgaccttgcaatctcatatcttgaatctcacaccaagcataataattcacattgaaagcgtctgacctatcctctagcagttgtcgacaaatttgtccagttcatgtacagtagaaaccgatgcgttgcagtctcagaacatcttcacttcagatattaacccttcgttgaacatccaccagaaaggtagtcacatgtgtaagtcggaaaatgaggttaaaaactattatggtggccgaaatgctcttttttgttttcctcacaagtggcctacgacacttgatgttggaaatacatttaaatttgttgaattgtttgagaacacatgcgtgacgtgtaatatttgcctattgtgattttagcagtagattctttgccagattatgctttacgcctttacagtgacctaggagtcaagggccccacatattatatttattt

SEQ ID NO: 30293 - DNA, 3282 bp, Zea Mays
cgcaaatcccagagaaacatctaaaccctagcggcggaaccttccccgtcgctctgtcctcctgtccggacatggcgaagacgaagcccatggcggcggcgggcgagaagaagaagagcaaaggaaagaagaaaggcaagaatggcccggccaaggtggccatgaaggctcgtggcgcggcggcggaggagcggaacaacccgttcgaggccatctggtcgcgccgcaagttcgacgtgctcggcaagaagcgcaagggcgaggagcggcgcgtatcgcgctcacgttccgaggccatccgcaagagggagaacacgctgctcaaggagttcgttgagagcgccaagtcgtccgtgttccacgaccggcgtatcggcgagagggacgacacactgcccgagttcgacaaggccatccttcgccagcaacgcgagcgcttggccaagttgaaacgagaaagcaagtacaatctatcagatgatgatgaagacgaaatcaatattcataatgtgctgctatcggaaaatgatgattttgatgaggaagtgcctctcgatgatgggagcgacgaggaaggtaaaatggtcctctcaaagaagcgtttatctctccaaagtgatgaccatccttcaataactgatctaccacaagaaacacaccaggggcagaagagcaagaaggaagttatgacggagatcatttcaaagagtaaattttataaggcccaaagagccaaggagagggaagaggatgaacatcttgtcgacaagttagacagtgattttgcatcattggcccagacacgggcgttattgtccttaactgagtcagctaaggtcaaggtgaacaaaactgattcaagcactggcttgactgggaaggagttttctaacaaggcaaaggcagatacatatgaaaaactagtgaaagaaatggtgatggatcaacgtgctcggccttctgatagaactaaaactccagaggaaatagcacaagaagagaaagaacgtcttgagaagctggaggaggagcgccaaaaaagaatgcttggaactgctgatacgtctgatgaggacgatggcaacgaaaatgataaccacatgaagctaggaaactcaaaacctatatctggtgatgatcttggtgattccttctctttggatgagtcaacagtaaagaaaaagggctgggttgatgaaatttacgaaagggaaggtagaaagattggtgatgatgcagcagcatccgatgatggagaaagcgatgatgaaaatgctggtgatgatgaggctgatgatgaagattcggactccagtgacaatgactttggtaatatgtctgctagagattgggagcaaagtgatgatgatgaagttgatgtaggagacgatgaaatggaggatttcaaagagaaggggcaagagatcaatgacaaagtggtgaataaagatgcacacaatttgaaaggagaatctaatgtgaaacctcaagtaaaggatggcagtattccttttgttattgatgcaccaaatgacctgaaagatctatcttctttgttagatggtcgttcagaagccgaaataattgagattattagtcgaatacgtgcttgcaattcaataaggcttgcagctgaaaaccgaaggaaaatgcaagttttctatggtgttcttctgcagtactttgcagttttagctacccaaagtccagtgaagttcagaataattgacatacttgttaagcctttaattgagatgagtggagaaactccatattttgctgccatctgtgcaagagagcgacttattcatacacgtacccgtctatgcgaagacattaaggttccagggaagagcagctggccaaatttgaagacattacttctgctgagattatggtctcttatttttccctgctccgacttccgccatgttgttacaactccattgcttctacttatgtgcgaatatctgatgcggtgccctatacaatctggtcgagatgttgctgttggttctttcttgagttcaatggtgcttgtggttactaaagaatctaaaaagttctgccctgaagcaattggtttcctgcaatctcttttggtaacatcacttaaaggaaaagtggaaactcatctgcacaatcagattaacgatcaatttatggagctcaagactttaaaactgtggctcagtatccatgaccatgtgcatgaggtgaatccagtgaatatcctagaaatagttggcatggatcctgacgccccttatttctcatctgataactttaaggctggtgtacttttatctgtggcagaatgtttaagaggttttgttattatacatgaagggctatcttctttcccggaaatcttccttccaatatcctctttgctgcaagaaattttggatagatctgagttgcctggatcgttacaagacattttccatgaagtcattgacttgatcaaaaagagaagtgatgaacactatgcttcaagggagcccctccgaatgcggaagaagaagcccgaaccaattaagcaattgaatccaaaatttgaagagaactacatcaagggtcttgattatgatcctgatcgagaaagggcacaaatgaagaagctgcggaagcgtgtcaagagtgagatgaagggggcgaagcgtgagctgcaaaaggataattatttcctgtctgctgtgaaggagaaagagaggaggaagcgagatgaagagagagctgagatgtatggaaaagccatggcgttccttcaagaacaggaaagtgctttcaaatctggacagctggggaaaggaaagggtaggaaaaggatgcggtgatactctattgcaggggggcagctcggccagtgtaaatatacgggattgtgtttgctcaccctcttcccgcggtactggagggtggatccagctgattactgtatcgtgagctgctcagagtttgtcgtgcctacaagagcagggtgggcctagtcttatggaacatctccacctgcttactcctaaagctttgcctataaaattgtaacgccacaaacactttacaaggcttctccttggtgaactaccacacctgggaaatgctttatttcttttgtaccgtggagtggcttgcatctatgttatatactggtgccatagtaattttcagaagcacagtgaagagtttttattattttcatttttgttgtactctgacatgtgagccctataagtatggcaattttggcacggttttgcagtagaaaaataaatactatta

SEQ ID NO: 30294 - DNA, 4795 bp, Zea Mays
  misc_feature (4794)..(4795): n is a, c, g, or t
aagacgagctgctggggcgcacacacacatcaccgccgcggcgcgccagccatatccagcccagaaaactcgccagaaacaaatccgtttccctttttctgtgttcctaccccgcccaccaagaaccctgcgcgtgcgaacaagccgacgattcatcaatcgccgtcgccacctcccgctgcccctcggcctccgatcccgagacccgttgccgccgctgagctgccgcatttgctttgggggtggagggtctgagatggcgccgtagcggtgggacggggagcagcagcagctggatctcttctgggttgcagctgccgccgccgccgccgccgccgccctccctgcaagcaacccttcgcgctctcgccttgctcgtgctcgtggtaatttgactgctgttagattgtgatttcttcttgctgctttcgcccttcactgttgctggaattacagaagatcaggctctttctttgtcagaagttaggaacattgcttctctttggcttctggtaatatggcagcgacgtcgccaaacaacataaggcgcaagtactcgtggtggtgggacagtcatatctgcccaaaaaactcgaaatggttgcaagaaaatctttcagatatggatagtaaaattaagctgatgatcaagatcattgaagaagatgctgaatcatttgcaaaaagagctgaaatgtactaccgacggcggcctgagctgatgaccttacttgaggagctgtaccgtgcataccgagctttagcagaaagatatgaccatgcggcaggagaactccgtcaagcacatcgaaaaatagcagaagcatttcctgatcaggttctaatggacttggatgatgaccttccagcagaaactgcttccattgaaactgacatggacaatccagacatggctccatatttcctctctttcatcaacgctagtgatttgaaaaggaatgctaaagatgaccaagattttgagagactgcagaaagaactagcaagcttgtcacaggaaaaccaagacctcaaggacaggatctcgtccatgttagagcaaggcaacaaggctgagtgcgagatccttcgcctcaaggagtcccttgctcaacaagaagcagaaaaggagtctgcagtttcactatgccagcaatcaactgctagactacaaaacctgaagtctgaaattatgcatacccaggagaaattcaacaggctgaaagaagagatgcaaactgaactacaacctttgaggaaaggagatgaacatttatttttacttgaaagagctaatcaggacttgcacttggagctagataacctgaaacttctgttgaaacagaagcatggcgaagtaaatgaaaagcaagatgagttggaaaagcttcatatctctacagaagaagagcatctcaagcgtatgcaagcagaaatggcacagctttctttggaaaaacagttatcactggcacaagacaaactgaggcatttgactcttgagaagcaggttgaagcacacaagataaaggaggtcgaaacgagcaaagttgtgattcagaaagaactggagaagattcttgaagagaaccaaaggttgaatgaccaaagtcactcttcttcagcagtgataattcgtctgcaggatgagataatttccatgaaaaatgtgcaacgaagattagaggaagagatttttcagcatgtggaggaaaagaagacacttcaacatgagctttcttatcttaaagaggataggagtgacttggagaggaaacactctacaatcaaggaacagataggatctatgaacttgaatttggaatctctacaagcactagcacaagagctgagggatggcaatgttgagctgaaagagattgtcaagaaccatgagagcattgaacttgtgcatatcgataacctaagaaagttggagaggatgtcagagacaaatgcacatttagagaagtctttgtcagctgcaacaactgagcttgagggactgagggagagcaaggtggcattagaagaatcatgcatgcacttcagatccacgattaacactcatcagtctgagcgagctgtgcttgtagcgcagattgaggtaatttctcagaccatggaggagctactggagaagaatgttttcttggagaattccttatctgacgctaatgctgaacttgagagtttaagaatgaagttcaaagaactaaaagaatcttcagaagcactccaaaatcagaattctgtacttcaatctgataagagaactcttgtccaccagctctcagaaaaaacggtccatctcagtaattacactgttattttaggttgagggcatcactgtaactctgctgaatttggaaaggcaatacaaagaactcggaaggcggcactcagatctgcagaaggagaaggacttggtgcttgatgaagtgatcaagatacaggaacagataaggcttgagaggaaggagcatgaagattgtacacagtcaagcaacattagatttgatgctctacagaagaagattagtctattgctagaagagggcaggagtagagaggtgcagcttggtgaggaggagctcaagattgtcaaagctgagatagagatatttgtcttgcagcagtgtttgaatgacatgacagaagtaaattctgaaatcgcagaacaactgcgaaagaataaagaaatatgcaaggtccaggagggaaaaatctacagcttatcacagcataatcagaaactaactgaagggattgattcagtagtgagagtattgcatctggatcataagtatgaatccttaggccaaatgaagcttgaaatcattgtgcagctcatcttaaatgagatcagctgcctgctgaataacatatctgatgcccaggatgtgaagcagaaggagcttgttgagaaatcacttgtagttacacttctggagcatttcgggcaagaggtggctgacttgaggtcagagcggaatgtcttgaggcaagatcagcagataaagattgaggaactgctccagctgcagagagaaaaggaggaacttatgaagataagtgatgaattcttggaagaggtggaggctcgtaatcacaaagtggatgagctaaaggctgaggcgaagttcttggttgtaaggttctccgaactgcaagagtctaggaggtcattgcaaagcgagatcaccaagctattacaatcgaactcttttctatcaaatgaactaaatgattccattgaaaaacagaagaggtttgaacatgatttcagcaatcttgttagtgaagcagttagtaaagatatcctcagtgtgatctttagaagccttcatgaagagaggacattgcagctgaagtctttgcataataactttggctgtcttcaaacagcaggcggtgagctttatcaggagatcaagatgatgaacaagaggcttggagacatagaaatggagaacaagtaccttggcaaagaactaagtagaactatgagtgtttatggtggatctattgtgcaaacagcaacaggaaaaggaaatccagggcgaagagatgccaaccttctgaattcaaacaggaaaatccaacaagattgtcatgtaaatctggaggtggaacaagaggaagtttgcaatgctgattttcaggagtcaaatgaaacactacaggatgaggtccgtaagttaaggagcgaagtggaaatgcttaggagcaaggagaaggctgtgttcaacatcaaatcctgtgatgaagagatcatgaaattgctggctaacatgcaaatggctatcatgaatgcagctctgttcaaagagaaggttcttgagctcatcataacatgcgagagttttgagataagtgccatggtacagaaggaggttctgaaggaagaaatcatacaaagaaattcatatgtagatgagctgaaggacaaactaaatgctgttgagattgaaaacagaagactgaaggtcgacctaaatggtgatttcacaatgttagggtcattgcagactgaagtcagtgccctggaggagcaaaccttatctctcgctaacgaccacttgcatacaaataagctcaggatggaggaaaatgcattatctccacaccttgtgaagaccacaacaagatccagtggcgaagaaaatgcattgaggatggtgaaggggatggagctgcaaaaattgcatggaacaatcaaagcccttcagaaggtggtcacagatactggtgtcctccttgaacaagagaggcttgatttcaatgccaatttaaaagaagcaaagaagcagatcgaggtgctaaagctcaaggagatcttggatgatgatataattgaaatgaactacgagcaaatgttaaaagacatacagcttgacctcattcaaacttcttcaggccagaaaaccagtccgtttggtcaggaaaagaaaaatgtagcacaagtagatgacaagatggtaaactcacgcggttctattgggccgagccatggacatgtggctgacgacctaagaccgccgcaaagtgagtcatttgggagagagaacaatttaatggtcgtgaaagagctcagcattgacaagcaagagttaccgaggtcgcttgctatggagccacacgaggagtggagaaacaaggtcgtagaaaggttggcttctgatgcccagcgactcagtgccctccagtccagcatccaagaacttaaaacgaacgccgaaacatccgaagaggtagagctcgggagtgtcaggtaccaaataacagaagctnn

SEQ ID NO: 30295 - DNA, 2640 bp, Zea Mays
ggaacatgtttgatattcttttttttaactccttattacccgatatactgcgcttatatcgttaaacgacaaatataatttcagccaatatgtggcgctttatgctatctgtaaccttgatgatgaggcacacaagctgctaaaaatgctgttggtggtgtaaatcttttctccatcgcaaatcccccactccccctccgatcccccctgcgaccctgcccaccctcctctcctcctgcatccaccgcgccatgtctcaggaaggagccaacctgccgcaagaagtggtggggagccatgatcaggccaccgccccccacggcagcatccctgcaccggctgattccaaccccagctctgtcagcaacctggccagcgccgtcaacaacggcgggtcgtctgagtgtgccagcccagcggtgctctctgccggcgaggacaacaacgcggcgtcgtccaagaccgccagcccggcggtgctctctgccggcgaggacaacaacgcggcgtcgtccaagaccgccagcccggcggtgctccatgctgccgacgacaacaacgcggcgtccaagatcgcaggcccggcggtgctccttgccggcgaggaaaacaaggccaagctcaagctcgcgagcccggcatcgctccttgccggcgaggagaagggcaacaacgctgatgagttcaagctcgctagcccaaggatgctccatgactgcgacgacaacaatgccgggtcccatgctggcgtgcgcaactgcaacgccgcccagtccaagctcgccaacccggcggttctccatgccggcgatgacaagaagggcggatccaagatcgccggcccggaagtgccccacgccagtgtgaccagcaccaccggatccaagctcaacggcccggcggcgctccatgccggcaatgacaacgacagcggcggatccaggctcccaaaccccgcagtgctccatgccagcaaagacatggacaacaacgccgggcggcccaagttcgccagcccggtgttgctccatgctggcgaggacaacaaagccaggaccaagctcgcaatccaggcgggcggtggcggtaacgccggagccggatcgtccaggctcaccagatcggcggcgctccatgccgggaaggacaacggcgccggatccaagcccgccatccaggtggtgccacgcctccatgccggcggcaaggacaacaacgctgggtcgttcaaggctgccagaccgtcggcggccgactccggcgagagcaacgccaaggagggaaagagcaacgtagctggagaacaacgtgcccgtgaggccggcgtgggctgtggcggcgggaagggcaacgccgccgcggtggaggatgtggaccacgacttgcacatctttacggagagggagcggaggaagaagatgaagaacatgttcagcaccctacacgcgctcctcccgcagctccccgacaaggctgacaaggccaccatagtcggggaggctgtaacctacatcaagactctggaaggcaccgtccagaagctggagaagctgaagctggagcgcaagcgcgcgctggcagcgcagcagcagctgatggctggtgccggcagcaaccgcgcgtcgtccgcgcgccatcccgcaccagcgccgtcgtcaccgtcgtcgtcgtcgagggaggcgaacgtggcggacatggtccacggttggcatgcgcagcaggccgccgcgaacaaggccctggcagcggaggccggggcgggcggctcctcctctgccgccgcctcgctgccccgtggagcggtgcccttccccgcgcccgcggcggggttccagacgtggtccgggcagaacgtcgtggtgagcgtggccagcaacgaggcgtacatcaacctgcactccccgcggcagccggcgggcaccctgaccaaggcgctgttcgtgctggagaggcaccgcatcgacgtcgtcacgacgaccatctccacccaggacggcttccacatgttaattcggcttccgcttcggctcgctttccggagaatctgtgtgctgaagacaggttcaagctggcggtgtcggagatgctgcagctgatcaacatctgagctaggccaacgcgctcatgctcgccaatgcatctgagctatgctgctgccgtcgtcgtttcgtgttaagtttggtcgtcgtccaactcttttagtttgtttctcttgttcgtgccaagtttggtcgtcgtcggttgaactcttttatgtctcaagacagctggttagtggttcctagcgtatggtaagtactgtttgaggtttaacccgtcgtggatgtagttgtatgatcgggtttcatgtgtgagagttctaaccaatcactagacatcgtagaacatgatgaaggtctactttgagactgagtggagcggccatgagaatgagagttcgggcctgttaggcacggctccgactccttcaaaaacgattctggctctgagccaattgttttagctccggcttctctctataaaaatagctccagctcgtcagcgctctttattgagagttcttttttagaccgtttgagagggctcctgaaccagagctagtttggagacctcctaaacatgcattcaaagtttagtggg

SEQ ID NO: 30296 - DNA, 4171 bp, Zea Mays
tccgcgcgggaaacgtgaagctaatccaactccaacatttcctcccgatgcgctgtgctgtgctgtactccttcgcagggagctctcgaaacccaaaccctagctctgacccaccgcgattccccatttgatttctcgtacccatgggtggatccgctgatcccgaggcgccgtcgccgtctccgacgaagccatcgccctcgtcggctgacgggaagccgccgaggcggtgcgtgcagtcgaaactctcgtgggggcttgtcaaaccagccggcggcggccgcgaaggtggaggaaaaggaggcggcggtgaagcaggaagaggagatgccgaggctgttcctcctgtgcctgcggccggggaggcggcggcgacggaagttagagaggggctggagaaggggaagaagaagagaaagccgcggaaatcagaggatggcaagaagggctcttcaagcaaacagaaacaatggcaggatcaatcgaacaaagatggagtcattttggttgatgaaagccctcagaaaaagcaacgtaaaggtagaaagcaagatgcaatactgaaggagcctaatgctagcagaaagcgttgcaagacatcggaagctcctgatggtcctggaagctgtcagcaattgcatatcagccagattgaagccagctcgcctgcagcagcgccagtaataattgacgttgatttgatgagtacgccttctaaagcaggacatgctaattcaatcgatcaggatatatcaccgttgaaagttgacctaaggtcagaggcgaagatagctgcagaggaaattcgaaggttatcatctggaaagaaaattcaccctttctttcattctcggaaattgaacaaatgtgctagccaagatcaagatgtcatcaatattgaaaacatgcatgggctttgtgattctgaaagggatccaccattttatcctattcatgttgtgtaccaatcagaggccagcatgccaatccactggagtaattggataatcactgatatgtcatcatttgacactgatactgccgttcctcttaaaaaatctgtgtcatactttgagggcttggttaagccactgacaatagaaactaattgcaagaggcattctaatcaattgtcagatccgattcttgctgagtgtacaacttcaggaatgccttttccaagtttttctggcaagcaaagtgaacacagctgtttttcagatgcgatcaacgtggacacacagaacttgttgaggcctggtgctagttgccaagcttctcttcttgatctgaatgtagagccagaagatccacagaatggttgtcagcctgcctgttacctatggactgacaagtaccgacctgaaactgtggcccaggtatgtggaaatagtgagcacgtaaagtttcttgctgaatggcttaaaagctgggatgaaaaaggccacaagattggagttgctaacggggacactaatgataactcatatcaagatatatctgattcagattattcagagagtgcttctgattgtgaaaatacacttctaatcactggacctgttgggtgtggaaaatcagctgcagtttttgcatgcgccagagaacaaggcttcaatgtgatagaggtaaatacatctgacatgagaaatggagcttatgtaaggcagaagtttgaggaagcaactaaatcacatggccttgaaaaatgaaatcacctgtaggatactactcaggtttgaaggcctgtgatgaacctcctaaacaagttgctaacaagacactcatactatttgaggatgtggatactgtctttgatgaggatcgtgggtttatttcaactattcttaagatggcagagactacaaaatggccaatcatactaactagcaacaagaaggatccgtctttgccgaatctcttggatcaacttgttttggatttcaaatacccatcgacctcagagctactttcacacgttgccatgatttgtaaatctgagggagtgaatgtcactgttcctcagttaaaacatgtaattgatgtttgtctaggtgacattaggagggtggtgatgtttttgcagttttggtaccaagggcatcaattcacagagaggccaaaggaatgtttgtgtggtcctttctcacttgatttagatgcagtacattctacagtgccaaaaatgttgccatgggagttcccttgtaagttatctgaaacattatgcatggaggtagacaaaactatccttttggctgaagaaaagaaaaaacagatggaaatatcagatcttgaaggcctgcagttacatgtaacagcacctttgatcaagggaagaacttctaaaacaagaagggctaagaaatccaaattaaagcgtgctcactcgactgagcataatgatatttcaccttgtaagaatgaacttgatgatttccatgatcttccagatatatctcttccatctgataaacaaataaaaagaaatcggcatcgttcgctgctattatctgagtccgatgatgatccagctgatgtaggtactgaaaaacataacatatttactgttactgaagttggtttcttcccacaaccttcagaggtgcctcctatgcatgggcaagggatttctgatcagttccattttcccgttgaatcacgagagacatgtgaaattgctgattctttccaaaatccacctgaaagcaacatgtatgggtccatttcacaagtttgtgatacatttatgtcacaggacgtgtcatgtgtacccgagtcatccttaattttggacggcacatctgcatccataagtggtgatgaatttttgtcaagggcagtgtccaatggtttttctgccttttgtgagggtacatacactacctccagaatggtattagaagacagtgactgtgtgaagaatctaatggctgaacgacaaaaagatgttgaagatgtagttggtgagacaagtgagacttatatggaatcatttcggagaaatgaacaggcaagctgttcagctgctgggtttcaattaatggatgaatgtagtcgtgctgaaagcatctggctgctctctggcaaaaaatctaatgactcttgcaaggtggaactagtacaggacacttggaacaggctacggagttgtcgtcttgaatttaccagtgaggctaatcacaacagagcaacttctggagctttgaagcttgtctcagaagtgtctgatttaatatcagaatcagatcttatgcttttccgttgctaccctcttactaaggatacgttggatccgtctttaactccttgtgatgagccagttgattcttcttggtacagcaatcaggttgagatgggatctgtatatgcccagcatgctcttcgtattttatcgaggaattcccaaaaaatagatggtggttctgtcgatttgtcacaagagttgtttgccagtacagctgctgtatcctttggtaaaattacctgttcaggattcaggaatgattatggatctacggacctttctcatatgaaaaatccaactacctgtatttttaaaagaagggagcggcatgttcatctttgtgaaaccctgtctccagtggttcctccaaagttgttgcagtcattgagaggccctgcttttgttgattatttgtcttcaatcagccagatttccaaattagaaaacttgcgactctctgaaaataaagtcataaacaagcgaagaaggtcccgtcaggcaagacattacttgagttctggcgcacttcaactttcacatgaggatgttgtattattagaagaaagcggctgtttcagtagcagacgcgagagggttgaggttgtagagcaagcaccagtcagtacataagttaatgaactggtgctgatcatgagcggcagcattttgattttttttattagaaggcaatgtgactgggttggccgagccatttttatagttgcgtccgtgatcacggagcccggcggtggaggaaccggaatgtgtgcagttgattgctgtatctgttagataactagacattttaaagtttatttaaattttaaaattatttatagcaatcatgaatatggattaatcttagtatgtttacatgttcatgtttatcatctttataatcataaatagtataaaaataagaag

SEQ ID NO: 30297 - DNA, 1567 bp, Zea Mays
ccttattatactttctcggactcaacgtcttatctatactatctatatcaccttgttatactttctcggactcgcgtctttccttcgtgatttactcactcatgccaccctctcaaagtttcaaccgtgtgcccatcgcaataaaaataaaatcaataatagagagaggaggtagcaacaccggctgcttaatctcttccttttcctcttcctatctccagcgcatcccaagaggcggaaagggaggagcgtggagcggcgaattattgtttgtttccccaagatgtcttctccaagcaagcgccgggagatggacctcatgaagctgatgatgagcgactacaaggtggagatggtgaacgatgggatgcaggagttctttgttgaatttcgtgggcctaacgaaagtacggattattaacgcaaaaggacgatttaggttttgtttctatggccgatgattctgtagctcctggtttatgatctatatagaccgaagtgcaagtcttcagaaagttcagaattttttcatggtcattgtggcatttagcttccactgctgtagcttaagaatagatttgatcagatcccagatttaacttgttgttgagctgcttttgctgcatatgctgtctttaatatctgaatgttgcagttaaagcttcagccttgtcctgcactagtgatttaggaggactggctgcactatctgaaggatactttgctgaattcaataggcatttatcaaggaggtgtatggaagattagagtagaattgccagacgcatatccttacaaatccccatcgatcggtttcatcaataagatatatcacccaaatgtcgacgaaatgtgagtagttttgaactcaatgaactgttaccttgtcaaattcaaccacgacaacaatctagcttctaaccacttctggctgaatgcaaactgcaggtctggttcagtctgtttggatgtcatcaaccagacatggagcccaatgtttgatcttgtcaatgtgttcgaggtcttccttccacaacttctgttatatcctaatccttctgatccattaaatggagatgcagctgcgttgatgatgcgtgatcgccctgcttacgaacaaaaagtgaaagagtactgtgaaaaatacgccaaaccaggggatgctggtgtcaccccagaagagcagtccagtgacgaagagctgagtgaagatgaagacgactcgggtgatgaggagataatgggcaaaccagacccatagtcaagttggcacctactatacctgtaatctgcacacgatgtttactgcagcaactgcaattaaacaccccatgaacatccgcgtgcagtctgagtgccatgtaaataaactgcaatttcaccaattggatttccagcataactatgtcttcgaatcatgagtgtagtgtaggttcgtgcgtttgaattggctgaaggtttcaatatttgtgcaatcattagcagaactgcagaagcaagttcctcaatacagtaattcagatgatgttggcgtagacctttttaagctagtgcatagctaatgcgc

SEQ ID NO: 30298 - DNA, 2670 bp, Zea Mays
aattctccttgtctctctcactctctctgtctgtgggaggaagttgagaaggcgaggagccagacaagcgacgcggctccactcccttctcaggcggccccctgctgctcaccgcccagctccaggtgatatgcacgaggtcaaaagtgggcgcgggaaataggtgctatgcgctcctgcgagaggattggggaagactttacctcactcaaatttacgggaacagtcaccctcgatgcgtgacgcgaaaaaatgggagaactttgcatgagctgttggagttattagagaaataagggtcggcttggttgcccgaggcctacccagcgcctgcgatggaggagaaggctatggcaaatggagcagcgactgctgatgttgctgctcctgataataaggataacaccaaggaagaggctagcgagagcaaggaaccagcagccaatcaggatgccgatgaccagaacaaaggcttggaaaatggcgccgagggccagtcaggtggagatgtcaatatggcagatgctgaggtcacagaggaaggcgatggtgatcctggtgttgcaaagcaggtggattctgaagatatcaaaacggatgccgatacaaaggaagatggcaatgcaaaggcagaagaagttgaggatgtcaagatgactgaggctgacacgggaagtacagaggtcaaagataaagaagagaagggagatgaagttgtggacacaactgtggataagcaggatgaatcgaaggagcaagaggaaggtgtttcggctgagcaagatgagaagcaaggagaggaagcagaagaaaaaggaaaagaaatggatgccgatgagaagcaagaagaggaagcagaagaaaaaggttctgctgatgagaaagatgaagatgaaggtgaccagaagatggaagagaataaggaggagactccgaagaataagaaagcaaggagtgccagggatagaagccagggaaatgataataaacatgatggatcaaaatctagggaagccaaaagtttgctgaacaccccaagcccatatggtaccgatcgtcctcaacgtgagaggaaaatagtggagaggttggttgaggtgattgagaaagagccaaacaggaatttcgtggttgagaagggacgagggactcctctgaaggatataccaagtgtggcacacagaatatcaaggaagaaaccttctgatcttaaatttcttcacagtattctttttgggaggaaaggcaaggctgtcgattttaaaggacatatactccagttctctggatttgtttggcatgaaagtgatgaaaagcacagagtcaaggcaaaagaaaagcttgacaagtgtgtaaaagaaacgctgttggacctttgttggacccttggcattccaactccaaaagcaaacattagaaaggaagatattgtgtcaaagctgttggactttattgctgaacctcactctgcagctgattctgggctctctgatgaccagggttcaaattctaaaaaacgcaagagaggaggtgaaagtgcacgtaagactcctgatagcacacctagtaggtcaaggaagaaatttatcaatgacagcacttctagtaaaaggcagaaaaaagcgctcgagtatgatactgatgaggatgaatccatgaagtcagacagtgaggaaaacagagatgaagattcagatgaagctggtgacaaacaggaaggtgactatgtatctgggaaagaaaaggcagggaagttctcagaggtaaaagaatcttcaggcaaaaagaaggcaaacacagggagtggccaccaatcaggtcctccaaagaaaattatcagaagtccggtaaaaaaagtatcatccaagattcatgaggaaaaagaaagccccaataatagtgcaaaggttttttctaggaagaagaaacccacagcagaaaaggagatcaaagaaaaaaagtcatcaggcaaaaaggtgacaaagggtaaaggagaatccgttgaagcagttcttcccagcaaggatgatctgaggaagaccattactgaaatcctcaagaaagttgacttcaacacggcaactttcagtgacatccttaagaagcttgacaatcactataaaatggatctggccccaaagaaagaagccatcaaagttatgatccaagacgagttaaccaagttatcagaggaggacgaaggagagggagccggagacaccgagaagaaacagcagcagcctcaggcgaaggagatcgaggcatctcgttgattatcgccgcaccaactcgagaacctcacccctgatcgtgtatgttatggggcatgatgtgtaggcagcctccacacctttttagctgactgatcggagagttactcctaggcaactcttgtttctagatttgcaaatggtgtctgaaactctgcgtttgctgcggcagaacgtgtacttaattgttcgtgataggtctgaataacacatggatggtatcagtctgtagcttattttttttacttgatccgtttcttctgtgggttgtgatttgtgaatgaccaaaagatggatgctgtattccagtttctgttctctcagagtaggcatgcaagaataacagctgaaccaaaccgagaaacagaacagtggctatctcctatctttagtagcttcc

SEQ ID NO: 30299 - DNA, 328 bp, Zea Mays
aattggtcatcgcgcttggttgaaaagccagtggcgcgaatctaccgtgtgccggattatgactggacgcctctaagtcagaaaacaagctagcaaccggcgcctctgctcgccgcccgccccgacccacgttagggcgttcgcgccccaagggcccgtgccattggctcatcccgcccggccgacgcgccgcggcgggccgcctcgaagctcccttcccaacgggcgtcgtgctgaatcctttgcagacgacttaaaacgcgacggggcattgtaagtggcagagtggccttgctgccacgatccactgagatccagccccgcgtcg

SEQ ID NO: 30300 - DNA, 2572 bp, Zea Mays
gtcgcgaggcggctcggctctacacctacgcgtgcgcggcctcgcctcttccctcgcacgactcgccgcgaggagtttccccttcctccgcgtgcatccccgcgagagctcgaaaacctagccgccaaatccatggctcgccgcgaccacgacgacgacgacgaggaagaggtcgaggaggaggcatacgacttggacgaggaggaggatgacgaggatgaggaagacgactacgaggaggaggcgaggcgcgggaaggcctcccgcggcggtggcaagggtggcggcgggcggaagcggtcacgcgaagacaacttcatcgacgactcggccatcgaggacgaggacgaggacgacgacgacgacggcgggggccggccgaggaagaagggcggcggcggggtgcgagggttcttcgacgaggaggcccaggtcgacgaggatgaggaagaagaggacgaaggcgagggagaggacgattttattaatgatgctggggccgaccttcctgatgaggatgttgttaggggctcaagacgtcattctattcctatgagagatgaggaagaggatattgatgagattgagagacaagtgcgggagagatacgcacgatccactcatattgagtacggtgaggaagctgcagaagtggaacagcaagctctgctgccgtccgtgaaggatcccaaactatggatggtcaaatgtgcgattggacatgagagagaaactgctatttgtctgatgcaaaagttcatcgatcggtcagaccttcagataaagtcagtcgtggcattggatcatcttaaaaattatatttatgttgaagctgaaaaggaggcccatgtcaaagaggcttgcaaaggtctaagaaacatttatgcttcagcaaaaataacattagtgccgataaaagaaatggcagatgtcctctccgttgagagcaaatctgttgatctttcaagggattcttgggttcgaatgaaattgggcatatataaaggcgaccttgctaaggttgttgatgttgataatgtacgtcaaagagtagacgtgaagctgatccctagaatagatctacaagctttggctagtaaacttgaaggggagtctgtaaagaagaaagcatttgtcccaccaccacgattcttcaatatcgatgaggcgagggagatgcatattcgtgtggaacggaggcgagataaagaatctggggagtactttgagtgggttgataatttgaagttcaaagatggtttcttgtacaaatctgtctccactaaatcgatccacacaaacaatattcaaccgaattttgacgaacttgagaagtttaagaagcctggtgatgacatgaatggcgacatggctagcttgtccactctgtttgcaaacaggaaaaaaggacactttatgaagggtgatgccgtcattgttattaaaggcgatttgaaaaatctggagggttgggttgagaaagtagaggatgaaaccgttcacatcaggccaaaaatatctgatctcccgaaaacattggccttcaatgaaaaagagctttgcaaatatttcaagcctggtgaccatgtcaaggtgatctcaggagttcaagaaggcgctactggcatggttgttaaagtggaagggcatgtcttgatcattttgtctgacacaactaaagaacatatccgtgtgtttgctgatcatgtcgttgaaagctctgaaattaccacaggaatcaccagaatcgggataattgggaagatggaaatcctgctacttggggtagcagtccagcttaccaggaaccccacaagctcggccatacgaagcccccacacctggatcagggtgggcaaacactccaggagttagtttcaatgatgctcctactcccagggataactatgcaaatgccccaagtccatacgtgccttccacgcctgttggccaaccaatgacgccaaactcagcctcatatcttccaggcacacctggtggtcaaccaatgaccccaggcaatgctggaatggatatgatgtcgccgataataggtggtgagggtgaagctacatggctgctgccggatgttttggtcaatgtgttgagcggaggtgatgacggtcctggtgtggttagggaggtactcggggatggatcttgccgagttgcacttgggtcttcgggcaacggtgacatggtgacggttcttccgaacgaggtcgaggtcatcaggccgaagaagagtgacaagatcaagatactgaatggtagtttccgtgggcacacaggaaaacttataggtatagatggttctgacggaatagtgaggcttgacgacacatacgaagttaagatattagatatggtgattttggccaaactggcgacttgaaatggatgtatattttgttttgtaacgtgtccaccatagaacatattttgtaacaatgccctcgtttgcaataaagctttttgttgcttacgactacaatagttttgcacacttgtgcttttgcccaagggccgctcgtttttagaccttcagttgctgactggtcgtatatatcat

SEQ ID NO: 30301 - DNA, 75 bp, Zea Mays
tgtatcgcttggtggactcttgggtgtggtggtctttgaccctgtacttcttgctcatcttccttgtcttgatca

SEQ ID NO: 30302 - DNA, 340 bp, Zea Mays
gcacctgggctgattctggcaccctcggcccatttcccccttcatccacccgcgcagcccacccaagctcctggcctagtaatacactcgcgctcggcccagggggaagagaatcacgtcgcgcctgcatttccattcggtgggaccagtttgtctgtgatacatcggctgccatcgtgggacccacatcccagctgcatcttcctccttatcgcagcgaacagatgttccccttctctagagtttgttgcgattctccatgtcccgccgtgcacgcaccgtagcttcgcttcgcgctcgcgcgcggactcgggttcacggtgggccccatcggtcggaa

SEQ ID NO: 30303 - DNA, 5009 bp, Zea Mays
tctataagtgaccgatccgccctctggtccatcgtcgtctgcagcaagtagaaaaaagggaaaaaaagtaaagcggtggtggcggtggagcaaaggaaacctcctggcagagagatggcggataaggccaaggtggttggtgcccatggagaaagggatgatgtttttttgtggggagagcttcagcacgatgactgcagatcaggtgaccaactaggaggtgtcaaattgctgagtctaatggctactgagagtgctttccgattgattggtgggacgggggctagggactggagtaagggatttggtgcatttggctcttcagcaggtgccttatcaggggaagacttgggatttgtggataatgacactggggtttatgggggctggaacaaatctgttccaaatcgtagtggaagcgcaccgcctagcatggaaggatctcttgctgctcttggccatctcattgatcagcagagtgggagctttgaagctagtttgacaaccttggataacataactgacagttccaaatctgaggagcaactacgtgctgatccagcatattttgagtattatggctccaaggtgaatctgaatccaaggctccctccgccacttatttcaagggagagtcgccgattaatgaaccgtgttggcaaggctaaagagtggaggatggtctcccaagataacagcagcaaaggctcaatatacgttcctcgatctatgttgtcaactcacaaagaagaacctgaggatgataaatctccaagattggattcaagttcagtggaggatgcccagattgtctccagtgcatccaactttcagagccaggattttatgctggagaggtttcaacagagtgttgcttcttcgcctgatagttcatcttctaatccttcaaatagcaacactggtgattctatgcctgtatattctgacataaatttgttaaagagtttgtcatttgatgctttgaagcaatcggatttgaactcttggacaccaaaaggcccactgaaaagtaatgttaacaatgacctttcatcgccacccctttccagttcatcatatcctggtagcaaaactggtacgcaaacttttgagcaagaaaaggctgctgctgacaccaaacatggaaatgttgtgcttggcagtggcgcagctgttactgaagttgataatgtggactccattatgaagaatttgaagttaagtttggatgtccatacatcctcacctgccaagcagaggtggcaggacaatgtcttgcagcagtatggttcctttttaccagcccaaggtgatcctattcaattgactactcaaggaccccatcctcctcatgtaccttttgttgataacttgtctcatgctcagctcaagttgcctgacatccaccaaaatttaccacaacctagtatgacaacacctttctatacaccaaattcttttgggaacccttattatcagaatttgcaccctgctaatgcttttccaacctcaattggaactgggggttatgctgtaagtggttctattttgccaccgtttatggctggctatgctccccaaggtcctcttgctacacctcttgacagttctatgactccaagctttagtggcaggccatctggatttcttccagcagggaatcttacagggggaacagattttatgcagtcatgtaaagtatacggacaatttgagcctggtatgcagccatccattcccgatccgaacttcattcatttctttcagcatccctctttatttcagtatactggaggaaatcaatacaatacaatgggtccaagatttactgttgttgggaatttagctgaaagctttgattcacaaaacacgatacctcaagctgcatctgcatatccatctgatcagaggcttccactgccaataactggctttcctaattctcctacagccagaagaggagggactgttccaaattatcaaggcatttcatcctacattggagtgccaatgacttatcctactagtccagtgtttcagggacaaacattgcctggagtattgcctcctgttaggagaaacgactctgctggatttctgcccccctcaagaaacatcactggtagccctggaattcaagggcagcgagcaagacagaagtttgatgaatcaaagacctgctctttcttagaagagttgaagtccaacagagcgcgcatggttgagctttctgacatcacaggccgtgtagttgaatacagtgctgaccaacatggtagccgattcatccagcagaagttggaaaactgcaccgccgaagagaagacatctgtgtttgccgagattcttcctcatgcttcagcattaatgactgacgtttttgggaattatgtgatccaaaagttttttgaacatggaactcgtgagcaaaggagggatcttgccaccaagcttgttggtcacgttttgcctttgagtcttcagatgtatggctgccgtgtaatccagaagcctcgcaaaccctatcgcctatccctctcgcggtcttgcctcggtctctggcggcggcaccgccgttttacactcctcctccttcgacaacccgtcgcagtagcgtccgtctctggtgtccggctgtccggctctggactcccgacctcgacatcaggatctgcgcctcccgaccggtatgtgggggctctgaagaaggtgcagaaggatctgggcgcgtcggtgttcgagccgctggtgcaggcgtacgccgccgtcgggaagttccctgggatgtggcagcggctgaagatcgagaacgtggaggtcggggaggggacggcccagctgcttgactctatctgcgccgatcaatagcccaagcacgtcctagaggcggcgacagaaatgagttgctggcaagtttgacaaaacaagcagacatggtcttggtggctcagcaggaattaatcacccaaaaaaacagttacaagttgggttcatgcatgtcttacgtcaaggattgtactccccgttaaactgttggttcgggccagtggccggcccggtacgttcaggcccaccgggcgaacgggccggcccggcacgatttatccctgtgcgtgccgggtttgggcatgtcgctaggcacgtgggccagcacgacccggcccgaagcatcaacgggccgtgcctggcccggccctatccgtaccgggccgaaacgggttcggaccgggtccgtgccgggtggcccgtttggacatctataggtccctatttggacctgaagtgaagcattttaaagttgaaggacccagattctcacttcgagagtttatgaacctagatgagaatctaaggctctggaagttatggaacttgaccagaaaatagatctagttcatgagcttgatggtcatattatgcgatgtgtccgtgatcaaaatggaaatcacgttatacagaagtgcattgagtgtgtccccacagaacatattggttttgtagtgtctgcttttcagggacaagttactagcctttcaatgcatccatatggctgccgtgtaattcagagaatcttggagcactgcggtggtaactcacaaggccagtgcataatagacgagatattacagtgggtgtgcatccttgcgcaggatcagtatggcaactatgttacacagcatgttctagaaagaggaaaagctcatgagaggagccaaattattactaaattggccgggcaggttgttaccatgagccaaaataaatatgcatcaaatgtgatagagaagtgttttcaacatggtgatattgcggagcgggatcttctgatcagacggattgtggagcagacagagggcaacaacaatttattggtctgtttggtagtgtagtaaaagtgttccctccattatcccttcctctctttgccaaacgggtcggggttctggaaggtagggctaggacatggggacctgatctcagttcggtacagccaatcagataacaccatgagtatctcagttctgctattccagctttctgggagctgcgaatcctatggattaccaagacatgggatctctgtaaacttatttcttcctgtgttgatgttagtttatatttcctaatcaccttttatattcaatcaggcaatgatgaaggaccagtatgctaattacgtggtccagaagatacttgaaacttgcaacgaggatcagcgggagcttctgctcagccgcgtaaaggatcatatgcaagcattgaggaagtacacatacggcaagcacatcgtaagccgagtcgagcagctctgtggcgacggaactgccgagtcaggttcttgaaacgaaccgccgcctaattcttcataggctggagggtgtcctgctcttttgctcattccgtcagtgacgaagaaagcaaaacggatcaagtctaactctggcgcttcagaacagactaacaaagctgtcgtcgaagattgtataggtgtgactctgttcagggatagtcttcaggttctagaacagaagggtagtggtgtgcatcagtgtatctgtttactggataatagtggttggttaggtgtgtgcagaaaaagtttagtgctatgctttgtatgtgatacatattaactatgccttggaatgttcatatgttgtcctgattacgtgtgatatctctcgttcagttcaagttgcgttttctacatggccatgggaccatctgccgatttgatgaaaaaggaaaggttgtgcacctttgtaagcgggcatggagatgagctgcgctattttttttttttacaaaatgtctgctgggattgaactgtctattttataaaaatatcatattttcttttaatgtcaacagaaaaattacggactgtgtatggatcccatgtagctaaggccagtgagtgttacgatgctttgtcagttgatgttatgtcagtcttttcattgttaattctgaaagtagattttatgccgatgaacctttataaaaag

SEQ ID NO: 30304 - DNA, 1483 bp, Zea Mays
gttatgttcaggaatagcgtttttccattagttctttcactgcttgcagctcttggatcaattcagtttgtttccaacattgcttttgcctactttgtgttgaacaagactatttcagtgaaagtcatggtagccacaacgtttattgtctttggcaacatcttcttagtatccttcggcaaccatcaatcgcctgtttacacgccggagcagctgatcgcaaaatacagcaatttggtgtttgttctttattgcatgtcattggtctttgttgttgcgtttaaccattatctctacaggagtggagaaactattatttcaaatagttcaaaagatgctggcacatattggcgaacaatgttgccattttcatatgctgttgtatctggtgctattggatcttgctcagtcttgtttgcaaaatcattgtctaacatgctgagactgacgatgagcagcagatacgagttccatagctggttcacatattcgatcgttctcctgtttctgtgtactgctggattttggatggcaagactgaatgaggggctgtcattatttgatgcaatactgattgttccaatgtttcaaattgcttggaccttcttctctatttgtacaggatttgtttactttcaagaatatcaagtatttgatacgctcaggataattatgtttgtgttaggcatgacatttgtctttgttgggatttccttgctagcacccgatgacagtaaagatggttcaagcaccgccgatgactccataattgacatagacagaaatggaaagatgccgatggaggagacagacacagatgatagcatctcctttgttacttctgtaaaagtaaatgcaaaacgtgtactttcaaaggcaaagtctgcatgctccatgtcccttggccttggggagagcaccataagcgcttcatcggtgcttgccatgccgatggtctcgtcaagaacaaccggcttcagaggaatcggaaatgaccgtccaaagtatgtccctttaagaaccacagattggagtaacctatagccggtggtaatatataggtacacaggaaatgtctttgtttttgatgttgcctagcggatggcagtgaagttttttttgttgcttccagaggcaactgtttgttgtgatcgtagctagctataacacgagtgtatagttcaccgttgtaccctacaaaacactgtccatacctagctgcatatacacgtgtaagttttagaatacaactcaaatgattcgattcgcctctgaattgcgcaaccatttcagtggttgcatgttgtaaccatcttatatagaattgcaatttcttttgctgtccgacgctctgggaaggaaccagaaccgggttaggttaagctgggttccggcatgtccattcatgtggaaaaggtcgtgtgatgaccaggcaagaagagcatcttgtcctgccaactgtgtgtaacgtgattgaaactta

SEQ ID NO: 30305 - DNA, 1680 bp, Zea Mays
agcattttgtttttttcagaataatgatgattcatgccttgcctatgtattaggagccatttctaatctattatcaaagataggcatctcaaacacagttggaataatcagttctccatattcacttgggaccaatattggactaggcacaccattatccattcagcaacagttacttgttcttttaaagcgatcactcaagagagctgatgcattgaaacttccaagtttactatcctttgatcacctttcgcttgcaaaatttgatctgaagcatgtccaaaggccactagtctctttcggccctaatgcatctacaaagcttagaacatgtcctgcagatgtctgtaagtgctccaatggtacgaatgaatgttctagtttatgcaacctgctttgcggatgctgcaagttcatcagagttatcactagcatatgttaagctaattcaacaactggcggtgttcaaaggatattcagctgcattctgtgctctaaagcttgctgaaaagaagttcccatcctcaacaagtttacacatccagcttctaggaatgcagattctacatgagcgcgcacttcatcggccgcagctgtggccaattctcttttctctacgtgctacaagtacaacatgcaggttgagaatgcaagtgttcttttattacttgctgaaatacataaaaaatctgacaatgcggtacttgggcttccttatgcgttggccagccaatcattctgcaaatcattcaacttggatctgcttgaagcctcagctacacttactctcgctgagttgtggctggatcttggatcaagccatgcaaagaaggcactgagtcttgtctaccagagccttcccatgattcttggtcatggtgggcttgagctgcgtgctcgagctcacgttgttttagcaaagtgccatttatccgatctgaaattctcagttctcgaagatcctgaagctgttttggatcctctgaaccaagccactgaagacctgcaagcattggagtaccacgagatggcagcagaggcgtactatctgaaggcaatggcatacaaccatctcggcaagcttgatgagagggaggaagccgcggctcgtttcaaggatcacgtcactgcccttgagaccccgcataacgaagaggactcgcttaagtactgagacccaagaccatttgttattggcaagcatgccccactgccagagactaaagagggcgtggtggccttctggacccgcatggtggcactggcaggctacaatgctacactgaggcgaatggcgtttgctgccatgcggaggcactgccactgactgtgggcggaccggcggacggcggtgactgaaggagacgggcagccggtgaggtcaatgtgctagttgggtcagcgtggtatggtctcatccatggaccatggtgttcattagagcgagacgaagacatcagattgagacttgatgttcttactctgttcttatcgacttctctgctctgttactggggagttccgaattgctaactcagacagacagtgctgacaatgtgtttgtgtttgaatgtaaacagaacaagaacagaaaaatagaagattgatctgtattttcccttgactgatgctggatatttatagatggtgaatacacactaagaacgaacacgtttgttg

SEQ ID NO: 30306 - DNA, 2849 bp, Zea Mays
cgacgtcctcctcctcctcctcctctcccttccctattctttctctcacacgctaaatggatgggcacgctacgccgtattcctcccccgcagccgcttccttcgcccacacgcccccgcgctcggaatactccgaggagggtgctcgaggcgaaccaagggcgatggttcatctcgctttcgtctcgctgcgtgcgctctctgtcactccccctctctctcctcatcagatccggccacttcctgctcgcctcgccaccggtcccgcgccccggaaccctagagctctccccgcggcagggccgccggagtccccgggcgcgtggagaaaatggaggcggcgctagaggcggcgtgtcaaggacaccaaggagcgtctggccggggtcaagcggctgcacgaggcgcttgacgccgcggcgcggcgcgcggcggccgaggtcaccacgctggtggacacctgcatggatctgacgcgggatgccaacttccgcatcgcccagggcggcctccaggcgctctccgtcgccgccgtcgtcgccgacgaccacttcaagatccacctcaacgccctcgtccccgccgccgtcgagcgcctcgacgacggcaagcaacccgtccgcgacgccgcgcgacagctcctcatcacgctcatggaggtgagctcctttcgtcggcgctctcagtggcctgtcgtctctcctgggaaatgcatgtagctggggaggtagattaagttgcgagttcgaactaagagatcgagcaggagcagattggggatttgaggcttgtttttttaggtaggtcgggtggggcacggtacattgcatagttgtgctgaagtgaggaatccaaaggtctattcggctgaccattatagattgacatgcattacatttaaatggatcaatggtctaacatttttgtaggaatcgtgtgctcttgggctcgactgtctcgctaagttgaacttctagtggcatatcttattcttctgtgattttggttctagcaaactaagataaatttgggattcaagtaaagatttggctgcttccctgtatgcattctgatatagataattcttttatcgtttttaccctttagcattagaactaggatctctttgggagccgtgatttttcataaaacgtatcagtgcttcaatctttggctgtctgcaatgaaaatgacctttaaattctgatccctttttttactagtcaatgttttatcgcagtatattaagatagtattcataaatcatgttacatatgtactttatcctttaactatcgaaacattcaagtcaatcatgtttggtgtgttccagagtttaggactgttatcttgcaatatttttgattgtccaaccctcaggtttcttcaccaacaatcatagttgaaagagctggtagttatgcatggactcataagatttggagggtgagggacgagtttgtacgtacggtggcatctgcagttgggctatttgcttctacggagatttccttgcaacgagttttgctttcacctgtcctgcaactaatgaatgattcgaaccaaagtgttcgagatgctgctatctcttgtattgaggttagttgattccatattcgatactgtatagacctgtttcagccgacatttttcttttttcccttacacccatgatgactggtatgatctctatttctattgatcttgttcaatttcccattagttccatcccacatttacaagctggagagactgaatcattttgtatgacaacattcattgtagctccaagcccctttgcttctagttgaattgttttagtcccttgtgctcagattcatcttttctttcatctaaactattcagtgttcacagttattggctgggacacacacctgctatctaggcagcataaagtttttctagtaagccttcatttgtttttcactacaggagatgtacaagcacatgggatcacaatttcatgaagagttgcagcgccataatctgccttcatatatgctaaaagaaataaattcaaggttggataaaatagaaccaaaggttcgatcatctgatacagcaatgcagtataaggctgtagagtctagaggcaatgctgggatgtagcctgttggtagtgggacaccttcaggttctgttattgatctggaaaatgaggaatcaggttcaaaaggtaaaaggccattaggatgggactccatgaaagcatcaaggaagaaggcaatgtccagttcctcccagtctactgactaccttttaagaattcatgacattcaaatagcaagactgaagcaaagtgaagaaaaatcaggtaagaaacaacagaatattgagttcttgaaggaagttgaactgaaaaagttggaggtccaaaccaaggaactagaaatgcagcaaaccaaaatgatgattgaagaaaggatccgaaaggacgcagagctgaaggaactcctagctatggaatgttttaccagaggatgtgagacctgtatacatcgcgaggagaaaaggtttaatcgagtttttcatcaacaatcctgtctgaagagtactattgtatttcataatttgttgcgaacctagtgtcggcgtaacgtggtccggtgtgttcggacatatgtcatttcgagatttttgaacatttgcttaattgtttgagaacagtagcttggtttttgaactcgtgtcgtgtactagaagattgcgaaatttttattattaaaaaacatataattccaactatttatgactaacgtatttatattaattacgaagtttgctaattaattgtatactaagtgacggtcgcgcactgttcatagagc

SEQ ID NO: 30307 - DNA, 3502 bp, Zea Mays
tgccccgcctacgccttccatctttatttccatctcccggacgtgagtagctgcaatggcgagccatcagcgcggaggaggtcgggttggcggcggcggctggggtcaggcgaaccccaacgttattcagggccaggcggggcggggctacggcggcggtcgaggtggtcagtactacggcgacgacagccgcggtcgaggtggtcagtactacggcgacgacagcggcggacgtggcggcggcaggggcggtggtcgtggcttcgacggccgcgacggcggcggataccaggaaggtcgtggcgggggccgcggcggcggcggataccaggaagggcgtggcgggggccgcggcggcggcagataccaggaaggacgtggtggtggccggggtggcggcggctactactatgaaggacgtggcggggaccgtggtggcggcggctactatggaggacatggtgggggctaccaggaaggccgtggcgggggccgaggtggtcgcggctaccagggacagggaggcagcgactacggccgcgagcgcgggcatggcggcctacaaaccccacgtcctgctctgcgccaagccggtccgcccctcgcggaccgctacgcggccgacgcagccgcgttgagggacaagttcaagacgatggacattcaccgcgacgagcccatgtttccagcgcgcccgggcttcggcgccgtggggacgccgtgcgtcgtcaaggccaaccacttctttgtcggcctcgtcgaaaagggcctgcaccactacgacgtggccatctcaccagagacgacgctaaggggcatatacaggcaagtcatgtcgaagctggtttccgagaaccggcagaccgagcttggcggccgcctgcctgcatacgacgggcagaagtcactgttcaccgccggagagctgcccttcaagaccaaggaattcgttgtcaccttgtctggcaggatggaaaggaggtacaaggtggtgatcaagcatgccacggcggtcagcctcgaccagctgttgatgctcatggcagggtacccaacggacatcccggcgcaggcgctgcaggtgcttgacattgtgctgcgtgacattgtgctcaacgaacgcaacaccatggagtacgttgcagttggccggtccttcttctcaccactcatagactcaatgggacccaagaaccttggcttgggtgtggagggatggaagggtttctatcagaccatcaggccgacacaaaaaggcttatctgtgatcatagacatttcttcatcagctttcattcgacccctgccactgattgactttgttatggagattctgaacaaagataacaggacctttagaagtattacttccatggatcttgtcaagctcaagaaagccctcaagggtatgaggattgaagtcacacaccgaggagacatacgccggaagtaccgaattgccagcttgacaaacagtcctccatcttcacagttctttgaatcatctgctggagttcagaagtccgtagcagattacttcagagaggcataccatctggaaatgcactatgattttctcccatgcctccaagttggcagtgatcagaggccgaattacctccctatggaggtttgcaagatagtagctggacagcaataccggaagaagttggaaggccaacaggtctctaaactaatggactccacctgccagcgcccatctctccgcgaggacaacatttgtcagattgttgagcaaaatgactacaataaaactgagcgtgcaagtgaatttggcatggaggttgattatcgtcctacttcagtgcaggctagagttctgccagctcccactctgaagtaccgtggcactggatctgacagtttgtgttgtccaaaggatggtcagtggaacatgataaaaaagcaagtagtagatggtgcaagggtgggcaactgggcctgcgttaacttttgtcaagagttgcgtgcagatggtgttggtaaattttgctctgatctggtcaagtggtctcgcactactggagtggacatggataacttgagacttccaatatataccgctcgtcctgaacaagctgaaactgatcttcgtaggctctatcaggatgctcggaacaagctaagagggcaaaagtttgatcttttgcttgctatactgccagagaaaaatggcagcttatatggtaatttcaaaaggatctgcgagacagagattggtatcatgtcgcagtgttgtttggataaaaatgttagaagtgcaggccctgcatattttgctaatgttgctattaagatcaatgccaagtttggaggaagaaacttagaatttgctaatcccaaagaaagcttaccgggtgttacaattgaaccaacaattatatttggtgctgatgtcactcaccctgccgctctagatgataccgccccttccattgcttctgttgttgcctcccaagactggcccaaggtggctaactataatgggattgtccgtgcacaaggtcatcgtaaagagctcatcaatggcctggaagacattgtcaaggaactcctacttgcattcgaggagaggtctaagcggagacccaagcagctgatcttctacagggatggcgtaagtgagggccaattcaaacaagtgctggaacaagaaatccctgagatagagaaggcatggaaagctctttacaatgagaagccaaagatcaccttcctagtggtgcagaagaggcaccacacaaggctcttcccaaacaacccaaatgatcgccaatgggcggacaagagtggaaatattctacctggcactgttgttgacaaggatatctgccacccaacagaatttgatttcttcctgtgcagccatgctgggatcaagggaactagccgtcctgcgcattaccatgtcctgagagacgacaacaacttcactgcagacgcgctgcagtctctcacatataacctatgcttcttgtattcaagctgcactcgctctgtgtcaatcgctcccccagcatactacgcccacaagttagcgttccgcgcccgcttctacgtcaaccaagactctgatgcggcgacaagtgtcggctcttatggttcatcagctccctctgctgctgctgctgctgctggtccgaagccgcttccggagatcaagggtgaactgagaaggctcatgttctactgctagtccttgaccacgggaaaccctttcctgaacaaggctttgctcttctgaagactgaacaaggctgctgcattatttattatgaacaagcctgaacaaggctgcattatactagcttaacgtttgtagtttgcattttatttcatataaacgatccaagtctttgccgaacttgattattatattcagttattcagcattcacgggacgctagagggaaaaatcgaaattttgaaacgctttggtgaaccattttatattcagttaagcattccaattaaggcattg

SEQ ID NO: 30308 - DNA, 2629 bp, Zea Mays
gtgttcccgggggcagctcctaggctcgctcctgttctgcatctgtggcgtttctttattggcccggagcagcggcagcgcttaactgtttccgccattgatccggcgacctcagctctggctttgcccttgtttgtggaaccggaaagccttttctcagcgctcaaaatcccgcatatgatctggtgctgggggttgccaccaacaggttgttgcccctgcccccgtaatccttgccccctttgctccttgctttcttctctgtgctgcctttgaagtgttgccagatcgctcttgggagatcactggttcgttagccggcccatagtttgtggacaaacaagggccagttcggtctatttcatttcacagaaggggaaaaaattaggcggcgggatcctgctctttcctgcatggtcccttttggagatactgtttgggttgggaggaagtaaaagcggacaagcttggaggttccgaggagggaggaacatatccctttgtagctgcatgaggaggcactgagacaatgagagatgacaactcaagcaagaacaagctgtcctggtccaagacccttgttaggaagtggttcaacatcaaaacaaaggcgaaggatttccattcggattatgcagccgaggaagccggagtgcagtggaggaccagcttctcggatagagacgcatgtaaatccaagaaaagcaggacagagaggttgactaagaggaacgtggagcgagatggtagagtagaaaacggatttgatggtgcttatattacaaacacgcaggactacagggtcttcgttgctacatggaatgtcggcggaaggtcaccatctagtcatttgaacctggaagactggcttcatacttctcctgctgctgatatatatgtgatagggtttcaggaaattgttcccttgaacgctggtaatgttctgttgaccgaagacaacggtccagcgaagaagtgggtttctctcgttagaaaaactctaaacaaccttgaccaacaaggctccggtgtctataattaccacactccctcgccggctccagacccaatcgtggagctcaatgttgacttcgagcgatcatcaaggaggcaacggaactcgtcgtttttccatcgccgttcgttccagtccttgaaccgcagctcaaggatcgacatgatggatccgcactcgttagtggaccgtcgattcagtgtctgcgaccggatcagcttcgggagcaggccaagtgacgttgacaccagcgtgaggtgtggtgggtcgtctgatgatgagactattgacgaggaatcgcctagcggtatgttcttcccaccgatgccgtgtgcgtatggtgctccactatgcgatggttctaggtattgcttagtcgccagcaagcaaatggttgggatttttctcatggtgtgggtacgaagtgacataagggagcatgtgaagaacctgaaggtttcatgtgtgggtagaggcctgatgggctaccttggaaacaagggatccatatcaatgagcatgtctctgcatcagacaagcttctgcttcgtttgcacccacttgacatcaggccaaaaggacggagaccagcttaggcgaaacgcagacgtagtggagatcctgaggaagaccaggttcccgcacgttcacggagcaggtgaagagaagtcaccggagacgatcctggatcacgatcgtgttatttggcttggggacctgaactaccggatcgcgctttcctaccgctcggtgaaggctttggttgagatgcacaactggaagcagttgctggaaaaggaccagcttcgcatagagcaaaggtttggccgggtcttcgcgggctggagagaagggaggatctacttcccgcccacctacaagtactcgtacaactccgacaggtacgccggcgacgacatgcggccaaacgagaagcggaggacaccggcatggtgtgatcggatcctatggtacgggcgaggcctgtcccagctgtgctacgtgcgtggcgagtctcggttctcggaccacaggcccgtgtacagcgtattcacggcggaggttcggattccgagccagcagcaggcagcggctcagttcggcggcggcggcggcggcattactcgttccgcgtccctcctggggctggcgctggacgagctgccttatccacgcagttacatggacatcaatttttactgatcgactgcgcgtgtctcgatggaggacgaaaggagccagccaagccaagggttcaccttctgatggctggctctggctgggtgaagttcatttctcccaaggttccatcggtcggcatgttttgtactagctaacagatagatattcgaggaggtgctttctgactgtaagattagttttgaatgtaaacgtcgagtcccggttttcgggagagagaaaaaagggagtgttttgtgtcccaggcaccaccttggaagaaggccgtcctggtttcacctttctgtttgttttttttcttctttttggcgtcctgatgtagcaatagtaatgtaacaagagcagccagagccgcgccatgaaaatatttttcttactagtcggaatgaaatggcggcttgttgtacagcgagc

SEQ ID NO: 30309 - DNA, 1479 bp, Zea Mays
ctgcacggcatccactggttcgtaacgttcgacgcagtgtctcttctattaacctgcgagcacgcgtggcgccggcgaggccacacgcagcccaccagtaagccgccaccgccatgcggctcccctccggcgcacgcctcgcgctcctgctcgtccgccgctccctctcctccgcgtcctcctccgccgccgcccccgcatcccgcctctcgcgcgcgcacagaggtgagccccgacagaccccaccccactaggtcctcgattctcccggttcctcgggcgggcctcgcctggtcgccccgtgttcctcgggcgcgcaagcgatgatgctgaggccgcccgcgttagcgtgctgcaaactctacatctccgaggcccgcaactcgggggcgttgcgtgccatcgagcacgcggcggcggcgctccgcccgttggccgtgctcgtcaacaccttcgccgacgacgcctacaaccgggtcgggtacacgctcgtgtcccccctcgcgggcggcgccgcctcgccgccgctgcgctgcgcggcgttccgcgtggtcgcggccgcgatcgaggccgtcgacctggacgcccacgccggcgcgcacccgcgcctcggcgtcgtcgaccacatcgccttccaccctctggccagcgcccgcctcgaggacgtcaccgcgctcgccagggccgtggcggcggacatcggagacaggcttcaagtgccgacgtacctgtacggcgcagctcacagagacggcaggacgctggcgtccatcaggaggcagctgggctacttcacgccgacctcccccggcggcgagcagtggcacggcgcgccggactcgctgctgccggtggccccggacgccgggccccggacgtcgtccgcgtccaatggcgtggtggtggtgggcgccacgccgtgggtggacaactacaacgtgcccctggccacggccgacgtcagcgtcgcgaggcgcatcgcgcgcgcggtcagcgagcgcggcggcgggctcgcgtgcgtgcaggccatggggctcgcgcacggcgacggcgccaccgaggtcgcctgcaacctacttcacccggacgcggtgggcgccgaccaggtgcaggggtacttcaccgacttctcgcgggagaaggtcgtcgagctgtacttgcaggccgctcaagctgcctgaggcttctcggcagtgatagattgtttattgttcagaaagcagggtaatggaataatctactactgtgtatctaggaatccagcagttgtcagccatggcacaaaaaaaaaagttgagctgcgaacagtatgcaaccatctcaatctggtattcatagcaattatatattgccacaaagaaaaaagactagagattatactacgttgcaagccaggtccttccaaatctccaagtagctgtaattacagaatacaatacgtccaagctgagcacatagaaacgatactctagactgcag

SEQ ID NO: 30310 - DNA, 2235 bp, Zea Mays
ctaccacggcatggcagtatgagtagatccgagaatctgacaatccaagcgtcctgcactcctgctccacctcgattcctccacagcacactcccaaaaccagagccacgccggccggcacaccgtcgcctcctttgactagcctcgccgccgcagcgacagccatggccaccgctgcccgctccctccacctccctggtccgacgcctcctaaatcctctaccccctcctcccaccgcctccctgtcccttgccacctccgcccccaacgccgccgcctggccgcctcgtcctccgacctcacctccttccccgaaccgccccccgccccgaacggcgtctacgtgccgtgggcggcggcctcctccgtggccgcggccgcggcctccatcgtcgtggacgccgccaccgaggcggagctgcgggagaacgggttccggagcacgcgccgcaccaagctcgtctgcaccgtgggccccgccacctgcggcgccgccgagctcgaggcgctcgccgtcggcggcatgaacgtcgcgcgggtcaacatgtgccacggcgaccgcgagtggcaccgcgaagtcatccgcgctgtccggaggctcaacgacgagaaagggttcgcggtcgccgtgatgatggacaccgagggcagcgagatccacatgggcgaccttggcggagcgccctccgcgaaggccgaggatggagaagtttggacatttagcgttagatcttctgacacgtcgctcccagatcgaatcattcatgtgaactatgatggctttgctgaaggtttgaggtgattgaaaagttagggccagatgtgaagtgccgctgcactgatcctggtctgttgctgccacgggctaatcttactatatggcgcgatggcagtgtagtgcgagagaggaacgctatgcttcctacaatttcgtcgaaggattggattgacatagattttggaattgctgaaggtgttgatttcatcgccgtgtcatttgtcaagtctgctgaagtaattaatcatttgaagagttacattgctgcgaggagccgtggaaggggtcattgcaaagattgagagcatcgatgctttgaagaacctggaggagattatccgtgcatcagatggagtaatggtagccagaggggacttgggggcacaaatccccctggaacaggtcccttccatacagcaaagaatagttagaatgtgcagacagctcaacaagccagtcattgttgcttctcagcttctggaatcaatgatcgagtatcctacacctactagggctgaggttgctgatgtttctgaggcagtccgccagcgtgcagatgctctcatgctttctggtgagtcggccatggggaggtacccagagaaggctctcagcgtccttaggagtgttagcctgaggatcgaaaggtggtggagagaggagaagcgccaagaggcactggagcttcaaggtgtctcgtcttccttttctgacaagatatcagaggaaatatgcaattcagcagctaaaatggccaacaacttaggagtcgacgccgttttcgtttacacgaaggatggctacatgggctccctgctctcacgatgccgccccgactgcccgatcttcgccttcacgtcttcgacgtctgtcaggagacggctgaacctccagtggggcctcatcccgttccggctgagcgagtccgacgacatggagagcaacctcaaccgcaccttctccctgctgaaggccaggggcatggtgcagtctggagacctggtgatcgcgctctccgacatgctgcagtccatccaagtggtgaatgtgccctaggaatacgatccccatgtccagctggttccttgacctggaatgtagcatacaattaggaggggcttctttttttgtttgtttgtttgtcatttgagtgtatcccagttcgtagcatgtttctgcctcatgttgaggctctctggatgtcgatattgatttgcgtcagtgtggtttaggttcggactcgaatgctcgatttgaaaattcgaacagaactcggtttgcatcagtgtcatgattaactcaaaccattgttctgtactatatcagaacgtgttactacttatcttagtgtcattcctcagtttcacttggttttttttaaaaaaaatattgggaaaaatgtgcccagtaatctgggaacatatatcatgtgctgatgtgcagtcagtcctgttga

SEQ ID NO: 30311 - DNA, 722 bp, Zea Mays
tggtcaaaaaaatttaaaaagtcaacagtgtcatatatttatgaacggagtgagtactaaacacaaaggtgacaaggtagatacctttcccgcagctgttctgtatccttccaaagattcaggagtagagaacagacgaagtgcatcattaagcgtctgaacagcatctgggaatatatcaagatggagcagtaggaagggctgaacagtagctgatgctttgttacctgacaggtgtatttatcagtatacaccactgaaaagacagataggaaagcacaagtgggcctactcaagcataagtttcacactatacctatggtgaataactaatgcaatcatgatatcattattccattggagaaaacgaaaacatctgaatggggctgttttaacttagcagggcagccaggctagtgctgagatgcattggtgcattattgtagagcttcaatggtagagcgcagaattaccttacggaacaccaaaaaaatcctagattcttccatgttatatcaaaggactaacacagaacagacacttcattaatcgccaacatgtagaatgctcttccaacatgaactattaaccctgatattgggctggtcaaagatggaaaaaaaagcaatgacagcatgtacagcaggaagcaaaaggtgacagcaactggatcaacagggaatacgttcatggaaacatgatgcagacgtaacaaatcaaga

SEQ ID NO: 30312 - DNA, 391 bp, Zea Mays
catgagcggagggtggtgcatcattgaacgccatctaagtctggtctcatataaaatatgaaaagcggctcttaataaaactcagtcgggaagggaatgatcgtccttctagtattaatgtctgaggtcagcactcaaggatgcacacaacacaccgatggctagaaaagaccgacacattggtcccgaccgaaaaaattctcgaaccatggcccccatcactaatggcccaacagaaaccgcgtacagaacaccgtaacccgagaacaaatgagacacaacgaggggattttttaattaagccaaaaaaatcgctcatgaggagaatcgaactcgggtcttggaggtgcaactcgaaagcctttaaccactaggctagaggcccttgtgc

SEQ ID NO: 30313 - DNA, 874 bp, Zea Mays
ttgtgcaacagactattcatcagctatactttttggaagtttttgttggggggtgggggagttggaaagagttgcttgctgctgcgcttctctgatgacacattcacaacaagcttcatcaccaccattggcctactacagaggagccatgggcattctgcttgtatacgatgtcacggacgagtcatccttcaacaacattagaaactggatccgcaacatagagcagcacgcgtctgacaacgtgaacaagattctggtgggcaacaaggtcgacatggacgcgaagcgggtggtgtccatggctcaaggccagaagcttgcagacgagtacgggatcaagtttttcgagacgagcgcgaaaacaaaccagaatgtggagcaggtcttcttcgccatggcgagggacgtgaagcgaaggctcaccgagaccgttgccgccgcggccgagcctccggctatccagatcagcaggccggactcgggccaggccggcgcagcctcgtcgacgaggtggtcatcgtcctgctgtagcacctgatctgccgccgtgtgtgtggctggctctggctgctataggttactgcttaccgcgtggtgtgtgtgtgtgtttacttcctccggtgccaagccaagatttaaatttcgctccaaagatttgccggagcaaacgtgtaggcagatagctaggctgctgtgctgggtttgcttgcttctgtcgtgtaaacaaaacccttgagagacggtagtgtctgattgtgtcggaacatgacatgcttgtacattattagtgcatcgtatatccagctgttgctcccatgtgcactgcgcagggcacaagtttgcgttggggtttttttttgtatgttttatt

SEQ ID NO: 30314 - DNA, 3455 bp, Zea Mays
gtttgtagtggcctcttatgcatgccctgtctgtcggaatatttccttatgtactcaaactgcttccaacaaatacaatagagttacgtcaaattttagtgtttatatggacaaaaattctctctcttgataagtcttgtcaggttgacttggttaaagatggaggacatacatattttattaggtttcttgacagtttggatgctttcccagaacagcgtgcaatggccgcttttgttatagcagtcatcgtggatgggcataggatgggtcaagaggcttgtatgaatgcagggcttatagatgtttgcctgagacatctgcaacctgagaatcttcatgcacaaacagaacctttgcttttgcagtggctttgtttatgccttgggaaactctgggaagatttccctgaggctcagttacttggtctgcaaacaaatgcaccagaaactgtaatatgcttattgtcggagcctcgacctgagagctgctgctgtttttgcacttgggaatcttactacattatcaaattgccctgatgatgattctgatgatgatgaaaaggtgaaagctgaaataaatgtagttcgaagccttctccagatatcttcagatggtagtccccttgttagatctgaggttgctatagcgcttactcactttgcgttgggtcacaacaaaaatctcaaatctgttgctgcggagtattggaaacctcaatccaaatcgttgctgaagtcattaccatcattggcaaatataaataatccaagcaatgtttacagtcccaataatattctccaaggcagcattggtcctgtgctgagggttggcagtgatagcggtgccgctggtcgtgatggacacatttctacaagtagcccaattgcagcaagtagcatcatgcatggctctccccagtcagatgattcttcccaacactctgattcaggcatattactgagggagaatgcaagtaatggtggtctcagctacactaggtcgaggcctgttgataatgtcatttattctcaatttatatcaactatgtgttctgtttctaaagatcctgacccaagaattgcaactattggttggagagcactgacccttataggtgttgaacaagtggccatgaaaagtactcgatttaacagtggaggtctacaccgaggagagacatctgcgtcaacctttggaatggcacactcttcttcttggagagatatgaattctggaagcaactcgatgaaatttatgacccctcctgttagccctcctcagcatgattatcttctactaggattgcgccgagtgtgttctatggagtttggacagcatcctataaattcacctgatggctttgctaatctccttttaagctctgctacaggtcccagtaatgcagaactaaagaaacttcccgaatcaacaatttacaactggagttgtggtcacttctctaggccacttttaactgcctctgatgataatgaagaaaccaatgctagaagagaagagagagaacggattgcactagatttcatcactaagtgccagcgctcctcctgcaagattacaagccaaattgctagttgggatacaagatttgagttggggacaaaggcagctttattattgccattttctccgattgtcgtagcagctgatgaaaatgaaaaaataagtgtgtggaactatgacgatgcacaaccagtgaactcttttcacaaccataagttgtccgacagagggctatctaaacttttgcttatcaacgagcttgatgagtgcttgcttttggctgcctcaagtgatggaaatgtacgcatatggaaaaattttgcttgtaagggagggcagaaacttgtaactgctttttcatcagttcagggacatcgagctgctggtcgcagtattgtgattgactggcagcagcaatcttgttatctgtacgcatctggtgacatgtcttccatcttggtatgggatcttgacaaggaacaacttctcaacaccattccgtcatccgctgatagtgccatttctgccctgtctgcatctcaggtccgctctggatactttgctgctggttttgctgatggttctgtcaggatatatgatgtttgctctcctgatagtaggcctgtctatgtggccaggccgcatgccccaagaacagaaaaggttgtgggcatagggtttcagcctgggtttgatccatacgagattgtaagtgcatctcaagctggagacattcagtttcttgatgttagaatggcagcagaaccctacctgactattgaggcacacaggggttcacttacagcattagcggttcatcggcatgccccagttgttgctagttcagccaagcagatgattaaagtgtttagtcttgaaggagaacagttgaggataattcgctacctgccatcttttatgggccaaagaacaggcagtgtaaattgcctttcttttcacccatacaaatcactcctggctgccggtgctggtcataatgctcttgtctctatctatgctgaggaaaattacaagtaagatcgaggcctatatctcatgctcatgataatgcagacacagtgcgatcgacaggccttacatttttggccaagtgatgctccacagcatggtgcagcttcaagatccaagatgatggtaagctttgtcacagagaaggtgttgatggctccatggctttcggtgcatattgcctgttggacggcgtgtgcaatttgtatgatacagtcaagaactcaagattcattaggcctccttgcattgtgaaccctaccctgatcctgccgttgaacttggaggccccatcaacaaattaatcatacctaagttaaccaaaatgtaaatagccagtgcattcgggttgtactttgtcagcattaatccctttttcaagtgtaaaaaggtctgaaggtgcttgatatgataaacatggcttggtagtggctgctgactgggcaagtggggttgtgcatatgggcctggtcgcacatttctgctcacagatgatgttgaatagatagatgtctgctcacagatgaggttgaatagatagatgtctgctcacagatgttgttgaatagatagatgcatttgtccagctaatatagcgctagatgggggtagcgttggcctgcatgaatgaaggaaagttgtcgagtgaggagtgaccttcattgccattctgtgccgcaacaagtctccatgtgttatcagatggccctgtagataatacatatatttgtagatgtgttttgttcggtgaattgtgctgaccgctgagtaaaatgtattgtgaacgttgttgataaatgctattgtaatgaatttgcaacaagaaaaaattatatgctattgtagtgtatatcacaactctggttgctttttatttttatttttttaaaaaaagatctttc

SEQ ID NO: 30315 - DNA, 2219 bp, Zea Mays
gccaaaggggcctggtgcgactcgtcgaatttctcactccgatgtgctaacctagtgggatttctttctcctcaaatcacacgctgccgccggctgatcagatccagcgcctaacccggcggctccggcgacggtgagtcgccggcgtccatgacaccggccgcggcgtggtgcgcgcagcaccgcctccggttcctcctaccgtccctcttcctcgcgcccgtcctcttcttcctcctgtcgccgccgtcctctccgcccttcgtcagcctccccgcctccggcggtggttggtggagtggcgcccgtgcgggtggtggcggacggcgccattgcaagctccgtccaggaggaacgggtacatccgaatagattgctacggcggtctcaaccagctgcgacgtgatttatgtgacggaattggggttgcacgacttctgaacgcaacaatggttctacccaagtttgaggttgccgcctattggaatgaatctagtggctttgcagatgtttttgatgttgattacttcattgagcagactagaggatatgtggaagttgttaaggacttgcctgcagagatagcgtccagagaaccatttaaggttgactgcagtaaacggaaaggacattttgattacgttgaaacggtacttccagctctcttggagcatcaatacatctcattgacacctgccatgaatcaaagaagggatagaaaccccgcatatgcaaaagcttcatactgtcaaggctgttacagcgctctcaggttgaataagaatgtggaatccaaagctgttgagctcctccaagccataccaaaacccttcttatcccttcacctgagattcgaaccagatatggtcgcttacagtcggtgttcatacactggcctttcttccaaatcaatggactccattgaagctgcacgcagggagggtaggaaggtattgaccggtgacgctgcccgcctgtggaggaaccgtggcaagtgccctctgacaccaagcgaaacagcattcatcctccaggcgctaggcattcctacaaacacaaacatttatttagctgctggtgacgggctaatggaactcgagggtttcacgtccgtttacaagaacacgtacaccaaatcgtctctcctgacccatgaagctttcgagaacatgcatggcaacacaaaggctgctctcgactactatgtttcggtcaacagcgacgcctatgtcgccacattctttggaaatatggacaagatggtaactgcgatgagaacaatgcaaggtctccagaggacactggtcttgagcaggagggccttcgcaaactacactgccgctgggctagcagggcagcaactggctaaggctatgtgggacgctcatcgagaggagtatgtcagaggcagggggtcggctctgcccgagtactgcttttgtgagttcaaattgtagcgctagtggctaagtgatatgaggtttacctagacggacacctgttggcttggcgcaactgttagatctcgctgtgattgtgtagacatgaatgagctgttactgcaaacgagatttcagtcagatgagcttcaactgggtacagctgagagacattgatgtgttatgacctggccttctgtgcgagtcagctgcgctgtagtatctagaccaagtggaaatgctcttgtcatatcccataacagagatgcagttcaggtgctgccggacgtgaaacagtagtgtgtgtctgtgagctacaacacgcgggaaggttcgagtatgatgatccatcagccgagctaagaggaaaggggtacttaactggtttggaggacaagcgggcgacagttttggaaattctgttactcttctctaacaaactgtattcttctcccttccagtctcttcatctgttttcgttgtaattctgtatgctgttgaacttgtggagaaagaagaggaacaattttcttctgagatttgtgtgtgcgtttgcaccgttttatcactggtgatcctgtcagagctctctggttggcttcattggaattggctgcctttgggtttgggggacatgttctgccgcacacaccggccagaacattttccgacgtctgggtttttgccaaactctttgatttttttttattttagctcatccctccatcctaaaatagttgacatttctctgttctgaaatagtttttaatcttaccttct

SEQ ID NO: 30316 - DNA, 3877 bp, Zea Mays
gtgcaccctctgttccttgccgcacccaactcgcccccacccacgcgcttgtgatcaacgcgccgcgctcgttctccatacaatttccacttcagtcgaggccacctcctccccctttcggcacgcagccatgggcaaccgtgcgtcgcgccaccaccgccacgccaccgagcagcagccagagacgccgacccttcccaagccccagatccagccgccgccgccgccgacgcagacgcagcagtaccagcaggccccgccgccgccgaagccgaagccggcggcggacgcgagggcggtggggcgcgtgctggggcggcccatggaggacgtcaaggcgacctacaccttcggccgcgagctcgggcggggccagttcggggtcacctacctcgtcacgcaccgggagactgggcagcgcttcgcctgcaagtccatagccacgcggaagctcgtccaccgcgacgacatcgaggacgtgcgccgggaggtgcagatcatgcaccacctcaccggccaccggaacatcgtcgagctccggggagcctacgaggacaggcgctcggtcaacctcgctatggagctctgcgagggcggggagctcttcgaccgcatcattgccaggggccactacaccgagcgcgctgccgccgcgctttgccgggagatcgtcgccgtcgtccacagctgccactccatgggggtcttccaccgggacctcaagcccgagaacttcctgttcctcaataacaaggaggactccccgctcaaggccacggacttcggcctctccgtcttcttcaagcccgatgcggatgtggaattgacttgacccgattgcctggctggacggtttcagactcagcattactaaaatgagggtctatatatggaaatggcattattcagatatgtccatccttgctgcgtgttctgtatatatgaggcatccagattaactccaaaatatttgactctaaatttgttccaaaggcgacattgtgatggcgttgtagatttgcatcgtttattctttaggcactgcattgtttttgccattggtccttaattgaaggaagcataacagatcaaacttgtgtcaattgcttggtagacccaatgccacatgctcccatgtgagtaggtctgggaaagagataaactgaagcaagccttcattccacaaatgtggagatgctggtttaaccggtgacttggtcactcagtgagacaactctcaccactgcaccagccaccaggcctaccttctcatgtcaaatgcttgcattgcacaacaacaacaacaacatagcttttttgtcccaagctagtcgaggtaggctagatgaaacccacaataaacaaggataggaaaaaaggacaccgaaagggtaaaagaaagatgatataattaagagtaaatataaaaatatacaaagatcatggtttgggcaatcaaaacatggtttgggcacgttgattgctagtctccaagcgcacctatccttagctaattccttggagatattcactccttaagatctctcttaaccgcctcatcccaagtcaatttaggtcgatccctacctctttttacattatcgactcgctctaaaccccttttacgcatcgacgcctcaggaggtcttctttagacatgttcaaacatctcaaccgatgttgaatcaatttcttctcaattggtgccacctcgaccctatcccaaatatcttcgtttcgaactctatccctttttgtgtgcccacaaaactaatgttacatatgcatctctgctacactcaattgttggacatgtcgcatttttgtcggccaacattcagcactgtataacatcgccgtcctatagaacttacctttaagcttttgtggcaccctcttgtcacagaggacgctagaagcatgacaccatttcaactaaacggctgaaattctatgcataacatcttcatgaatgtcaccaatcaccatccttttgaagcatcgatcctatcgaaaagactccttagccacaagttttccattgagggtaacatctccattctcatgtctagtcgcgctgaaattgtacatcatgttctcgatcttagtcctactaagtctgaaaccttttgactccaacatgtgcttccacaactctagtttcctattaacaccttccctactctcatcaactaacaccacaccaaaggatatccccttgtatgtttcttgtgacctcatccatcaccaaagcaaataaataagggctcaatgctgatctttgatgtagtcctattttaattggaaagtcgctagtgtcgccatcacgtgttcggacaaatgcttgccttgcacaaaataggaaattacgtcgtgattttgtcgcataaaatgggatatttactttgcaaaatgttggtttcgtggtggatttcttgcggggtttagttttttctctatatattatccttttttgttttgaaccttaacaagtgaaatgatttgtttatttgcacactgacatgagcaaactgaatgagaatccataatggatgatgcaggggacacgtttaaggatcttgtgggaagtgcatattatgttgctcccgaggtattgaagcggcactatggggcagaggctgacatatggagtgctggggttattctttacatccttttatctggtgttcctcctttttgggcagatttggttaagaagatgctgcgacaagacccaaaagaacgcctgactgctgctgaaattttgaaccacccatggattagagaggatggagaggccccagataagccacttgacattacggtcatcagtagaatgaaacagttcagggcaatgaacaagctcaagaaagttgcattgaaggttgtggcagagaacttatcagatgaagagattatgggcctaaaagaaatgttcagatccctggatactgataacagtgggacaattactcttgaagagctaagatctggtttaccaaaacttggtactaaaatttctgaatcagaaatcaaacagttgatggaggcggctgatgttgatggaaatggtaccattgattacgcggagttcatatcagccacaatgcatttgaatagattggagaaggaagaccgtatactcaaagcttttgaatattttgataaggaccatagcgggtacataacagtagatgagttggaagaagctctgaagaagtatgatatgggagatgataaaacaataaaagagatcattgctgaagtagatacagatcatgatggaagaattaattaccaggagtttgttgccatgatgaggaacaatacccctgagattgttccaaaccggagacgcatgttctaactgtcatgtacaattttattgaatactttcaagaccaatatgcacccttagacataatcctggccccattttcttttgggaacaactgtaaggactcaatatttttttagatcaatttctctgcagccgggacatatttgtaccaaaataggtggtgttatagtgactcgtacttcgatgtttggagcatcatggactcatgggtggcaatgtttattcccattgtactcggagctctgctttttcagagtgttgccacttgtgaattgttctaatgtgttgtggtcttcgaaatcgttcatcgatcagatcaggcaatgccatattactcctgaataaatattagcagtatcgtggttctggattggccttggtgaaatgccgatccatccacgtagttcttttttgggtgaaaatgattagatgaccacccaaagaatcatgtctaggcacctattgtatcctctgcaaaaggttcgtatgtgtaattttgacttgggtttatttctt

SEQ ID NO: 30317 - DNA, 4573 bp, Zea Mays
cgccaaaagacaagaccataaagattactcatagattaaagtagggtttggacgtctgcctgtccatttcggcgtctgttcttagcggccgacaagcggaatctggatcaagtcccctgcttcaacccatcccctctcatcgattcattgccacaaggcagctgattgctcacagcgttggatgtgagaattggattcggacccaccgatcgatatgccgttcggccacacgcggctcgatgtccggcgtccgccgcagtcgtcctacctctgctgctccacaaccaccgtcgccgtattcgtcgcgctctgcctggtggctgtgtggatggcgtcgtccatgctcgtcacccctgccgagttccctccatttcagtccaaagtgcgtccactgaggcctcatgactctcctcctgccaccggaagcttaaccagtgctgatcagggcgatggcatcaccacccatgatgatccaccacctgctacacaacaattgcctcctgtaacagacagcatggatggtgaaaatcagcaacaagaacttttcactacagagcgcggaccatggtcaaccaaggctgaacaatctaacaaggacgctaaagagcaaaccttgacgtccagtagcccactgagcttccgttgggcgttatgcaacgtcgatgctggagcagattatattccatgcctcgacaacgtagcagctatcaagaagctccgttccaccaagcactacgaacaccgagaaaggcattgccccgagaaatctcctacctgccttgttcctctaccagagggctacaggaatccaattaggtggccaaagagcagagatcagatatggtacaataacgttcctcatactaagctggttgaatacaagggacaccaaaactgggttaaggtttctggagaatacctcaccttccccggaggcgggactcagtttaaacatggcaaagaaggatgtagcatggggaaaacgaagccgtgtagtgttagatgttggttgtggagtagctagctttggaggatatctatttgacagagatgtgattactatgtcatttgcacctaaagatgagcacgaagctcaggttcagtttgctcttgaaagaggaatacctgctatatcagctgtcatgggtacaaaaaggctcccatttcccagtagggtgtttgatgttgttcattgtgcacgatgtagggtaccgtggcatattgaaggcggtaaactcttgcttgaactggacagactgttacgtcctggtggttactttgtgtggtctgctacacccgtataccagaagctgcctgaagatgttgagatatggcaagccatgtctgctctaaccagttcaatgtgctggaaaatggtcaacaaagtaaaggatagggtgaatagagtgggtatagcaatttacagaaagccaacagacaacagctgctacgaagcaagatctgaaacaaaccctccactctgtggagagtacgacgatcctgatgctgcctggaacatatcgttgggggcttgtatgcataagttgcctgtagatcctaccgttcgtggttcacagtggcctgagttatggccattgagactggagaaaccaccttattggctgagaggttctgaggctggagtatatgggaaacctgccccggaggattttcaagcagactatgaacactggaagcgagtcgtgagcaattcatacatgaatggtttgggtattgactggtctactgttagaaatgttatggatatgaaagccgtatatgcagggttcgcagcagctttgcgcgatctcaaggtgtgggtcatgaatgtggttccaattgattcacctgacacgcttccaattatatatgagcgcgggctgtttggactgtaccatgactggtgtgagtcgtttagcacctatccgagaacttatgatcttgtgcacgccaaccatctgttctccaaggttaagaagaggtgcgagctattacctgttatcgtggaggtggaccgggtgttgaggccacaaggccggctaattgtcagagacaacattgaaacaacaagtgaggtggagaacattctgaaatctctccactgggaggtccgcatgtcttacttccaggagaaagaaggcttgctgttggtgcagaagacgacatggcggccaaatgaaactgaagctaagctatgatgcagagcccttgccccttggaaggaggaaaggaagatctagtgtttgcaaggtcctctacttttgtgaggcatcttttatttatgtagaatttgtagagctatatgattggtagatgtggaggaatctggtggtttccagcatatccatattcatctgtggaagtggaactggttatctgattccctttttttttttgattcatccattcggaaggggaaggtaacgataaatagaaaaggaattgagaattggcggaggtcaaaggcccaacacaacccaatccggaaccccaaccccacccccaccaccaagggtccaaagccatgcgtgccgccatggcggcggcggtcctccgacccacggccgccaccctccgcttcctctccaccccaccacaccagcgccgccgcgtcttggtcggacacctcccctttgctcgccgacgccgccactcctccaccgctacggccccagcgctggaggactccagcccccgcagtggcgaaggcaaggccgtgcgccgccgccgcgcccgtgaatctccccagggcctcctccgccaccagctcgacatgtgctcccgcaacgccgacctcaccaccgcgctccgcctctacgacgacgccctctccccggacaaccccatcccgctctccctccaccactacaactgcctgctctacctctgctccaacgccgccgctaccgactctgacagccatatctccgccaccgccgctcagcgcggcttcgacatcttcgccaggatggaggccgacggcgtccagcccaacgaggccaccctcaccagcgtcgcgcgcctcgccgccgccacccgcgaccctgccatggccttctccgtcgtccgccgcatggccgctgcgggcaccccgccgcgcctccgcacctacggccccgccctcttcgcctactgcgatgccaaagatgccgacggcgccaagcaggtcgaggctcacatggacgcatctggcgtcgtgcccgaggagcccgagctcgcagcgttgctccgcgtcaacgcggacacgggcaaggccgatgaggtttacaggctcctgcacaggacgcgcgtcctcgtcaggcaggtctgcgacaccactgcccaggtcgtcgaggcctggttccggtcggacgcagcgtcccaggcgggggtggacagctgggatcccaccaaggtaaaggagggcgtcgtcaagggcggcggcggctggcatggccagggatggcttggcaagggcgcatggagcgttggctggaccgagatgggcaaggatgggacatgccaacgctgtggggagaggcttgtctgcattgacattgatccagccgagactgacaactttgcaaattcgctcaccgaactggccattaagcttgaggccagggaagatttcctcagttttcagagctggctacgccgccatggaccattcgatgctgttatagacgctgctaatgtaggcctttacaaaagtaaagatttctgtttttcacaggttaactctgttgtaaatgctatacagagagtaactaaatcaaagaagttgccactgatcgttttgcataggagccgtgtaaatgttggtcctgcaaaagccccatacaaccagaagattctggacagttggaggaatgctggagctctgtatgcaacccctcctggctccaatgacgattggtattggctgtatgcagctgtcagttgccgatcgttgcttgttacaaatgatgagatgcgagaccacttgttccaactgcttggcactagttttttccctaggtggaaagaaaaacatcaggtcagactaactttctccgggcatggccctacccttcacttgccgcctccttattcaattgttattcaggaatctgaagatggaagctggcatgtaccaacaacaacaggcgatgatattgaaaagccacggcagtggttgtgcactactagaaaatctttgaggtagatgtgatttaattttggcccagtcaagttgacacagaatggtgccaagttgccaaccttggtgggaactgggaagggtggtggcgtgacaaaccctgaaaccagcaaagcttaaatgcagcaacttgttggcccgaacgaaagaaagctgattggagtacaagtgatgaatatgagcaggccatggatatggaaagccttttgttgtaacatcgtgagctgtttattgctagcccaggttattctagagtagtttgagaaccgtggtaaggtaatttgcttcatgtgagttttacttttattaaatgacgtgccatgccagtgatttgaaggatgtggcaggcaagtaatcaaagaaagagatgaatgttatctaatttgtcattag

SEQ ID NO: 30318 - DNA, 1913 bp, Zea Mays
gtaacactacagtggaagaggatccagagcccccagagccatgccaaacagggccttaatgctatatatgataaagatgctgatcaattgagcagtgggagtgatagtggtggaagcagaagtcgtggtatgcagaactctgaacttgctggaggtcttgaaatatttgttgatgacttgcctcaagattgtgtcaaggaagacattgctatggccttttctcaatcaggggaggtcaaatctgttaggataattaaaaattcatcaactggaaagaaccaagacattgcatttgtttgttacacaagtattgaagctgcaaagaaggttcttgctgaatttaaggagggaattgaggtaaaaggaaaaatggtcagggtatctgcttgtcaagataataataccctttacctggggaacatttgcaagggttggaccagagatcaggtgttgaacaccctaaaaagtattggaattcaagagtgtgagataagctttcccagttacaagggaggaagccgagggtttgcttttcttaagttcacctcacattactatgctagagcagcacttcgtcgcttaatgaaatccgatgctatttttggtactgatagaagcgctaaagtatccttttatcgaacccccacaaaatcatccaagagacttatacaggaagggtgcgttagcttgtgtgacaggaataaacaaagcaaatattgttgatggaagcttcaagttgtgtgcatatcttgcttggccaaaaagtgcttcaaaggtcaatagtgctgcaccttcaaatgctgccaccgcaaccgagaaggacaaaacccacacagagaagattcttgtagacatcgatttgcaacataaattccagaaaggcgacaagagcaaacttacatctcagacaaaggaggcaattatgaagaagaaaaaatcaagtaaattaccaaatgacaatgatacaaaactaacctcacaaggtgctgccgaagtaccacaaacctccaaatcttctgaaggcaagaggaaagttggaaaaaacaaacatgcctctgtataccaaaaaccattgaagaaagcaataaataatcgtaacgttgatgagagccagctaactcatcggagtgctgcagtactgcaaacgtctaacacttccaaagggaaaaggaaagccagtgagaacagaagtttatatttaaacgaaaaggctctcaagaaagcacgtggcaatagtaatttgggtggaagttcaagatctaaatcatatgcctctgatctggaacctcatgctggattcatttcgcctgcgattcgagataatggcagtgatgcatataatcgacagagaactgcacggtatgatatccatcctatagatgtccatccttatgctagagcgccaccatcagcctactctggttacaaaagccatgctggctatgaggctgcaaatacatatgaatacgcagggaaccgggcgcctacacctccaagtggatcttacatccctcgaagaggacattactaacaaaaaatggagtgctggctctgtgcatccattcgatcgcatggtaacaaggaatcaaggatctccgtatttagatgtttcatacatgttatgtagacgttaaaaagtaacttgtttaaggaaaataagaaccctctgcagctttccctttgactgaagtgcagcccggcacaccggttgcttgttgaagaatgctttttttattattattgtagttaagagtccagacgtcgttattaccacttatcttcgtattggaaaaaaaatgtctttttcttagtccagcaatccactaatagcttctatgtttttttgtgctcagcaatatcttatttgcttttttaagacaaacatgccgtgcgtctcaacaggagaaaaaaat

SEQ ID NO: 30319 - DNA, 3057 bp, Zea Mays
gggccggcgtcgagtggagatccaatcgaaaatcgaactgacttcatcttctgttggtcaacaggagagcccgttgaaatcctggacctctcaattgtccttttctctctccccgcccaccttcccctgttctgccgcctccccagtccggcgtgcatcagcagcgacatcagagtcggcgatgggaggcgtcatcgacgttctcgtccccttatgttgatgaagtggtgtgccgtggagattccttgaccgatttcttgccggtaagacggagtctgccatctgcgtggctggtcatcgcggtgagcaaggaacgacgaagtgcgcccctccgcccttcggctcgtcgttgtgccttgcgtcgtcgggtggagttccttcccctgcttcaagctaattcggtttttccctctcatcctgtcagttttctctttgttggcattttcggttctctgctgtgaggttttttaaggtgattttgttcgcatctgtgatttgtgtctctgtgttcatcgtttgatgagggattcgatgccaaattcatttgaatcgattacaggaaatcatgcaaaaaatcaaacacatacctgtagaattgcgttggattggattccaaaaaataatgaaggaaaaaggaaaaacaaatctgatccgattttgtggcctgcatgcttactaacttcgtttttaagaggctccaggaaaatgtaattttgggtagggtttgtcaagcggtggtgcctgaatgtatcttctcctgtcacctccctcctttcacattagagttattgggtctacctttactgggtctactcctggatcctgctctatttaattatccttttttgtgccaaagcagccaaaccgccaatcaccacaaattgtagattaatgtttccagcattagcttgctgctcctggttccatacctgcaatcagttgcaaatacaccatgttttgtactaccccctcccccaattaaactttataattaaatgaaaaagtgtaggagtttgcctagtgaccacaaagcattttttggtgcattggaatcttgtgtatgcttgaatttaaaattatgaattcaaatgttgttgaattacatgcaggacccataaactttgaattattatgatgtgaaaaatgatttataatacagtatgtgcacaagtgtagatagatataagaaaatgaaatataggggaagggatcattggtagtgtcaccctaaagtgctggaaaagttttaaggtgcttcccatagaacaacttcttgggggagcactattggtatggaattgctcttattcagtttttttggggtttctgaggatcctccatgtcccctagattattgacctcactttgttctttgtatcgatttattgttgtaggcagttataatagtaggaggtatgcgtgctttgtagaatcatacagatgcttgttgaacatgtgtctttgtttctgtgtctgtgtcaacaagatgttctagcatcaacaagatcctgattagcatgtcaacttccagacaaaaagagtagagcagcaaaatggagaaccatggaaaattggatgggtgggatgaagttctggaagaagaagatgagttagcgagtggggcaaaagtgtaaagaagcctagattctcattacgaggatatgattttgttccattagatgttaagactgataacttgtgcattggggagcaagatggttcttctgcagtgccatcaactaaagcttcacaaaccatggtggctgaacggttggaaaacgttgaggaacaaactgaagatttggcaccagagtttgcccttccacccaaagcaaatactttagtttctgagctgctagataatttacagcgtaggggtggttcttttgtcaggacaccatctttgttgcaccaacatgctccaagcatatcaatcagggagcaggaagtttcatccggagtgccaccaactaaagcttcacaagctttgatggatgaaccgtttgaaaatgacaatggacaaactgaagagttgccatcagagctcccctgctcgatcaagagaccaaaattttcagttgcagaacttctagaagacctacagggtagaagtggttcttatgttgagacagcatctttgtcacaccaacacaccagagctaaacattggaagccaaagttcctttcttccgagaagaaaacaatagctattctaggagacaggagtattgacagtgaggaccccttggagcatgtaattgacggaacatctagcgaggaggaagatgctactcaaaaccacttgagtttggtgaacaaagatgagaaccagcaaactatggctgacctatttcaagaagtttttaatccaacaaacatggatggtgccatgaaatcaatgagatcaacaggagctggtaactatggaagaatgcaacagattatgcacatggagaaagattggcatgtggaattctcgaggcagtatagcagagagcacagttattcaggtgatttaaagggaactactgttcagattatgtcaaggtcattggaaggaaagctaacagtctgcagctgcatgttccaggaaaagggcaatgatgccactataagtaatgcctcagcagacggcaccatggatgaaagcagaactaggaggactattatcttcagtccaaagatatgtaacaatgtagatcttctggttggaaacataattcatatcttcccaccatggaaggaagttaaaatacaagaagagcatgtgattatttgcacctacttctcgcaccaccaccggacttgatactcggagatatttctgtgctagctgcaaagctagaggcagaccgccagcataaccgttgctgacagtttaatgttgatgtactcgcagggtctattctgtttgttttgtaatcacaagtgtactggctgcaaagctataggcagaccgcaagcataaccgttcctgatagcctaatgctgatgtacttgcagtctctcttctgttttacaatcacaagttactgaggcctagttcggattctctaa

SEQ ID NO: 30320 - DNA, 642 bp, Zea Mays
cccgcacccgcactcgggctctcgaaaagcagggaaaaagaattctccatttccccactcgccctcgctccctccctctcccgctcccgctcgccagtgggagtgtgcggggctagcagctagggtttccgcgagcacaccgccggccagccgcgggcgatctcgggttcgcgggggcgcccgccccgactcgggttcgcgggggcgcggacatgaagtcgtcgctgcggaagctgcggggcttcgcgctgcagcgccacgagcagcgggtggaccgggaccgcggccgcggccactccaccacggcggcggaggagctcctcgctgctgcccaggatatgacagatatgaggagctgttacgataacttgctttctgttgctgcagcaattgcaaatagtgcatacgagttctctgaagcacttcaagacatgggggcttgtttgcttaaaagaattacaccaaataaagatggaatcaatgataaagttttgctgttgcttgggaaatcacaatttgaacttcggaaacttgtagatagttatcgtgtgcatgttcttaatacgatcaccactccatcactgtcgcttcttaatgagcttcaaaccgtggagcaccttttcatcttgcctgccatgggcg

SEQ ID NO: 30321 - DNA, 3492 bp, Zea Mays
aaattatggaccgttctgggccgactcatgtggtcctagtcctgagtcctagtcctgtcatcctgtgcagctgcccgtagccttatctgctttcgttcgaccaggtgtcgttcgctttgccttgccccggcaaagcaatggcgctccgtctctctgctccgttcctcacctcgcgctttacgccgtcgcaagcgttggccccgcgcaggcgcacccgggcccgctctttctctccgtcagccgatgcgcgagccgcgtgcttcaagagaccctacacgtccgttctaattatccccacgggcgtcggcgcggccgtcgggggcttcgccggcgacgcccttccggttgcgcgagccgtcgccggcgtcgctgactgtgtcatatcccacccaaacgtgctgaacgctgcgatgctatactggccgatgcccaatacactttacgtggaagggtacgcccttgacaggttcgcagaaggatcctgggctctccaacctgttcaccagaacaaggtaggtttggtgctggattctggaatcgaggaagacctccggctgcgccacttgcagattgcagatgccactagggcttctcttggcttgcctgtagtggagtacattgttacagatgctcctctggagatcaagacatggtttgatcccaggtgtgggaagtcaacagggagtgttggtaactctgattctcttctgagagcagttgacgcactagtgaaacattcagatgtgaatgctgtggctgtagttgcacgctttccagatgatgacccagaagattcagattgttaccgggaaggaaagggtgttgatctattggcaggagttgaagcaattatcagtcatttagttgtgaaagaattcaaaatcccttctgcacatgctcctgcagtgttacccccaccactcagcccattagtatgccctagatctgctgctgaagaggtatatgtctatcgttgtgtaacaacatcagggtacacgtacacagagtactagaaagagagaattaggagatagcatggcacaattcggtggtcatgttgaacctgatcacgagtgagagtcaacatgcggttagttagagaggtttaggctgcagtgtacgtccccttgcatcaattgatgagcacaaaggagaaaaaaattacaagctcaaacaccagtgagtatcaagaccttctagctcctcctcacctcctaattgtggtggtagcctaatggttctaatccccctttatgcctgcctgtgctgtagaatgaattctatcgacttttgatagatttgggtcaacccttttctccgttggaattcccttaaatgtagctcactccctcttgcaagggggagagaggttacatgaacatcggattctatcggctaagacccaactaccttgttcttatcatgttcttggagccataccagggctcatgtcccgaatgtggcatagtgtgagaggtgtcctttcttcaggcggttgccatacctaccatgtcgtgtcctctggcgtcggggtccataggtacaatttagctggtaaccggggcaaccttttatacttgatagtgatttatgggcccgtcgggctccccccccttgtgggggaggcttgagggtttggtcttggtgttgtaattcggaccactttggacctttcctttcttaatttaatgatgcgtagctctcctgcgctttcgaaaaaaaatacttgatagtgatttatggtacacttcacgtgtgcacgcttggctataggatcgatgcacatacaattagtgatcttgaccgtactgcatcctaagtcgtggcaatagcacaaatgtcaggtttgtagtggtgtccatcatatattcaatgtgttgtacctgagacttatccattaagctttcgctatggacttatcttcaagtccttagtcatgggacccatttctaggggttgtattgtcttcggtgggcctagacacatccttctaccatgagacaatattgcacttagacatgtcgtgttctttgtcttctcggtgcactgggctttgaaaggcttagacctggtcacctccactaggcaaggctagggtgcttaaggacctccggtctagcgagggtccacaacgctcaagtaccaatgtgtgttttggggcccggaccgccctggacacttatctttcataatgccctggggtgtgaggggcctcgggaacttaggcttattctcatgaataccctaggacctgaggggccaaagggcttattctcatgagcgccttgggcacgagaggccctaggggctttaaactgataactaccccttcggggcacaaggtttccaagggctgatattatttcttctctaggattttctcagggcactacgtgcctcgggcccttcgatcggcccggaggccagtgcgccctaggtctctttgtgactttacaagtcttagcgcgtagttatccattcggggtgctctgatgtaaaatctcctgaagctcctcctctggccagggctaagggaggtctccgaggtgcggtggtcctatcttagtgggtcccgcgacaactttctgtactgggatcattgaatgcatcttagcagctgctgcagattggacatacatttctgccttgtgtgcttgctgggttaagcaatgctccacaatatgtcatgaggagcggaaccttggaccatggttgcatagtggctggtgatgttgacagtgttattcttcccaaggactcctgtggaggagatggtacacttgcttttgctcgagctgcaagaaaggacaagcccttaatcattaccgtgcaggaaaatgagacagtgcttgatgatactccagacaagttcggcatagaagtgctgaatgtccgaaactactgggaagcaattggagtcatcgctgctcacaaagcaggtgtcaatccacatgctcttagaagacgagggattgatcatcttaagagccctcaacgatcatattctgcctactctgcaagtcctaaaccatctgcccgtcctccagtgcacgataaagtacagagacagcagctagttaggcaaatttagtactaaaaagagcactagcagcagtagaaattactttagatagtcgtgattaggaacttccaaaattttgaagcccagatacatatttttcagaccgtcctgaagtgtaggaccatagcatcacacgaattttgtcgtgttatccagtctggacttcgctgacatgagtctttctccactgccttacatttctccaatctctagtcggtttgtcaatcatttacatcattattttgccaaggtatacacagcgctggtaatcattttcgtccgacaatattttagtaagttgggtagaagcagtagtactgttttgtttcccactgaacatgaaagtttatgctgaaatgccaagctgttatggcctggtttaggtgccgttcgtttattcgggaatggag

SEQ ID NO: 30322 - DNA, 1865 bp, Zea Mays
ttccccctcttcctcctccccctcgcctccgtccccatcccgattgcatggtccatttggttgcacggaacggcgtctcctccatcggtccgaccaccgcgcgggcggcaacaccgacttttgcatcggtttccccagatcctggatgacaagcttagccccaagtgtttggatgtgctgctgctgccatcaactgccgtgatgtttcggtgaagtttggtcggtcattcgacaggattccccatcctgatgcagccttggaggaatctataagtgaggtgtgggaccaaagccttcagcggaacccatatctatacagcggtacaaagtttcgggtatgtatttttagctctaccttggtatgctcgtttttttctgctccgttgatacttgaagtcctgaagatgctacaatttactggtaaacacgtatttaactaaagaaaactggaagcttcttgcatgttaagtgatttggtgcatgctttatagaaagacaatctctctgtatatgtatctgttctactgcattcaccagcaggtagtagaatgtaaatactgacaacaatcaagaatttcagtatggaggaaatgccttgcactacaaagatgactcagatcatgatcttgagtactgtgtctcacttcatttgggtctcacagactacaggacatttgtgggaacaaatctcaatccattgtgggaattttttttggttccatctgaagatgattctgtacattgccaacacttgtcagatgcactgggaaatggtgctatagttgaaacatctgacaaaaagattattgtattgcaaaggagctacaatgtggcggactatccaggatactatgttttccctggaggacactcggagccgcaagaaattggaatcatgggtcatcaaactgatgaagaagactttgctagtctcactgaacgagtttcacaagaaatgtttgacggagtcatccgtgaagtggttgaggaaactggagttcctgctagctccctaactgatcctgtcttcattggagtttcccgccgagaagttaacgttaggccgactgcgttcttttttacaaaatgtaacattgattccagtggcgtaagcgagctttattctagagctcaagatggctatgaatctactaaactctacacagtatccgttgaagagctacaaggaatgaggcagcggatgcctggatgccacaacggtggtattgctctgtatgagttgatgaggaatgctgcaaaaaaaagtgaagatgtcattgatgaatagttctgatggtgttattacaccacaaacaagtgtggaggtattcgcatctcgtacaaacacccgtgcagaacactgcatgtgacatccatcagattgctgttctttgcagtagatatgtgccatttccatgtttgttgagcctgacataggtctccttagaccgctgcataagtgcccacaaagagcatgaagcttaaagtttcctctgaatactaccggaataaatttcatctccggatgtaccaccaaaggaggcacaccagagcggcatcatgatgctaatctacatggtgagatgacccgtggattgtaatgttctttcaggattgaatttcctgggcaagtgatgcctgaatctgtcagctgttcttctgttggtttctgctgtagcggtgtactaggagtatgtaggaaccgaaggtgaagcttacattactttgctctgagaacgtttatatacttgttacctttggtatggatatactagttcgtgctagggtatggattctacatatttcatcttgacttttatcgcttcacacaattgccatcttggtgaattcgagtatagcctgtg

SEQ ID NO: 30323 - DNA, 2139 bp, Zea Mays
gaacggacggaaaattgacgacctctcccgttccggcggccgaccgtgcacgatcgtctgcctgccctgctcacccacttgccgtcgcaccggctccgttccttctgccccactaccgccatcccaaccggcaagcgcgccaccgccttctccaccctcgcccaccttgctgccgcagtcgcccataccgctaccgcgcccacgcccgcctcgagggcccgacgccagaggggctgccctcgatctgaccccacggggtaggatggacaaagggaaatcggtggtggccgagctggcggcgtcgttcagcgatgtccgtgtcacgccgcgccagaaccccaagaccaagagcttcctaccgtcgccctccttctattcttcctcgaagaaaggtaaacctcagaaattggtcagcttgtgccttggcacccttggtcagcatcttgaagatatcatcactgatatttcagaatttgctgccttatttccaccccacataaagttgacaattatgtctattgcaaggaggaggaggctcctgaatgatgaagttttgacttctcttgctgaaagttcctgggaaatcctagatatatctggatctgatgtaactgatgctggtttggctactgtagcgaatgtttgtagtaatttacgagcagttgatattagtcgctgtgaaaaagttactacttctggtgtgtctgagattgtatgccactgcccgtccttggagatattgagataggctgtccaagaagtgaagtaacggcacggaggtgcttggatctcttgaaacccaaattgaataatcttgaagaggactcatgggaggaacttaatacactagatataggaggtggtgcggaatccttaaaatggcttgtttggccgaagatagatgataactcaaaggagactttagctgctgaatgccctcgtgttactgtcaacccacagccatcgctgtttgacctctcaggatccaaagtcccagttgaagcactggcaagcgtaccgctggaccattccatagttgaggatattgatcccaagacatgggctgtttctgctgctcctcgaagacctgttgctcctcccaatccaaatgctccccctgaaataccgatagcggaaaggttcaggctggcctatgtggagagggaagcaaggctggcacccaagagggccaaacgggaaaggcagcagcggcgccgagctgaaagggactacatgatgaatgacatcgacgcgaggtcgatggcacttgctgctcaagcaagcagaaacctgcgcaagagctgatagcgaactttgcttggcttggcttggcttcttgtttatgctgtttgttgtatgcatatctcaatagttgtcaaacacaatgtaaacatagcagttttgtattgggctatagcagtggcgtttacactttcatgtactactacaaaaaagtctaaatgtgaatacactcggtgcaaggaaagcgtgccttcattgggtcgcgatgaattagattatattcgtatcctgcttgtctgcatatcatattatatcctgaagtgcctactgtcggattagcgtctttggttgtgtgggcgtgtcacctggataggctgagcgcatgcaaaatagaacaagcctaactcatttttagaattaagtactccgtctcaaattaatattcatttttacccttttagtagatttatatattaatgtatatgttctatatatgtttaccttcgttatcattcatataaatatagacatactatattagaacggagggagtatttaataagacttgttgtaacttaacccattgttacaatagctagagccgatcaaactaaaaaaatagcgtcgctgatttttagtttcatttagaaatattatataaaatattagtcgttttaactctttatttatgttatgtttaaatggatgataaatctagacacatatataaaacaaatatattaattattgtatgaatcaactaaaaaggtaaaacgaattttattttaggacgtagagagtgcattaattcttatttttgcttttgcttttatcccctccgtcttagaaagatatttataattagattatgaaatagtaatgttccacatgtgtaag

SEQ ID NO: 30324 - DNA, 3108 bp, Zea Mays
ctcgcttccccagacccctcaccggcgggcgtagctagcgtacgtccatccatccgtccatgctccaccgccaccagcccgccgttccgacaagctccaatcatacgcaccaccggaccaccctcggcaaggagggacaagctcacgcgcctcgcgccctgcccggcccgacctcgagcagatcgacacatgcacgcacgacgtagacgatacacaacagtacgcgggggcgcactgacacacgcccgcactatcatccctgtcccccgtccgtccatctccccactcgtgcgagttgcgaatttgcgatgcgccgcctgagcagaagctccaaagcctcatgatggcagcacgggccagagccagcactcgcagcagctgatccgagctcgtacaggcgcgccaggcagcacatcaatgggtacgccactctgttcttcgatgccagcgagcacttggctgcttcttcttcttctaccttttcctttgggtctcccggtccacgatacctcgaggctagtcttgcccgctggtgccgacgttcgttggggcagctctgtggtccatagaactctgtgttccttggtctctgcgaaagctgtttccttcttcggagtatctctttgcaaatcaagcacattttaaatcttggacaaccccactgcaaatttcggggccacctttttcgcgcattttcgagacgatcatcgttggttcgttgctctggactctggtctgttcaaaggcgagactggggacgaatcttggttcccaaatcccaatggcgctctgtgtgcgtctgtgtgtgtgatggacatggtcacatccaccctcttctgctcgccagttcttgctccactcgccggaccctgcttcttattccttcttttaaagctgcatcgattccatcctttacctcttttgctttcgcctagtttctctttccctttcgatcggtttgatgtgacagtcttgtcatcataggcacaccactccttgaccgcatcagtgaccggtgggactgagcactgactgcagtcgcgttgctctgcgcttcttcctggctggtgtcggcgaacagcaggaggaggaggcgagaagaatcttgggagcttagcttgcaatgccgaggctgtattcggaggaaggagcaggtgctgacgaggctaccgccgctgcgacagtgaggctggccaacaagatccggaagcgccgcgcggtgtcgtcgtcggggggctcggacccggcggcggtggggaggaggctgcggtccaggcggcccgcggtgcggctgccgcggcaccggaccagcgcgggcggggacatgtcggagtcgtcccggagccggcattgccgtggcagcggcaaccgtgtcgccgaagggacgctgccgtccgcgtctgcgaggaggctcgtcgacgcgttctggcagaacatgggcagcggtggtctgcttgacggggacgcggcggcggcgcgccggagcctggtcctgtggagcggcgcctccacgaaggtgtccaagaggtcgagaagtaagagcaaggtcttggaggctgatggtaagggaagtcggcgcaacggccatcctcggtggttttcagcagatctgatgagtaacggtagtgcaatggaggttggtaccttttctcaagacgatgtttcaagatgtcctgaaaagacagtgaacctagatgatctgcagaacagcttgattgcagctaaggagctggtaaaagtacttgcccacatatggggacctggagagctgaatccgtcaagtgcatcactcatttctgctctacgttcagagcttgatgttgcccgttctcatgttagaaagctaatcaaagaacagaaatctgatgcctttgaaattgaggacttaaagttgcaacttacagaagaattggaatcgtggaaggtcaaacaaaaggagaaggttggaaatgctctccgatttgtagtttcagagctagacactgagaagaagtcaaggaaaagagcagagaagacaaataagaagttgagcattgccttagcaaacactgaagcctctttgcaggcagtgacgaaagaacttgaaagggagaggaagtataaaagaagagttgagaagatctgcaacgagcttatcagaggcattgatgaggacaaagctgaggtgcaggcactgaagagggaaactgagaaggcacaagaagagctccagaaagagcgtgaaatgcttcaacttgcagatgagtggcgtgaacaaagggttcagatgaagcttttagaagcacgggttcaatttgaggagaaaaatgcagctgttaatcagctgcgcgatgaactccaagcttatctggatactaagaaagagcaggaaccgttgaatgatccaatggaactgtcccatgcatctgaaattggcaacactgcagctgatttagttcctgacagaaatggtggaaacatcagcgaagacgcctcagaaggcagtgatatacactccattgagctaaacgtcgatggcatcaacaggacctacacctggagctacactccttcctcaaaaggcaggcagaggagcccatcaaggcatgaaccgttttcggatagagggatggatggagtgaactcgtggcgtttagagcaaagttttcgggacatggatgaagaactggagggagactgggcagaagggtgcagcaacggaatgctgaacttggatcatgacgaggagaggtatctggctatcaagaatctgagagagcagatgttggccgggtcggggttcatcctgtcacaaggtagagaaaatgctaaaagagagtattgtggcttgtaagataaactgaacaagaaaaattaaaagtaatgtgccgtatgaatcgctgcttgatgctagatccaactgttcaaggatatatatagtgatggttctctgtggattactttccccttgtaaatatcttgagctcttgaaaggttaggttacagggctggtgtgttcatgttcatgattctgatgtcttgtatgtgtgttaatgtccatttaagtgtctggaaatagtttataaaacgtgattggaaatataacacaaaaagaaaacattggtatga

SEQ ID NO: 30325 - DNA, 5897 bp, Zea Mays
atggcctcacccacggtcgcctccccgatccgggcgagccccgtcgacaaccccaccgtcgcgccctcactggcctcctgccgctgcgccttatcgctagatgctcgacatccccatccgcgcgctcgaggcagaggccagggacaccaagatgagcccgaccgcgaccgcctagccatcagctccaaagaagaagccaggggaccgatggacgtcagtgttccgtcgtggtggcccgctagatccatattcagcaagaaagatatctcgccatgccggcccagggccgcagcccgtcaccttcctccccccgcacccgccgtgacagccgcctccccacgcccgcttacccgactggccgcacaagatgcccacagtggcccccatcgcgcccacccgctccccccatccaccgcgacctcagccgccacgccgacgccatccccgtcctctagcgcgttgtcgccgtcgtcacaccgccaaaggtgcctgccccctgctaccgaggtcgacgaccagcagcggcaagctgccgagctcgacgacacgcacgccatgcttggccatatggacgagtccatcgcctgctacgagaaggggctccagatccagatgtccgcgctcgatgagcgcaatccctgcctccctgagacctgcaggtgattgacaaggtttaggaggaaacttccaaaagccggtcaagtatggagtgcttaacatcactttggcaacttatatttttttacatgtttgctttgtttgttaacaacataatttatgggctgacaatgtgatcatgtattctttctggtagtcttcgtgtcactgcttgcagttgcaggggagggatcatggctttcttttattttccatgtgcaatgtttaatttaggtgatgaactccaaagcttatcccattgttttctagcaagagctaagcaatactggatggagaacatttatctttttaataacgagtaaaagcataatggcatgcttgtgtttagttctctgtttgttgaccaatcgctatatttaatcttgattttttttatctataacttgaatttcaaagattcaatattttttattcagacattttctcttctctagatattcttttatgcaaataacgcggttacactagatcagccaacattctgggaaataagctatatggtcagagtaagaggttcaagagttgatagttcaacaactttaactgagagcaaatctacaagaaaaaggaaacaagcaacctggaacctacaactgcaggagcttgcttgaaagtgaacaatcaaggttgtgtgtatatattatgcccgacatttttgaaggatattgcgagggccattgtatctgctggaaaaatcatttcaacttgtcgaacatggtattaggatacgaattggagtggtcaacagaaattctggacagatatgtcaaatttcagaatccacgatggtcctccaagaaataaagatgctcttgatcatctattgagaagtggaatactaattttttgctgcagcgtgatggataaaggtttttgcgtattcttgggtttttttcctttcctttttggctacacacaactctttttaaatatacattcagtaggtggcaatgcctcctatttccctaaaaatatagcgccaaagagttcaaaattgaattctcataatctgctattaggaaaagaggtcaacttctatattttttacatcaggtaatttggctataatacaacggcatgctgaggtcaacttctgtatttttttctgcaagtaacttggctataatacagcggcatgctccattctgaagctggtcaagaaataaatatagcacttgcaatattttccagtagtcaaacctctccattacttcaattctcgttctcatttttgactatgttcttcatgtcagttcaacataataattaagaggtcgcttgcccctgagacggcttcatgatccatcgaagatggcgcttaatctcgagagctagggagatgaaatgccttttgtacatgatggaaggaaacaaattacgtacatgtatatgtggatcgaattgactgttgcattctgcctgtatttaagcaacggtttccacccaaaacgtctataatttggtccttcctagatgtgtcaaatgtgtttactgcactgcgtttgcttttgtggcagcgccctaatagttgtttataaagtctgatgttaacaaactattgtcatgctatgtaatatatagtcttaacatgttggtttgttgagtgttcgaatatcagttttatattattatgtcaggtgttattagtgttcaattttttaagttcttgttgtacatcctatcattacatgagacaatgttgtgatgtttacaatattgtgttatgtatgttatatcattttggtattatagtataatttaatttgtatcagtttagttctgtattggttgttgccaaaaaaaattatgagatattaaggtcgataataatgttcgtttttatataatcgttttgcactaatattttgttaatttttttgtataccgttgcaacgcacgggcacctaactagtatgagactatgagtacatcaagtgcattcccttagaactcttgttgtgtaaaaaaatgtgtaacatgtcttggtacagagattaatttggtttgtgttttttagactgcaattatatctgggttctcagccttgccatggttagtcaagcccctctatgattttatcaggtttcaccaaaatactgaatagccttcctatcatccctttctttctgtatatgatatatgcatttaattgcaatgatgtactgttgctatttccgtacacagttgattcaggtggttgattatatggtggttcagagagctcgaggtgaatcacagagtacatatagatctctccactccagtcactatgttgggaatcctcagcctttggaggaatcatgagtgcatacttcagtggttctccagtcacttatggcgtaagatttgtctttggtgttacagcacttttgccactgttccgagtagcagagaaggacaactctggcaaactgtgaagaaaataaaagattttcacaagcggaatcttcagaatctgaataaaggagttcgtgggaatcagttgtaccaaaaactggttcagttttcgtattccaagcatactactggaagttcacactgatcggcgacaaactctcgcccaaggagaagttgaaggaggatcagcgtgaacacccactgaaagagagatggagttgaatgagaaatctgaaaagaatacgcaagaggtagatgagaagttccaaaacacaaacttgtatctcaagaacttagagatggagcttcgggagttacaagtgcttcataagcaatcagatagatctgaaagttttactgtgccaacacatgcacacactggtggtgcctgcatctagctattcagatcaaagcctgacaggtaccatagggcaaagtgaagaagaaacagaagagttgagcaagatcacgctagagaataaggatattcagcttgatatcaatataagagaagaatcttggagctcttcacaacaagtgaacttttacacagaaagtaccagctccagtgaggcttgtttgatggagccgaccctatggagctgcatgtttatgattttaaaggacctggtgtaaccttatcaatgtacaatagcgatgagtttattaggccttttgctaagtcctccatggatatggctctttcaaaaaagtcgtctcttcatctcagcaccaagaatacaatcatcaagaagtatgacgacaggcatggatcatctatgtttctacaagctcgcggtcacatttattaggccttttgctaagttcatggatatggctctttcaaaaaagtcgtctcttcatctcagcaccaagaatacaatcatcaagaagtatgacgacatgcatggatcatctatgtttctacaagctcgcgttacaatggaatgctaagagacaaatagttaaagaactgctttaacctaccttgatggagaggggagaatgcatcgtgttagcaagggagcaccagagcaggtgatcaacttgctattgggaaagaaactgcacgtcgtttgggaatgggtactaatatgtacccttcctctgctttactcagacagaataaggatgagtcaattgcttccttgccaattgatgaattgatcgagaaggctgatggctttgctggtgtctttccagaacacaagtatgagatcgtgaaaggcttgcaagcaagaaaacatatatgtggcatgactggggatggtgtaaatgatgccccagctttgaagaaggctgatattggtattgcagtagcagactctactgatgcaactcgtagtgcttctgacattgtcctaactgaacctggccttagtgtgattattagtgctgtgctgacgagtcgggcaattttccaaaggatgaagaattacacgatctatgctgtatcgattaccatccgtattgtgcttggttttatgcttcttgcgctgatatggaagtttgacttcccaccatttatggtcctgatcattgccatcctcaatgacggtaccattatgactatctcgaaggacagagtaaaaccatctccacaaccagacagttggaagttagctgagatttttgcaactggagtagttcttggtggttatttggccatgatgactgtcattttcttctgggctgcatacaagactgactttttcccgcggctgttccacgtcgaaagcctcgagaagaccgcccaggatgactttcagaagttcgcctctgccgtgtaccttcaagtcagcacggtcagtcaggcccttatcttcgtgacacggtcgcgcagctggtcgtttgtggagcgtcctgggttcttgctggtcttcgctttcttggtggctaagctgattgccactctgatcgctgtatatgccaactgggcgttcactgcgatcaagggcattggatggggctgggccggtgtcatctggctctataacatcgtcttctacttcccgctggacatcatcaagttcctcatccgctatgcgctgagtgggagggcatggaacctcgtccttgagcagaggattgcgttcacgagcaagaagaatttcggcacggaagaaagggagcgcaagtgggcgcatgcgcagaggactctccatgggctccagccgccagaagcatccatcttcgagaacaagacgacattcaatgagctgaaccagctcgcggaagaggcccgcaggagagccgagatggcgaggttgcgagaagtgagcaccctgaaggggaggatggagtcagtggtgaagcagaagggtctggacatctagaccatccagcagtcctacactgtgtgactgactgactgacgacgacggggtttatagaggtttcttcttatactatacaatctgtactaggtagcaataaggatcaaggaaggaacccctatatattggctgcggttcgcaggaaatgaatgatggtaatatttatgatgtcggtgtggtgcttctgtcgccaactctcgaccatactaccctcaactcacccccggcaccaccggcaggcattgatattcagagatgaggtatagtagtctgtagcctctagtagatgctgatgaattgatgatatagtacatttttgcttgctttcttgcttgtttgttgttttccttggttctgctctgggtgttttgatgcttgctggctttgtgctattcctgattcctctaaatctgaagtggtagcagcgatggcataatagctgcacaggcatgtatatgccatgagcatgtgcagtgtttaccgttg

SEQ ID NO: 30326 - DNA, 1688 bp, Zea Mays
ggagccacatttccgaagagccgagagattccaaagtccctgaagttgttactcgggttgaagggctgttggctgattctgatcttggttctggttcagagatatttgatgtaattgtatgtggcggcacattaggtatatttgtagctactgctctcagttctaaaggccttcggattggaattatcgaaagaaacataatcaaagggagggaacaggagtggaatatttcaagaaaggagcttatggaaattgtagagattggtattctttcagaagcagaacttgaacaaataatttcaagtgatttcaatcctaatagatgtggatttgaagataaaggtgaaatttgggtggagaacattcttaatcttggtgtttcgcctgctaaacttgttgagaacatgaaagaacgcttcatttcttcgggaggagcaatatttgaggagaaaagtctatcaagcatttatgtctatgatgatctcgctgcttttcctgctggttctggtcccaatgaccgtactacatacatgttcacttatgttgatccaacatttggaggcccaaagctagaagaacttttggaagtgttttgggatcttatgcctgcttaccaggatgtgcttcttcaaaatttggatataagaagagttatatttggaattttcccaacttatcgggatagccccttgccagctgcatttgaccgtatcttacaggttggcgatgctagtggaatacagtcacctgtttcttttggaggttttggaagcttgacgagacatcttggccgtttgtctagtggtatatgtgaagcagttgaaggtgatttcctggatgctcatagtttgcagctgctcaacccttacatgccaaacttaagtgcatcatggttgttccaacgagcgatgtcagtaaggccacatgtcaatgtttcaccaacctttatcaatgagcttctctttgctaattttcagtcaatgcagaaactaggggattcggtacttcggccatttctacaggatgtaatacagtttggacctcttgtgaaaactttggggctagtaatgatcactagaccacaaattttaccttccatatttaagcaggttggactgggagtcatccttgagtggtcaggccattttatgatgcttggttactacacattcctttctacctatattgatccgatcctgaggtcttgggtggaatccttgcccccacgggacaaatatcagtggaaacggtacctggaagcttggagatatggagccggtttagattaccgccaaggggaataaactgtttcactaaaaacacatgaaagtttcctcagaaacaaaattatgtatagatacatgaatatagcactgtcaggggaaagatgaatagagtacatatatgatctctgattgatttagttttccttttccagagcacaagattgaacatcaagtttagaatgtgtattatctagtttcacttgtaatttgcccactttactgaactgatggagtgaatatgtatagtactctagaatttcaaataatgctgaatggagctgagatgctcaatatttgttgatcaatgtatcaattatgtgaaataaaagtaaatgtccggtttcattcagattgcaagtgtaacaacaaaataaacagccatttacacatgttggtaaagag

SEQ ID NO: 30327 - DNA, 1867 bp, Zea Mays
gttcctcatcaccactgagtcacgactccagatctcgcaccgctcgccatggacctcctcgacgcgaggcaccgccacacgccggatttgagctcctcccaagatgccgcctccaacatggggctcccgctcgccggtgccgcctaccagccctacgtttctgagcttctttccttctccatcgagcgcctccacaaggagccggagcttttgagggtcgacgcggagcgggtgcggcggcagatgcaggaggtggcggtggaaaactacgccgcgttcatcgccgcctctgaggcgctctccttcgtccgcgcgcagcttgagagcttcgacggccacctcgaggccatgatagaggagataccaaacttaacatctggctgcactgagtttgttgaatccgcacaacaaattttggaggagaggaagcttaatcaaacattactagccaaccacactacattgcttgacttgcttgaaattccacaattgatggacacgtgtatacggaatgggaactatgatgaagcacttgacctagaagcttttgtgagcaaaatctggaagttgcaccctgatttacctgttgtccaaggattagccactgaagtcaagaagacagtgcaatcattagtttcacagcttctccagaaacttcgatcaaatattcagttacctgagtgcctacgaattgtagcacatctgcgccgaattggagttttcagcgagtcagaattgcgcttacagttcctgaggtgcagggaagcttggctttctggaattcttgaagatctggaccaaaggaatgtttatgattacctgaaaggcatggtgacttgccacagggtacatctatttgatgttgttaatcaatatcgagcaatattcaacaatgataaatctggaaatgatgagaactatgacggcgggctgcttttcagctgggcaatgcaacaagttagtaatcacctcactactcttcaagttatgttaccaaacataacagaaggtggttctctgtccaacattcttgaacaatgcatgtattgtgcaatgggtcttggcttagtcggattggattttcgtggccttcttccaccgatctttgagaatgcggttctaaatttattctcaaagaatatgagtacggcggtcgaaaattttcaggtcattttggattcacactgttgggttccgatgccatctgttggttttgtagcaaatggtgttgtcgatgagacttctgatgatgtgactccaccttccgttttaatggagcatccacctcttgcagtgtttgtcaacggtgtttcagcagcaatgaatgagctaagaccgtgcgcaccattgagcttgaaagttgtccttgctcaggaggtggtcaagggactacatgcagtctctgactccctagtaagatacaaagctatgcggatgcttcgtggaaatgagtccgcccttttcctttcactatgccaggcattcatcgaggttgcatatccttattgtgccgcatgttttggccgatgctacccaaacggggcaacattgatctcagagcgtcaaggcacatttgacgctgtccgtcagctattgaccgtgccggcaagatctaacagttccagcatcgaaagaaggcagtcaggaggcatcgaaagaaggcagtcaggagccattgaaagaaagcagtctgttgagagcactgggatagcggtcactgataacgggctctcagccgatggacctgggctagagacgaacagttctgctgcaaccaccacctcaccggtagacgacggtccaccagcgactaaagctaaagcacatggtggatagccgtgtcatgtctccagaagatacacatggg

SEQ ID NO: 30328 - DNA, 4710 bp, Zea Mays
cgaagccccggcggagaggcgaggtgagctttctcggagaggggacctcgcgccaccagccgcccgagcttcccgcgccatggatcccatcatgaagctactcgaggacgacgaggatgagagtctgcactcgggtgccgacgtcgaggccttcacggcggcgctgaaccgcgaggtggaggccagcgcgagcgccagcgccagcaccagcaccagcgttcccgccggctcctcgtcccagcccacggatcacggtgctggacttttacctcaggaacacaagtcactattaaaccatgatcctggtcagtggcaagatcctgtaaagaatgaaattgtaaaccaggagagtcagcaacaggaacagacacatgcatttagaaatgatcacccgtcaagacctgaaatggtttctcaaggttctaataactgcccccttcccactaatacaccaaaagaatgtgatttactgaaggcaaaacaagaacctggaagtacatctcaacaaggtattgttgctcagcatcagcctatgcagcaaatgaagagtgaacaaacaccaattgtcagtcagcagcagtcgatgcagcaaatgaagaatcaacaaacaccagtcacaaaccaaacaaatagtgcaactacaacagcaaaagctccagttgttacatttcacatgttaattccaattttgagtcgctacctagacaaagccagggacatagaagtgcagtccattttcgccaagttgcggaaaaatgaagtcagcaaggaatacttcttaaaaactgtaaggaatattgttggtgataaattgcttaagcaagctgcttcacaatatcaaatgcaggcacaacgaagccctcagacaaacccaagcaactattctttatcaggtcaagtttctggtcagcagactgctcccagtggttctgtgacaggagatgaacagaagggatatccaggggctcacaccatccctatgagacaagctattgccagcactcgaccacctcaatttcggccttcctcgtctggccaaatgcggagtaatacggtcaatcaagccttgggatcttcaaaagtcagtgctggcatggaaagccagtcacaacaattgagtgcgcctaagcctttagctgcaacaagcttaagtcagactcaatctcatggcattcaagaagagcctaaaattcagatccaatcttctgtgcaagcacctcctgcagcagcttctaaaacacctcagaggaaggcatcttctggacagaagaagcctttggaagtcttaggctcatcccctccaccatctagcaaaaagcagaaggtatctgggggtttccatgaacaaagcattgaccagcttaatgatgtcactgcagttagcggtgttaatctgagggaagaagaggaacaccttttctctgctccaaaggaagagggtcgagtttcagaagttgctcggaaagttgttcaactagaagaagaaaagctcattctgcagaagggacctctgacccaaaaattagcgggaatcatgtgttgaggagaggttacgggggtttataagaagtataataaggttctctaaacagagggttgaggttgaaaagtcaagacatcatttttatccattatcctcagatgttcgcagtcatattatgagagtgaatcgagaagcaagagaacagtgggagaaaaagcaggctgaagatgctgagagaattaggaaacaaaatgatggagatggcaatgcaaatgttgatcttgaaaaagacagaatcgagacccgtggtttgtcaaagcatgcaaagacttacaaggaggacgatgataagatgcgaactacagctgcaaatgttgctgcacgagttgcagcggggggagatgacatgctgtcaaagtggcaattactagctgaacggaataagcagagaagtgagggaggtgatggttcttctggctctgtaccaggtaacatgttgcaacacaggccatcactgaaatctgggaaagacttaagggaagaacatgaagttgaaaagagaggatactccacaatgcttggatctggtggtgttagaaggtcaccgctaacaaaagtggcgcggagtatttctatgaaggatgtggtagcggcactcgagcgagagcctcagatgtcaaaatcctcattacttttccgcctatatggaaggccattgacagaaccatctgcaaagtaatttggaggataatcattgcagttcatattacagaggggcaacttttggtcaatatatgaggaggcccaatcaccaagcgatggggctgattggtcgacgatcaattttgcggggatttagcgattacttggaagccagcgtttccctggagccatttttgttttttcaagggaacagtctgcagatgtttcttttttttcaatgtttttttctctatataatcatgtgttgatcacaatgcccagccagcttcagctggtatgaacatcgtgatcgtttttgtatagcagatggagtaggatgttccttgagatgcttatgacttgctaagtgtcctattctttaatcgtgcgattttgttgtacagaaaacatgaaatgtatgtattggaggctcaaatttattcatgaacaatatgtgccctcgtttcagaacagtttgttttggtttgcaaaatatcaacacaagggcataaaagcagctattctgaatgcacacagaatatcaggacttgctatgccacccttatcaaatctagtcttaatatcatacatatatatagtcacgacattcttgaagctaggtttctattgataatactatcttgtctttccccctttcaactggggaaggtggtacattgttgatcggcatctaacatccaaaatcataaggaaccaatccttgtagctctggaccgttgagcctgctgttgttctcaaagctgcaaagtagagatgtgttagcgctttgtcaaaatcatacggattcacatcgaagttctagtggtaaataaaaatacaagttcaacgatctagcattgaaatgcaatatcaatggtcttaggctcttaagtcttagctcacataggttctaatccattttgagcaatgttttggaatcaatggacccagacataagaacatgtcatctatgctaagatttggtcaaaactgcaaacatcaataacgtttaatttatttagttggaaacatacacgatatgtgtgtagatttgtactgagacacactgcaaaatctcacaaatttggaggatcttaagagcacattcacaaagataagatcttaaggcttgtttgggatcaaggggaatggagggaattaagggaaaaatgaactaatttcccatcaatcccctccagaggggatttgagtttccaaactaacccttagggaatgacattagacaatctaaacctagcaaaatccagacgttgtcatatattgaatactatctggaacttgtggtaagcaagctgttcgaaccaaaattgagcggcggactgtccggccctgaggccggacggtccgcggtccggacggtccgcgcctgtgggccggacggtccgcgcctgcgcagaacagattagggttccgagttttgtgctacggttgttagctatattcgcgggattagctcggaatcagttgtgtaaagggtccagcccccctcctctataaatagagaggtctacggccgatttgtaatcatcaacaatcgaatcaatacaacttttattcgcattttatcctaggagtagttctagtctagtttaggtttagcttcccaatccccaaattcttcgtctctcttcggctatacgtcgattagaggagtctaggtcggccggcccgagcctagacaccacctaggatctctcctccccgacggggtccctcccgggagcgagatccaggcgccgtcggcgatctttcgtcgtccctgcgtacgcgcggaccgtccggccccagggtgcggaccgtccggccgtcaggcagaagcccagccgcgcaccaggccgcggaccgtccggcccctggccgcggacagtccgcccctgcgcagagaataccaccgcgcctcgcaccaggccgcggaccgtccggcccctgcgcgcggaccgtccgcccctgtgcagagggcaccgccacggttcttgttgagtgtttggcgctccgaaaaagcgtcaacatacttttggcgactccgctggggagcacatatctaagcttatcaaatcggccctcaatggccggttcaagggatagctctgatatttctccaagcaacatcatagagccgacttgggaaaccttgccggctgacgagcagctccagttcgaggagcacaaggagcggatgatccaggaagcgaaagcaaagttcttggccaacttcaaagtggacaggagcaaccaggtcgtccgacatcgggcgacggatccggcttcgctccaacccacgccagatatccccaatgtaagtaataccaatgatctgcaatctcttagaaattatgtagaagatcagcgtgaacaaatgcagaacatcatagggggtatgcaaagcgatcttaagagactagtacgtgcatttgataaatctagtaccgcaaattttccttcgcacgaggttgagttaggagataatgcgtgtaacacatcggctacaggttgtcacgaccagt

SEQ ID NO: 30329 - DNA, 1700 bp, Zea Mays
cagatccaaacaaacaatccattccattattttccacctccgaattttaccactccccccatggatttcccattgaccatgtgccaggatacaggtggctatgagcttccagcatgacatactgtacaagggcgtgtgaatgcatatcgcaggtggcagcgggagtaaaggcacccagctagaactccaaattgttaggtgctgttgttgtaatagcagcgaatgctggcggtgcatggacaccaattggtgatgtgacaaccactatgttgtggattcatggtcagattacaacattgaaaataatgcagggcttgtttattccctccactgtttcgttggctgtcccactggctctgatgtccctcaccagtgaagcaaatgggtcatctgagaaatcttccagcttgctgtcatcagagcaggtggctcctcggggacaacttgtactaggtgttggaattggagcattaatgtttgttccagtctttaaagctctcactggtctgccacctttcatgggtatgctacttggtcttgggattctctggatcctgacagatgcaatacattacggagactctgaaaggcagcggctgaaagttccacaagcactatcacggattgatacacaaggaattttattcttcttaggtattcttttatcagttggcagcttggaatctgcagggattttgaggcagttagcaaattatcttgatgccaatattccaaatgctgatcttattgctagtgcaattggtgtggcatcagcaattatagacaatgttccacttgttgctgcaaccatggggatgtatgacctgacttcgttccctcaagactcggacttctggcagcttgttgcattctgtgcgggtactggtggttcaatgcttatcattggctccgcagcaggagttgcttttatgggagtggagaaggtggatttcttttggtattttcgcaaggtgagcggttttgcctttgcaggttatgcagctggtataatctcttaccttgctgttcaaaatctccatctatcccttcccacgtcgctggttgagatcccttttatttcgggatcataaaagcttggcctttgtggtcattttagaatgatcacactctacatatggaggtgaacatcattattgtttccatatcttatgtaaggtccagtgtgtcggcatgtagagtattcagaatttgggggataagacagccctgagcttcaaggccagacatcagttttggacaggcttatctcgtgctgatgaactttagggtagggttgagctccttactagggggctgtttggttcgtggctaaatatgccacactttgcctaaggttagtcgttcgaattgaagaattaaccttaggcaaaaaagttaagcaaagtgtggcaagttagacatcaaaccaaacaagccctagaactgtgggttcgaaccaaagtatgccactctggatatttgtgaacctactcggcaaacaaaggagcaacttagaaatgtgcaattttgtaagaaacaatcccttgtaagctaagagtgtaataagatacagaaatcttgtataactgctgtctggtaatctcattgatggtcttgttaggcagctgcatagttcaaaacttcataccacatcactagggatgagttttgcatctgacatggatacctggttgaacaag

SEQ ID NO: 30330 - DNA, 2783 bp, Zea Mays
gagagagagagagagagagagacgggccggggatgaaagggatgaccggatgagcatcttccgatggtcctagacagggcacacgtgggccccaccgtccaggtcactgtcgtggatggctcaccccgtgcctgcactgcagccctttccctagttacatcagcgagcgctagctatgccttgcctttccatcgagctgagctgagcatcatggggtagtgtgtgtgtgaggcgatagagaagctagtgctcataaccaaccaccactcagtcctcctcctctaccctttcccttccgccgcgttcctacttggtcctagagggagagagatctcgaactccaagggcgcatgctccggttgctagctacgatgccgtgtgcgtagctgcggcagcccttgatcgatcaatcgatcgcttgtgcggaaggagccggatcgagtggagtcagctagctagatactccgtggtcgtcgtcgtcgttggacgtacgccagaagagggagctagagaagaataccgtacagctgcttccaacatggcagctgcctcgtctgcccacctgttcggactcggcgacgggcagatgcagatgcagccgcagcagcagcaggcgccgcctcctcctcttgtgaacaacccggccgcgccgccgcccaagaagaagcggaaccaacccggtaacccaagcaagtaccctggctggccttattcgttatttgctgtttaattgatctctaggcaattcatcaaattcttcggtccagctagctctggccgatctttaagagaaccaattattagcaattactagcaggtgtcgttgatgtttaagagaaccaattattagcaatcatacgataatgacaaattaaacacacgcttgcttgcttgcttttgcatgcatgggcatcattcatatcgtcggccggcccctgcagcagaccctgacgcggaggtgatcgcgctttcccccaagacgctgatggcgacgaaccggttcgtgtgcgaggtgtgcaacaaggggttccagcgggagcagaacctgcagctgcaccggcgcgggcacaacctgccgtggaagctgaagcagaagaaccccaaggagacgcggcggcgggtgtacctgtgcccggagccgacgtgcgtgcaccacgacccgtcccgcgcgctgggcgacctcacgggcatcaagaagcactactgccgcaagcacggcgagaagaagtggaagtgcgacaagtgcaacaagcgctacgccgtgcagtccgactggaaggcgcactccaagacgtgcggaacccgcgagtaccgctgcgactgcggcaccctcttctccaggagggacagcttcatcacccaccgtgcgttctgcgatgcactagcgcaggagagcgcacgggtgccgcccatgggcgccggcatgtatggcactggcggcatggccctcggcctctccgggatggccacatcacagttgcagtcattccaagaccagacccactcctcggccaccaccgccatcagcaacaatccgacggcgcagttcgagcacctcatgcagtcgtccaccggctcccccgttttccgcggcgcgcaaccgacatcatcgtcttcctcgccgttctacctcggcggcgccgaggacggccatcaaagcctatccggccacacctctctgctccacggaaacaagcaggcctaccacggcctgatgctgttgccggagcagcagcaccaggcggggagtaacggcctcctcaacctggggttcttctctggcgggagcagcggtcaggatgcccgcctcgtgttcccggaccagttcaacggtgccgttggcgggaacgtccgcggtgacggcagcgagcacggcaacagcggcgctaacacggaatcagcggccatcttctccgggaacctaatgggaaaccaccaaatggcaagcagcgccggcttttcttcctccttgtacaactcgtccgagaccgctgccccggcgcagatgtcggcgacggcgctgctgcagaaggccgctcagatgggcgcgacgacgagcagcggcaacgtgaactctctgctcagggggcttggtagtagcgccggcggcaccttgaacgggaggcctgccggagcagctgctgggttcatggccggcgagagctcctcggcgaggagcacttcccaggccgagaacgagagccagttccgggacctgatgaacacgctcgcagcttccgggagcggagctgctggcacagcgttcagcgggggtttcccgggcatggacgacagcaagctgagcacgagagacttcctcggcgtcggcggcagcgtcgtgcggagcatgggtggcgcggcagggctgccgctgcggcacggcggtgccgcgggcattggcatgggctcattggacacagaaatgaagtaggcgaatcgaaatccgaaacgagcattattatgctccactcttgggcagaggctcttgcattgcatgcaaggtaagtagtagcacagcctaagcaaacgactatggaaagatgagaccatttgcgcccaaaatgacaaatgaggccgtcaaccatcatatgtttatggtgctgcatgctgcatgaatattgatccttgtttattgtagctccctcctcccagggatcatggaagaatcgatgaagaactaatagcagagaaggctggacaatttgttaaattaaatgccagtatatctagttattttttgttttgatgcataatacttactggtttcctctctgctatagtag

SEQ ID NO: 30331 - DNA, 2002 bp, Zea Mays
aaaaatttaaaaaaatctatctacaagagagagagaaaaccatttacttttaccgagcgtcgtcggtgacgtcgcgccgccgccgtgagccccaagcccccaaagccacccccacgtgagggaggtgagggcggtaggttctgccctaccggcggccccgcgcagcctgaccgcgagtactctgggtcgacgaactgaaacggcggggtgaaatctgatctgcagctcctgaaaacttgccacgccacttcgaagtatctgaaaacggtcataagctttggaggagtcacaaatgaccataaagatgaagctaaaaagcacggcctgtctattttctcttgggacgaattcctggtcatgggtggctctcataattttgatctgcctgaaaagaagagatctgacatctgtacaataatgtacacaagtggcacaacaggagaccctaaaggagttatgttatcaaatgaaagccttcttgtaaatattgcaggccctgattctgtacttcagtatcttggtgaagcttttgatcaagacgatgtctatttgtcatatcttccactagcccatgtctttgataggatgtttgaggaagtgttcatttaccatgggtcaaaaataggattttggcgtggggatgtcaaacttttggttgatgacattgcagcactaaaaccaacagtattttgtgctgttccacgtgtgctagacaggatatattcaggtcttacaactaggatatcttctggtggtatgctgaaaaaaactttattcaacattgcttataagatgtgaaagaaaggcttggtgggaaattaagagttattgtatctggaggtgctcctctagctgtaccagtagaagaatttttaagggttgtgacatgtgcttatgttgttcaaggctatggactgacggaaacttgtgcgggatctatagtttcgataccaaatgaacactccatgcttgggactgttggtccacctgtccaacatatagacgtacgtctcgagtcagttccagagatgggttatgatgctttgtctagtgtcccgcgtggagagatatgcataaggggaagtgttctgttctctggatactacaaaagagaggaccttgagcaggaagtcatgattgatggctggtttcacactggagatattggcgagtggcagccagatggatccttaaaagtgattgatagaaagaagaatattttcaagctttcgcagggggaatacgttgcagtggaaaatctagagaatgtgtatggtgttcttcaagatatagattcgatatgggtatacgggaacagcttcgaatcttctctcgtcgccgtcgccaacccgaaccagcaagctctcgagcgctgggcggaacagaacggcgtcaccggaagcttcgctgagctgtgcgagcatccaagggccagagaacatattctcgcagagctcaccaagatcgccaaggacaagaagctgaaaggctttgaggccataaaggctgtccatctcgaccctctgccgtttgacatcgagcgcgacctcatcaccccgacgtacaagaagaaacggccgcagatgctcaaacactaccagggagtaatcgacgcgctctacaagggcatgaagtgagacggcacgtttgcagagtcgcaaggggtactgttgtgaattgtgatgcacatatttgtctatatgttgtttcagtatctgtggtgtgtggagtcactcggaaggttgtgtattgttgtattgagataaggggaatataaataaaataaaaattagtttgggtacgcaacgcgcggtggagagcgtgcgcacaggctttttgagctggacagtttgtattgaaattacataagcgatcagacaacgttaagcgctaggcactgggctgaccaagattaactcagctgagggtattaaatatctctctagtcaaaattgaatagaagacgatttaatccctatcaatcctctttatcaagacggac

SEQ ID NO: 30332 - DNA, 2358 bp, Zea Mays
ccattgcttgacacatacttgttgcagtccttctgaattttcgaatgcatgatatttttgtctgctgagaatacaattttatgtccattcaacctaggtttttgaacctccttaatccgtttttgttagtgtctactcatctctgcagaaagcatcttcttacacttggactgatgttgaaaacttttttttttttggatttttaacatccaaaaccataatctatagtggacggcttctgaatttctttaccatggtaatgagtacaaatcatttgaagtttgtgataagtatgtgtatcacctaatatttcaagtcatacatcaaagcaacaccttggattaccatactcccacgcagaaaaactgccacagagaaggaaaatctactaacacaagtttacaatcctaccattttctgttggattttggatgcaatttcctctgtactagctgaccttcaccaacaagatctcccatttaatattatcttcttcaactgtcaggtctcaccttgtaggttcagcaccttgcttgcattatgctgctgaggccttgcttgtcaaggatggaaacagcactgctgcatgcaacatggctgccccttctcgaaaatgtttatcctggggtttaatcctgccctctagcagataatctcggtgggagatttgatggttttgttttcatagtatatgcatggtgttgcttttttccctatcggccagcaaacaccagctgggctaactatatctatatggaactgtttccccatagaaaccagctatcaatccaaatatcatactacccagaaagattcagttgcacagttaagccccacatccaaaaagtattgaattgattcttcttcctcacaatcatagaaacaggatctggagcccccctgccattttcttctctttagagtgtccctggttagcgtaacattctgaaacaccaaccacgttttgttatattccaacattttcaacgaaaacattgaaatatatttgtttttagcagattacatgatataaaccagtatattttttttgcattactcataaactaaaatcgggaaccctgtctgattctgaaacatatctttttgcaaaccattgttctggcattgatatttttcaggaacaatcaaacattgtttcaagtccgattctgtcgatagacttcaaccctagttgttcatatcaattggccttccatcttgatgatggctggtctggagtcctgaatgttaacaatctcaatgtgactcatcttcactgccctcctcctgcttggttggagggcacagacttggtgctgcaaaagcaattaagaaagccaacctggctgctgacatcttcaatctatgcagttggatcttcctcatatgatggaatctatctactagactttcatccagataccagctctgcatgccatgtggactacaaagaggaaacaagagtctccggggaaaatcaacctgcaggaaacaagtttgttcctttatcccaaagggtgctttcctgtgcagcccatccactcagtcacaccataattgctggtacacagttctcatcgttgctcatgttatcacaaaagtacaagagtatcagaaatccagagccttgatgacatgccgtttcctccacgcagcatcttcaatcgtgcatctgcagaatcacaatggttcgaagtgctgccagcaataaccgtctttcaagaactgatgaatacgcagccattcacaaaaatgcacccatagagaagaaatctcttgctatatataaaaaagaatggcaagagatttcctcccccatagatctcttataatcctcgtcaccaaatcagctctaaagagttggatcaccaccactgtacacatcggctctgtttttcttggacatgattcttgtaatcgtcgttttcttggacatgattcttgtaatcgtcgttattcttgattagtagttcagttttcgattttggacgatggcgcgattgggagaagcaagtttattgcagggtgtttattgggattatacgattctcacccctgctgctgtcaaataagcgaaaacaaacagggtcgaattctagcctgggaacactttggtgcgcagatgatacagttcacgcaaggctctcttcagttgagcacttggtgggaggagattgcattcgcaaagaaaggtagaaggtgtttctatgacggttctagtttctatcaccggtatgcaatggcctgatgtctaggagagacgaataacttatgtggagaactccatggtcaagatatcgtgtatagagaatgaaagacaagcacacttagggaccgttcctttttccggaattgagg

SEQ ID NO: 30333 - DNA, 2714 bp, Zea Mays
cacaggaccttgttctgcctccccgcgcatcggctgctgccgcgcacaaatccgccgcgccctcggtcccgcaaatccgccgtgccagctccgcccgctcgattcccctcctagcgcccgcattccccgccgccgtcctcgcggccgcagcgcccctggaccccacgccagcaacgcccgcagtccccgccgtggatctcgcccgaaggcgccgccatggacgccctagatctaccacctcctcctctccccatcactgcgccgcctgcccccgccgcacacctacagcgcgccccttcccccaccgtggatctcgcccatacgccagcggatctcgcactccttccttcgacggcgcggtggcgaggaggtcagcgacggcggcgtcgagtcgaggtcgggcacgaaggcgcggaggccgtgggagcggtcgtggcctacgcacgcacgacgccgctcccccagttcaaaccgaggtcagcgacgacgcacgcacgcaccaccccttcccccttcgtcttccattcccagctggaggtgcacgctgccgggcagagcgtcttgctggaggtgcgatagccatgtctggacctccgtcgccgccatagaagtgccttgtcattgatgaagccgatcgcatacttgagcaaaactttgaggcagactgttcttttttctgctacacagactctagatgttgaaaaaattgctaaactgtcatttgagaaaaatgaagtaaaaaaagcctgattatgttggagttgatgatgataagtcaaaggctactgttgaaggcctgcagcagggttattgtgtcatttctagcgataaaaggttcttggttctgtatgctttcctaagaaagagaagataatggtgttcttctcatcatgtaattcagtaaagttccacgttgaacttctgaatttctttaggatagagtgttttgatatccatggaaaacagaagcaactgaagcgaactactacattctttagcttttgcaaggcaggaaagggcatcttattgtgtactaatgtggctgcccgtggacttgatactcctgacgtgaaggaaggcagtgttcatgtctcatccagttcaaatgaagtgacaggaaccattccagagacgaatggaggcgatcatcatatacctggaagctcttttcatgtttagtgaaggtctatgacatgtctgatagtcaaatgaagctaaatgattttatttcaagccttgttcttgagaggatggtcaagattaatttgagtagggtgacttcataatggacgacgaggaagaagtggaaggagaggaagaggaacaaaagagtgatgaccagaagcgaagaaacaaaactaaaaagaaaaggaagagaggagcaacggtaccaggacgcgtcaaggttgacaaagctatctgggaccacttttgtaattgccaactcttcactgattattttcctatatgttgctccagaataaatggatcatagtgcggtggtcatgggattgggatctgctccgtatttgcagggtgaagccttcgtgtctcctcgagggaaagtcactgacctttcttgggacgtggaccactgacggcccccgtcatcccccatgacggtgatcctagggtgaagccttcgtgtttcctcgagggaaatctaccagtgcgggattgatttagtcagcaccattggacacagggtttagttccattgcctggacccatcaatgaatcatggtgccaaggtcttgatggttcgacttcaaggtactgatattctccaggactattgttagcatcccttgtggtccatctgcattagcagtgaagaaagtcgcatggggacttgcttgatatgttgttattgctcagacatggctgagaaggaggaaacaaagggccgctgccctgcctgccacacacgttatgacaaggatatgatcgtcaagatggccgccacttgtgacaggacagtggcagataaaaatgcggagaagaagcaaaaggcccaaagggttaagccaaaggcagcaccaacagcaacaacaacatcaaccgtagaatctaagaagcatcttgctactatcagggttatccagagaaatctggtgtacataattgggctacctgcgcatttatgcaatgagagcgtacttgagcgtagggagtactttggtcattatgggaaagttttgaaggttttagtttcccgtccgactgggcctccctctcagcaggcatcagcaaacagcagtattagtgtgagatatacgtggagcgtcagaattatatgtgcatctacaagaacagttacaacaattctccatcaggttgatgttcatacatctcagatataaatgtgggggagacggtgcctcatcaatgatgagtaggttgattctcatctagcggcaccattgctcactacaactggtttgcttgagcaacttaatgtcactctcaagaggaccctcctttcgaccgacaccctgaagcaccacacaagctttagaaaagtcggaattgtacttcgtatacataaattacatgatattatatgttcatgtaattctatgttgattctttagaaataatatatatgatattgtaatgtgtgttcgacatcaatttattttatttgagttcgccgtgcgtacgtttggggttgtttctccctcgcttcttcctggcggcgaaagatagagaag

SEQ ID NO: 30334 - DNA, 2115 bp, Zea Mays
tcaccccaaacggggcctaggttagcgtttgccgtttggcacagccagctcgttgacccgggccatttgggccagccagctcgttgccctgggccctggcccccgggcgccctcacgcccgctggccgctataaatagcgctcggcgttcctccgtcgagctgcccaacccagagcaccagcagccctcaccttcttcctctcggccggtccttcaaacgagcccgctcgtcttggagccgccgccggtctcgttctggacgaacgttcaaggagattgcatttgtggatgctctaatggagtcgaaaggtggcaagaagtctagtagtagtagtagtaatttcatgtacgaagctccccttggctacaagatcgaggacgttcgcccagccggaggaatcaagaagttccagactgctgcttattccaactgcgtccgccagccatcctgatatcgcctcacatgcaattcgcgtggcgatgtcttcagcagattcttgtgtctcttctcctgcctcccctattggctttgagggctatgagaagcgcctcgagatcacgttctctgacgcgcctgtctttgaggacccttgtggtcgtggcctgcgcgccctctcccgtgagcagatcgactcgtttctggatctcgcacggtgcaccatagtgtcacagctctccaacgagagcttcgactcatatgttctgtccgagtccagcctctttgtgtatccccacaaggttgttctgaagacctgtgggacgacgaagctgctgctcgccattcctcgcatccttgagcttgctgcagggctgtcactgcctcttctttcagcgaagtactctcgtgggaccttcatcttccccggcgcgcagcccgcgccacaccgcagcttctcggaggaggtatctgtgctgaacgctttctttggtaacctcaagtccggtggcaatgcctacctgatcggtgaaccgttcaagcccaacaagaagtggcatgtctactacgccacagaggagcctgagcgtcctatggtgacgcttgagatgtgcatgacagagcttgacgttaagaaagctgctgtgttcttcaagaactccactggtggcagctgcacttcagctaaagagatgacgaagctctcggggattcatgagatcattcccgagatggagatctgtgactttgagtttgacccctgtgggtactcgatgaatggcgtcttcgggcctgcagcctccaccatccacgtgacacccgaggaaggtttcagctacgcaagctacgaagctatgaacttcgaccccagctcactggtctacagcgatgtgatcaggagggtcctggcaggcttctctccttcggacttctcggtcgcagttaccatctttggtggccgtgggttcgccaaatcatgggcgacgggtgcagacatcgattcctacatgtgcggtgatcctgtagagcaagagcttcctggtggcggtctgctgatgtaccagagctttactgctgttccctctggctctgtatcgccgaggtcgaccttgcagacggatggctggagcagcgatggaatggagatggcctcaaatgacgagatgtgtattggctgctggaatgcggtgaagaaggtggtgaagaaagatttggatgcttaaagatttggataacttaggtggttcttcacctaagttatgaagaagtctgagacctctgtctctctgttcttttggtttcagttaagcagttagctgggctaccggcaatttgtttgcttaatatttttcctgttcaataagtactctggatggcttgctgcgtctgccatagtgagctgcatattgttgtttagtcatattgtttctgctgccgatgcccttgtggggagaatgatcttgtaacagacttgcctattcccgcaatatattggaaattttggttaataatctattggttgtcactcccgctgttgtgattagcacatgtagcacatttcatacttcttttttttttaaatatcttgatattatttttgttgttagtcagtgggtcttcaacgactgatgttattcttgttctcaacagaagccatcaacacgacatgatattattct

SEQ ID NO: 30335 - DNA, 1565 bp, Zea Mays
gagagagagagagagagagagagagagagagagagagagagagcaaagggaagtcatcataggtattttgagaacattccatgcatacttgcctggctcgcatttgcctgcgagatcaccaatcaaacaagccacccgtgcttcctgctaccctgctacgctgcacaatcatcctgcggaatttagtaacggcgagttattccaaagttccgatccccaagttgtttattctcctatagtttgtcggtttgtgtggttcagattcctcccgctctcgcgcaagtggtacactgtgtttccagctaccattttctccactaactaattttattttcagtgtctctcgtttcttttatttgcgcgtcaagtttcagccattccttgctcaaaggaaaagtttgagccattccctgggaaggtaggtgagggtactggacaaatccgaaatgcaaatgggcatatgctacatataaccgtaggcttgcttgctactgccagagactcgggtacatggtatcgggttacagtccaaacaggaaattctaaggccgatggaagataaggatatgggtacagtcacccagtcctgccatgacgcgaaagcttatagaaatcaggtggcataaatactgtgcagggctaaaggctagcctaggtctggaccagttagagtagacacgcaagtatcaatcgattcataagaggaggaggccattgagggagccaagtagaaggcagtcactgcaaacaacgctggtgagcaactttgtcaagcctcaagagctcatggaagatggcagtgctccaagacggtctactccacccacccgcagaagcagatctgccgagttccacaatttttcagaaaggaggagaagggataagatcaacgagaagctgaaagcattacaggagcttcttccaaactgcaacaagaccgacaaagtttcgatgctagacgaagcaatcgactacctaaaatcccttcagctacagcttcagatgctggtcatggggaagggaatgtcaccagtggttcctcttgagctgcagcaatacatgcattacatcacggctgaccctgcccagttgcctccattgcgcccatccggccagcagcaccggcaatttcagataactcaagccaacccccagcgacaatctaacgtcgagtcggatttcttgagccagatgcagaacttgcactcttctgagccgcctcagaactttctcaggccgccgaaattgcaactttatacaccgaggggtggcctacccaacacgagccacaacactggatggatttctgggagttcctcgtataacttcatggagtgatgtgctcctaatgacaaaatttgacacggcaggcgtgcagccttgaactcggaagagatcgttcagtttgggacctgcagcatggttcacctgagagaattccatgaatgtgtagtactagttaactagctagctagttgtgttattaaataaaacgttgtgattgtgatgctgctcattttgctatctgaatcttaccgtccaattctcctccatgttcatgcaaa

SEQ ID NO: 30336 - DNA, 2547 bp, Zea Mays
cgaacaggaagcgcaaccgaaaaacctacggcgacagatctccacccaaacatctcaccagtcgacagtagtcatcagccgtctaacaaaaccgttaaacggacggaccatcgtcccgggcagacccgccgaacgacggtcgacggcagaggcaaaaccctcaccttcctccgtgggggcgatggcggcgccggaatcggaatgcggcgggagtgacggctaccgcgacctccgcggcgtgcgcgtcgacctggacacgggagcggcccgagccggtgggggaggaggcttcgccgtctccttctggctctacctgtccgtctccgccagaccgtcctcggtgatcctccaccagatcacagcgggagatgacaccaagttgccgtttcttgctttaggtgaaggaaacaaactgcttctcttcccgttgatgaggctgcacagggaagctcctgctcctgctagttcgtacccatggactgacacaaccaatctatcatctacgagtgtatgccctcttgagaaatggttccacattgggtgtgaggttactgaaaatgttatgcgtcttcacgttgatggtttcctaactgctgaggcccccctttgttcactgtttgatgagccagacagtcaggatgattcaaaccaaattagcttagttggaaatgatggcaagcttgaaggctatatctataatatcgaggtttcatatgtactaggagctataaaagaacaatacacaaagaacccaccatttaagttatctattgactattcatgctctgatggaatcgaagagggtgatgacggcatttggagcatcgttggtgggaaggcatcttgccggagaaatttcattttggaagtagtactaaccaacgcttttggtgaacctgtgaaggataaagaggtcgtttcttcacttgtctatgctgatgatggaacagtagttgcaaaatcaagggatgattctgagcctcctttgcttattacttgcgaaggacttgaatatgcagcgataagcaggcctctaccaattatacgtgggcgagcactatttaaactcaagatatctcagctctcttccaaatgtgacaataagctcttccgtattaaattctctacacttcacatgcaaagatattcttttctggaagcatattccaaaccgattcgctgtatatctcgaagccgcactgtccgccccttgggtcctacaaagcgggcgagttctgcaacagcaaatgaaattgacatgctcagtaatggccaagggtttgttagtactgacaaagtaaatagtcgtggacattcagtgtgtctgcatacgcccatgtttcccaagatagaagatggaatggtggaggtagtagaggcccacaaaatagtatcacagaataagaatgccagaaaagtggtagtaagcaaagaagcacagaatgtaatagggactgattcctcaacatccaactatgacagctttgattcaggaagttcttggagtggatcagaaggagatgatgaccgagtctcgttgtatagtggatgctcccaccacagaaaccaaatattaatgtcgaagagattgctcagagagggtgctgacacttggaacatgatctcaaagaacaatgaacgtgctctttggtcatctgccattccagagatcataacaaaatttacgaacattgcccattctgtgcgtaggggtttatcagagcaggatcttgaggttttaagaggcattgctggttgtggtgaggacataggaagagatgaatttgataggctatggtgctggttatacccagtggctgtttcattatcgagagagagaattaaaaagctgtgggattgcacagcacctagatggatagagggcttgattacaacagaagaagctgagagtgcactaagaagttccagggaattgttaaaggaggcaggaacatttgttctcagatttcctatcacccgaagctggccacatccagatgctggaagcctagttgtcacttacattggctctgatagctcaattcatcataggctactctctcttgattccagtgatgctagcgctgagaaactgcaagatttgctgctccaggaaccggaactatcacaattgggcagggttgatcgggtctcaatcaccatccggagatgaccgaggcttcaaacggttaaacttacattcaaaagcaggatttaggatgctgccacgagaagagggtcagcagcagctcgacgcatacaagttcattgtcatccaagagcatagcccataacacccattgcctgttttttttttgaatcaaacacccattgcctgttgttaccatgtacaggttgtaaattggttcccttggtagtttagttcgtacaaagagaggtactagtgaggtctagttgcttcagaaaaccaacagtaacatgagctaccatgtgtgtcgcaaaaagaaagaagctgtcatcatgtgcctcgaaactggaggattttcagtggctaacatgttgcatatagaattgacagttgattta

SEQ ID NO: 30337 - DNA, 1063 bp, Zea Mays
gttcgtccgcctttcccttctgcgcgctgcagtcagccctcatggccgccgcacaatgccagtgccagaccttcaccacgggccgggcgtgcatggcagatcttccatttagggcgatgatgaggcaacggcaaactggcagcagcaagtactactagcgcttgctaaaggccaggagcccaggacccggaggtgctcgctgtcgctgatcaaccgcgcgccgtcgcaggcagcacagcaaccagcaacagccaacagctaggcaggtagtagtagtatacatgagcaggttcgcggggcagacgtccaccaggccgtgggtggggatggcgggctctggcgccaccgcgtccgagcctgccgccgccgacgtcgcgagggacgacgccacggcggccatgaggggcgccggcgccggcgccggcaccaacgccagcgccatctccttcggcttcgcggccacggcggtcctcgtctccatgttcctcctcatggccatcttcgagcacctcatcaagcccggcctggcttcctcctcctcccgcggcgcatcgggctcccatgaagacgccgccgacgacgatggcgaaggccgcggccaccgccaccgcatggggggatcacccccggctcgactgcgcgagcgcgacgacgcggcgccggacaagctctgtcacctgccaaaggtggaggccgtggtggacttgacggtgctgatgccggggcagcggtacccgacgttcctggcgcagccggcgccgctcgcgccgtgccacagggaaggcgtgctctggccttcccacgaccgtcgccgctcgtttgtgccaccgtgattttttccccccaccacatcgttctttctgtacagaggttattgtaaatggcagcgccctggcttattcgaggctgatatatcatatggctgttgtcacatgtgatgtggaacactgtttcggtatggtagatatagcgatggtaggatagatcttcacatgcgtacggccggtacgtagtttcagcaacttgctaattaggctgggaaatgtcgttgggtaagtttggc

SEQ ID NO: 30338 - DNA, 1902 bp, Zea Mays
aagaatggtatgtgccgtccaaacgagcgagcacacatatcctttgtggtcgccgtcgctctcctccacatgacttgcttatgccagtatgctgactgtagcctgtaccggagctaccccagcataccacgctgtgattttgctgacaacttcttcttcatcccaggcatcgctgcaccagtctttgctggagtttacacagcgcacagtcttctcagcagaggcaacgaggctccgtctgatgaaggaaccaatgaatcagatacggttcaagaagagacaaagccacctgaaacagggaactgtgaaaagaggaaggtacgggtgcagctatataagctccaggaagcagagagccaggcatctctacttgaaagctgcttgaagagtttgtgcacagtgggtctcctactcggctattcagttctcctgctctactctccggaaaccatggctgttgtggagctgaaggttggaatgcactgtgagaggtgcatcaaggccatcaagaaggcaatcaaaactattgacgacatggagagctatcgccttgagacggagataaacaaggtcacggtgacggggagcgttaccccagaggaagtcgtcaaggctctccacaagatcgggaagacggcgacatgctggacccaagactgaggagggcctggttgattcggacgtccctgagaatgagattttgttggctgtgggttggattggatggagctggagcctgcctgggcaggcaactttttcagaccatcagatgtataggaataaccacggacagatgctgtgacttgtactatatgtgaggtaaccactgctgttattcactgtcgcccggccgatgccactcgcgatcatatacacagagacagagtctttattttcatgcagatcctacctaccactaccagcttgttcaatcatgctccacgcacgcgcgatgttcgagaccgtgtctaccaggttgcctgatagcctttccttgaccatttcttctctgaaggcgttgattcagctgtgcgataaatctcggctgacctgcctccattggcccgacatctgctacagctacagtacgtgagaccagacgcgtcagctcaagtacgtgccgcgtgatgaacgaacagctccgaagctccggtctccggactcttccacccgtctcgtatttcgtctagctagcagcactagcaggctagcagccattaataaggagttggagtttcgtgtcgcggtgttttatctgaggagctgtgggataagcacgtgtggcacgggcagagcggtgcaagtgcaatcgggatcaggagcagaggtcggcaggtcgctccgcttgcgcgaaaagaagcatggcggtgtgcgcatgggcaaaaggcagaatggctggagataggtgtcgatccgtcatcgtccatgatgaggactgcttctcgcttgcgagtttcgttgcgtgcggacgaattgaccagacgccgttcgtcctctccagtcgagtctgtgtttgtcctgtccgcgggttggaagagtgtcaacaactctacaccacgcgaggatggcgccagcccgactacagaaaacctgatgggaggaaagccgacgttggaagcggaagctgatggagctgtgaagcggagaaggagcaacagagttaagaagccgaactccaaatatattggtgccaactggctgtaacacaggggatgagcgtatctctggttcgggtttcagtagcaaatataaaaggcgaactgctgccatttctgtaatttggcttttggcttttggttgttgaacaaacccgaacagatttgaaccgcaaggaataacacctgtccacatcgccaatcccagatcgcgagctcctccctgtgaacgtgctaacaattggta

SEQ ID NO: 30339 - DNA, 564 bp, Zea Mays
ttcttctccttaccgatggccatgccatcatcttctacctatggctcggcgcacaggatcctccccgacagctcccagatcgccgcaccgagcgccaacacagaagatgcaacggagtgcggaggggaaactcaccgtcgatggaagcagagttgaccgaccgtggcgcttggatcacggcggcgctctaaactccgacgtctagtcccctcgccacgtggtcgctccagaccacggctcggccgagcgcaggtgaccgcgcagatatcccaggtgggagatggcaacccacgcgctggacaagcagcgccagacagccaaccgcaccgtcggcaccaccccacgcttgcacccgtctgccacacgaccgaatgacggcgcccgagcagagagctcccacggccagcggcagcccccacgccgatgaggaatctccaccagcccacgacgtcttttgtcggtttgaggctgaagcaactccctaacatgcacgcgaaggtcccagaccaatctccaaaagctcagtcgacggagtcccccggcggcggctaccatctctgtttg

SEQ ID NO: 30340 - DNA, 1088 bp, Zea Mays
atgtacaacggcggcggcggcgccggaacgacgcccgccgccgcgccggcctgcgtcgcggacgacggcggcgcctgtgggtgtggggcgaacttgagcgcgcggagctcctgcagctcccgctgcagccgccggttctcctccgtcagcgactcgcagcagcgcttcagcagctcgcagtccacctccgtctgcttcagcttcgtcctgcgcgcgcggctaaaccacgttaatatgtcgatcagccgtcagagcttaattagtcctaaacaaaacccaagcatagcaattagcatgcatgtcgtatctgcttctgtgggctcgctgctggtttattatttgcgtgtgcatgcatggcaatattattgaaaaaaaaacgacaacaacgccttcggatgccatgggccggtgtccgtgcgtgtcgcctggttaatactaaccttgctcgcctgttttggaaccacacctccacctgccgtggcctcagcttcagttgcttcgccaacgcgactttctgcttcatatactgtacaatatatatgtgtgtggctgtagtaataatcagccatgtacgcagccagtgtcgactagtaattcatcgaggtgtagtactaggcaaggcaagtgcagccggagccgcagccgttttgtggtgctggttcagggtgctgtgctccttgaagcggtcctccaggagcgcggactgctccttggtcagcctcagcttcttccgcgtgctcccgtcgtcgtcgtcgtcctcggcgccggcgcaggcccgcggcaacgcggccgtagacgacgcccgctctccctcggcgtcatccacgcgctccctcttcacgcccgccactgacagcgacgacacgctgtgcgcggccccgcccccgccggacccggtcgcggtcgcttcgtccggcaagctcagcgtcagcgacggctccagcgggtgcggcgacggcagccgcacctccctgctcagccggcggctgataccaccgtggcgcgccgcaccagaggcgccgccgctgccgctgccgagggacaggcccagcgcgaggcctgcgtcgtccaggtgcacgtcctcctga

SEQ ID NO: 30341 - DNA, 274 bp, Zea Mays
ccataaattcacgcaagcatcaaaagcgtagcagcgtagatgatttcagccgccgctggtacgtgctggtactgcaaaacgaagccgcgatggaaagaggcttcttctgcttcttccccatcccctccctcgcgcgaatgctcttcgccggaaagcggccgacgaagacctgtgcaactggcgtaggtcggcggcggcgcgaggtgaacgggagaaggaaaacggcaaagaggtgcgagtgcaggactaggagagcaactgttccggcttccgg

SEQ ID NO: 30342 - DNA, 320 bp, Zea Mays
taccaataccttggatattctgcagctctttggtgatacctctggactcaagaacaatgcacaaaagtccaatgtctacccccattcagtgctctgatgaaactataatgaaaatccagaacctgctgtgaagttgctgcttttccttgtaaatacctggggctccccttatctttacacaagttgactaagcagcagttgcagtcttttgtggaagaattgctgatcaacttcccaactggaaagctgatttgatgaccaggaagaagagtccaggtgcaacatgtgcttacagggcagaagcatctcttccttcgccc

SEQ ID NO: 30343 - DNA, 1666 bp, Zea Mays
cagctgaacgcctgaacccaatcctaaggagtagccatttcccccactcttcccgccaccatggccgccgccgctatctctttgccccgctctccctctctccttcaacccacgcgccggcgctcagcgccaccagcctgcacgcagtccgagcgcggcgtctccttcgaccccggctccgccttctaccgcagcgacagcgccgcgggtcgtgacctcgccgtcctcgcagccactctccaccgccgccgtggccgtcccgacccttccgccccattcctctgcctcgatgctatgtgcggctgtggcgtccgcgcgctccgctacctcgcgcaggccggcgccgacttcgtctgggccaacgacgcctccgaggcgcttcgccccatcatccttgccaacctctgtcgctttgagcggggctcgccggaagcggtggcggggtgcaggaggtgggtggtgtcgcacaacgacgccacccgtctgctcgcagagcgctacctccggcgcgagtacttcgatgtcatcgacgtcgactcgttcggcggcgacgccgcttacgtgagggcagcgctcttggcgctcaaaattggggggctgctctacctgacgtccacggattggcggtcggcgagaggatatgggtcgagaagctctttgtcttcatatggagcgtatgttcgtccaatgccatatccaaatgaggtcggtttgcgaatggttataggtggcgctgcacgggaagcatctcttttgggatttcacataacacccctattctcgtattttgcgtatcatggtcctatttatcgagtaatggtacaactatgcaacggaaaagatgatggcatcagtaactatggcttcatttgtcattgcaagagttgtggtcagtctcaaacttttggatttgatgagctggggcagatttcttgtggatgtacagacacaacagtaggatgccgattcaatcactgttgtaggcccactttggacaggtcctctccacgatgcctctttccttaccgaaatgctaggcttggccaacgaatggggatgggcatgcacaattgaaaatggtgtctctttggaaaaacttcttggcatgatgattgaagagagtgacccgaggttgcctcctggatatataagacttgatgagatttcgagacgagcaaaagttaactctcccccactcggcaccctcatcaattcattgcggaaggaggggttttctgcttgtagatctcatattagtgcaaatacaatcaagaccaactgttcaatggcttcttgcatcgatgttgcccggggcatccgaaactcaagatgaatatcaattaccaactatatatggtatggctgcgtgtgcccagcgaggctcacgcgagcttggtgcataaggggctgattggttggatgcacagccagctatccaggctagttaagtatatgcaaatctaggtgtttggtttcctgtattgcttcagtagcctgactaaactgtgcaaaagtggcatccaaacttggctctaggcttgttcgttttgctcttaatccatgtggatttggtaggattaagtgggttttaatttcaaacaagataaaatcttttataatttttttccaatctcatccaatacatataagatgggaataaccggac

SEQ ID NO: 30344 - DNA, 2173 bp, Zea Mays
cactttgtcagtttgccgtcgctgtcggcgccgccgcctgtcctaatctcctctgagtccagcggccacctcctccaccgggagctccccgtaccataaccgcagtccgcagccattggaatttccgcttcatgcgtggatcctcgtagaccccgacccgcgtgcactcaatccctaggcggcggcctccggcgcgaggctagcgggcggcacccatggcgtccgtggcggagctcaaggagaagcacgccgcagctacggcgtcggtgaactccctgcgcgagcgcctccgccagcgccgggagacgctcctcgacaccgacgtggcgaggtactccaagtcgcaggggagggtgccggtgagcttcaaccctacggatctggtctgctgccgcacgctgcagggccatagcggaaagactgccagagtaatgaagaagaaaatgataccgttgcgaggttgatgtttgagctgtgggacaggattatctgcatgtacattctgttgcagagatacttagcgctgcatggatctgtcactgaaatattattcgataattggtagctagagaagcaagctaacaaggattatatcatcccattattttggtggcacttggcagccttcttttgccctagctttgataaaaggggcctggggaagggataaaccgaggcaagcctcctccctgctgctaaaaattaggatcttccagatttattgccatttaactagagtatttttttgtgagggccatttaactagagcagaacacctcatcatgttgctaaagttatgaaaacttttggagacatggacttccacctgttcgaagatgcataattgcatatatttggattttgcggtgattcttggaaattcagcacttcagctatctgtgtatattctctggattggacccctgaaaagaattggatagtcagtgcctctcaagatggaaggttaattgtgtggaatgcattgacaagccagaaaacacatgccataaagctgcattgcccatgggttatggcgtgtgcttttgcacccaatggccaatctgtcgcctgtggtggtcttgatagtgcgtgctctattttcaatctcaattctcaagcagacagagatgggaacatgccagtatcaagaattcttactggacacaagggctatgtctcatcatgtcaatatgtcccagatcaggaaacacgtcttattactagttcaggtgatcaaacatgtgttctttgggatgttactactggacagaggatatcaatatttggtggtgaattcccatcagggcatacagctgatgttcaaagtgtgtccatcaactcatcaaatacaaatatgtttgtctctggctcatgtgatacaactgtgaggctgtgggatatcagaattgcaagtcgagctgttcgaacctaccatggacatgaggatgatgttaacagtgtgaagtttttccctgatggccataggtttggtactggctcagatgatggcacatgtagattatttgatatgagaacagggcatcaacttcaggtgtacagtagggagcctgatagaaatagtaatgaactacctactgttacatctattgcattttcaatatcaggaaggctactttttgctggttactccaatggtgactgttatgtgtgggacacacttctcgccgaggtggtacttaatttgggaaacctgcaaaactcccatgatggccgtataagttgcctcgggatgtcatctgatgggagtgcattgtgtacaggaagctgggacaaaaatttgaagatttgggccttcagtggacaccggaagatagtttgaaggccaacttttctcccccatgttgtatgttccttgttgccccttaacaacggacagtggtgattggtgaccaactcgacttgttcctgggaatccctttgttgttttgtaagctctgttcgcgctatgtttaatggaaaaatgtgcaatttgtcagtgtcacggcgctacatcttgttgagttggtaactgtttatactgttattacgagaatatcagtaacgtgtgatctgcccttttctttgtacaaccgtttgatcttttcaggttttgtgaagtagcatgtatttccttaatcaatttatcatatcagtttgtccatttgctgaatta

SEQ ID NO: 30345 - DNA, 3988 bp, Zea Mays
ggttcccttctggcttctgctagcgttcttactagcagctcggtagttgtgaaaaaagacacagcttttctgcctttttcctcctcctcctcctcttcttctttgagccgtccaagttccttcctgtctcgcgagttgacatccgaacggcttcacaggaatatatttgagccttctgtcctgtttcttttgatcttctgtatgtttgcttcattatggaaaggggtcgtgtgtttccatgttgcgttttgtgtgtggtaatttctcgtgaacgcattccgctattgactgctcgccctgtcgagcagattgagctatccaatatccatttagctcgacacagtgaagaactgaagatacacattgggcttgcttgtgttccgtctctctcaaacatcctgttggtgtgctgtgaaggtctgaaggtcacataatccacttggctatatgccggggtgggtaatgtgagtcgggcttgataaatgcagacttgttaacttgttttgcaacaagaatgggggcaaaagtagaacgggaaagttatatgcctggatattatgccacgggggatctcaatttggaaccaaatggtagatggtctccatactatgaggagatgacatcaaatgatcagttatgcaatggcttcacaacaaaaccaacaaatgactattcagaatttgacaaagaaatactcaagcatcaaatacttgaacatgaagctgtgtttagacaacaggtgtatgaactgcaccgagtttacaaaatacagaaggatatgatgaaacaacatcaaagcaaagaggtatattcatacccaactttggcagttgcatcacatacaaattcaccatcacaagtgccacaaaacggtgcaaagatgatgtggcagatgccagttcctccaatgtccacaacatacaggaaagctattggagagcataatgatacaaaccagtcctccatgaagttccttagagaaggcagtgtgcagtcctcaccaaatggatttatatcaagtgatgttggtccaagaagcagacaaggcacttttgaccttcaacttccagctgatcattatatagatgacgatggcacatcagataacaagcccatagatttccttggtttggcatcagatacaaaaccccggaatgatgctgagcttacattagttagtgcagaaggcttgggcaagttcagtgataatagttcatcctcgggtttgcagactacaaataatcttggaccccggcaggttaccgacctgaatgaatcaaatactggcttccatatgggtagagcaaatggatcagtttccagaggccttccgcgtacccttgagaactcatggaaccaaccaatattgagagcaaacacaactaatttcagtttcagtaaaaaacactccaaagaaaagcacacagatgaaggtacaagctcaaatttctttgacacaagtgtgaaaacaatacatgacgacaaaccatcaatcaataaaggtaaacaagtcagcagtgtaacttttttagcacccagatataatgatgctgaccccccaaaatacttcaaagctgttgatgggaggcctgccactgccagttataaccactttgtttaccaaggtcagaatagttcagttggatggattgcacaaagtcctctggaaccttctgttatcaataattttgctagagttgaccgtccacatcatttgaatatgggtacatttactgcccccgtctctattcctcaaatagacaatccttcaattgtctccccgatgggttcttgcacagcagacccaaggagcagcgttatcaataatcctgctttaattccaagattcaatgggttctcaactgtgaattcgtacaccagtcttagtgctgtgacgcagagcattggaacttcaatcccaaagctgataaatgtggataatgtagataaacgctatcgtggttttccacttgattcgttttccgtgtctcactcacgacatcaggtagcagtttcaagtaacctggagcaaaagaattcccagaagttggaagattcagatcaacagtcccatggcaagggtatgaagaacttcaatttgaatgagacactgtcagattgtcaggaagatggtcttgtagaacaagatgggagatgtgcttccagttttcagcatgataaagatggggggtcagtacttgggatctcttggctcaaaaaaaaacttatgtctgctgacccaacagctgtggagaagccagggaagatttttggacattcattgggaactgcaatagagctgaaaaatactaaagaccagaatgaaccagctgtgactattcggaatttgtcagattctgcttctacatctgttggctgtgcaattaagaaggataggccttcggataacattgttaccggaactctgcctgtctgtaataaagcccaagagggtgctacatgtttacctctttcgtgccagaagcatgtgcctaaagatggacaagccgctgaaggagccaccaagaaaagtggcgcccccatcaggaacttcatcgatctcaatgatgatgtaccaaatgatgacaattctgaggaatcagtagtgtcacacgaatgccacgtggaaccttcacggaacaaccatcctaaacgagcatttgtgattgatttagaggtgccggcctgtgaagaggacgcttcgtgggatattgatcaagaatgcgcgcagccgaaacctgatgcgtaccaggaagttgacgacggatctgatacatccgctctagctgcagccgagaacatcgtagcgttgtcaaggaatacgccaacagccgcagaggcatcggacgatacgttgcagtggtttgcagatctcgctgtattaaacatcaacgaccttgctgagcaagctgaactccaagcttgtacgaatgattccagtaactacgagtcggattcattcgagtccttgacactgaagctggaagagaccaagatcgacgatctctggagcaggccactggaacctgaaaccgcaaccgatgaacagacagtttcagctgctcaccttctcaccaagcccagaaggggccagcaaaggagacggcggcagaagcgagatttccagagagatgtcttgcctggcctttcgtcgctttcccggcctgagatcacagaggacgtccagttgctcgaggggttagtccaggcttccgggggatcctgggagtcgagcttgactaggcgaggacgttgtggtgggcgtgctagaggcaggaaacctcggaaaactgtagtaaccgtaattgtagaggaggaggaagaggaggaggtagaggttagcccaccgccaaaacctgctggcactggggaattggaagccgatggcaggggtatgatcgggtggggcagaacaacaaggcggtgtcgcagagcgagatgtccgtcaggtaacagcatggctactgcgtcttgagtgggagggtatttcttggcagcaagcattggacctgattaggtactgggtggttcacaattgttgtattgactccgatggatgggctggtggtataaggtgatcacactcatatgagtgtcggcctactggtctcagcacaactttcgtgcttttgggtcgaaacatggtttacgttcttataataagttcggtaaattagctggcgagacatttctgcgacagcattgtactaagctgttccaggttatgaggcccggtgccccggtatatattcattgtgagaaaaactgcaatgcatgtaaaccaccttgatctctgaagaatagctcatcacatgtgtaacaaaagggtgtgaatgaggctctgagcctgtattctttttgtagctgtatgccctgcctaattggcgctagtatccagcatgcgaattgctaatttagttttataccgtggatattgctcatatcgtgtcccaacgcttttcttccctatgggaatgcatatgccact

SEQ ID NO: 30346 - DNA, 2019 bp, Zea Mays
ttaggggatcaatttgaaaagttagatagattgacgggttagatgattaatctgttgaaaagttgttttgctgttgagtatttaaaatttaaattaacaaatcatttagctagtctattgaagatgctataaacgagcggcaatgtaccggtcgacccaaataagcaaatttgcccagctccgggcccaactgagtccaaacgtccaagtggacgcgaaccactcttctgaaccctaaaccctcgcgctttcgcctcccataccgccgaaactgacaacccatgaccacctcgcttcccctccttcctcgtcctctttggttggactgaggtgtggattcatccatcgctggtgaggacgccgggcttgtttttgttgttttttccctttctcttttcgtttatcgattttgtgggtcttcaaattcaatgtattgtttattggattggcgcttcagtttgtggcgggtttattttcaggttcgcttagtatcaatccaggctctgatttggtggctgaagctctgtttctccatggcgcttcgtttcgagatattaggaagattcaatcgcgcccgcgcagctcgcttaactcttcccccactttacttgtcaaacaccactttttatgcctgttggaactcaaggtacaataaaagggttaaccactgaccagttagaggagataggttgccagattatacttggaaacacctaccatcttgaattacgtccagggtctcaacttattgatgatttgggtggcctgcacaaatttatgaattggaaaagggcattgctgactgactctggtggtttccaaatgtcacctgttgatgggaagcccatgctcttgacacctgaggaatctattcatattcagaacaatattggagctgatatcatcatggcacttgatgatgttgtaaagaccacaattactggcccgaggataaaagaagctatgtatcgcaccattcgttggattgacaggtgcatagctgatatgcaattggtggtcttgctggtggcgaagacaaggattcattttggcgtgttgttgcccaatgcactgctggattgcctgaaaataaaccacgatatgtcatgggtgttggctatccacttgatattgtagtatgcagtgctttaggtgcagatatgtatgactgtgtttatccaacacggactgctcgttttgggactgcacttgtgcctgagggtgtcctaaagttgaaacataattcaatggcgactgatgaacggccaattgatcatacgtgttcatgcatggtctgcaaaaaatatacgcgcgcctacttacattgcctggtcacaaaagatgctatgggttctcagctgctgtcatatcataacttatcatttatgatgcggttaagtagagacctccacatgtctattcttgaaggacgatttccagaattcgtgcgaggattcttgagggtgcagtttccaacgggagacgttccgcagtgggttcgcaacgcgatggaggtcgctggcattgacatatccgagtgctgtgcttccaccaatgtctgacaccaagcgtataggggccacctttaactgtaccggttgactgcaaatggagttgtgccgagttaagactcttcggcaagcaaaagacgacgacaggctttcacaaagaagtttttttccgtcatacatgtagggtctcacacggattcagcataggattttccaatagtatgctgaagcttggcgacaggttttgttagtgttttgtgttgtgtttggaaaccgcagaggtatgctatgctattcttctggggtctaggttatgcttcgtcttaatcactggatgtgatttttagtggtacggtcagatcaaaggaaggtgtacccaactctgacgaatattttttgttataacgaaaagaatgttatagtccttgcaatgatctgaacctgactggctgactgggtctgcagcatgcagcagctggaacagtccagtcccggcgtgctgctgctg

SEQ ID NO: 30347 - DNA, 1939 bp, Zea Mays
ctcttcgttcttccccagcgtttgtcatcgccacggcttctccagagtctgttgactgtgccggaccgacgagataagtcatcagatgacgtgagaagcagtcaggcgttggtgcttgcttatatagctgcgctgcctgcgcattcacgccacagcgtcctcccctccccgtcctccctcttcttcacaccactcacagctcacaggtcctccccctcctcctcccgggctgccattgctgccgcccggccagctgattcaagatgccgaccatcatcgtctcggtggacctggaatgcagccgctgccgtgccaagatcgagaaggtgctcaacaggatccaaggtgtgtttgcgcttgcagctccgctctgttcgtactgccttgccttcctccacctgtggactggtggtgtcgcgctggttccgttgatggcaactgatactgactgagcggtgggtgtttctttctttctttctttcttgggacgatatggatgccgccgcggttccgtcgttgctgtgcgcaccgtgggtccgcgccgcggccagagaagggtgagttctgcatcgacgacatcgacttggacgagaagagcaacaaggtgaaggtgacggggcccttcgacccggacaagctcgccgacaagctgtgctgcaaggcgtgcaagatcatcaagcagatcgagatcgtggagccgccgccgccgccgccggagaagcccaagaaggaggaacccgccccgccgccgccgaagaagaaggaggagccggccccgccgccgccggcgaaggtcgagccgccaccgaaggagaagcccccgccaccagcaccgaaggaggagccaaagcccgccccggcgccggcgccgccgcccaaggtggtggaggtcccctacccgtggccgtacccgtgcccgtacccgtacccggcgtggccgtccgactgctgctgccaccacgggcacggcggctgccactgctgctcctgcggcaaggcccccgaggccccggcgccgcccccgatgccgcagtacgtgccccagccgtacccctgcggcggcggcggcggctaccggatcgtctgcgatgaggacccctcctacgcctgcgccatcatgtgattcattgtcccgttacgcgcccacaacccaccacaccagtgtcagtcatctcgtcatgccgtgccgtgccgtgcctcccgtataatcgccgtacagattcatcatacacacacacacactcatattatatatatatacacagcatcatgtataccgtacgtacgtccgtacctgtaccgtctccttagcttgcgtgttatgttgtgcttcaattaagtacggagtatcatatagtagtacatatatgttaggcaaagtgagagaataaaataagcgatgatgatgttggttttccgtgtataaagaagaagaaaaaaaaaaagacaaggcgagagtgagagagttggcgtgttggtggcagcagaaatgtcaattttgcgcagcagcctccctttctttatgttgcgccaagaggtggtgaaaaaacggggggggggtcctttttatcgacgctttcgacgacctccactttcgttatctcgcttccatttccatctgtggggacgagcgatgtgacgtggccatttctgtttagatcatgtaaagataggaggaagacgatgttgaaggggtgcatgactgggcgggcgttgctaggctaggctaagggcctgtttgtttacccccatggattatataatctggattatttttggaggattatataatctggattatataatctggattatataatctcggtagtcctgtttgtttacccagattatttgagttgttaatatgattcttttgtatgagaaagacaagaatgccctctatatttgtactaggttgaaactcatatatgaaaaaaaa

SEQ ID NO: 30348 - DNA, 167 bp, Zea Mays
gttacgatgagtagaatattattatgcagtatgttctcatgtttggtgtgatgttaattttttatgtaccatgtttgtttgtattgttgcgagtagacgggcaggcaactgaggacctagatgctcagcaggtggaaagtactgagcagaagctcgttgaaggcaag

SEQ ID NO: 30349 - DNA, 2962 bp, Zea Mays
cggcacgcaacaccgcttccgcccttttctgatttctccatcggactccgatgccgaaccccaaacaccgcttccgccctttctgtttaccaaatccacacggtcccttataaaaacaaaaacaaaacaaatccacacggccccaatccacacccgcgtgccgccgccgccgccgccctcctttctgataaacgccctccccatcggcgtatggccattgaccacatcgtccgcgccgccctccgccaccgaggaaaccgcaagcagtcatcagcaatgccgccgtacgcaccgagagagcagcggcacgacgggccgccaggggaagtcccgccgatgagcgccaaggacgtgaccgccatcgaagccctcctcggatactgcttcatcgacaaatctcttgtcgagctggcgctgacgcatggctccttctactggcccaaccgccccggggatacctacgagcgcctcgagtacctcggcgacggcgtcctcacctgcctcatgtcgcgcgaggtcttccgcacctaccgcacgctccagcccggcccgctcacaaggctccgcgccgctaacgtcgacactgagaagctcgcgcgcgttgccgtccaccgcgggctccaccgctttttgagacacaaggcacctaaacttcaagatcaggttgtatatccaaactcctttgacagtttgtatactagatcaggttgatgtttgtgcatcgctcatccgtccccttatagtttcttgaaaattatcgatttgtccggcccttcgcctgttggtttttgatactatctatactggacataataaaaaaatacaattaattggcaaaagggctggtagagcatcctgtttttatggcagtgtccattatttggaatcaaattatgtattttgatattatccaaaaacatagatagctaagtcaaattaataacaaatattcctgtgtgtttcttgtgccaattagtcatatactggttgttagtgcaagtcttctccattgaagcgataaactttaagatttcatcacaaatatttgtaagctatgcacatggataaaaggttaaaaataatcaactagctctcattgttttccgatcgcctgatcgtctgatcgatgccattgggcgatcagacgactagtcgcgattaggcgacgattagggcgattagtcgtccctgattgaccctaatagtcccctggtcgtcctatgtattttcaggacatatataacactatatatagatatatacttatatagtatagagacttgctcaggacaagaacaagtatagacaaggcagcactataaatagtccaaaacagcagtacatctccagcagcaagtctatgaaattatgaaactgcaattctacaacttactagaccatgaccaagaaggcaacacctctatgagatcaacatacaactgaagtctgaacccgagtaattaacacgactgatcgctaaccagatgactaatcgctacatatcaccgactagtcggacaatatggacgatcaggtcacctgatcaaatcgaacccccttatcgagcactgagtagcgatcagtctgactaatcgtgattagtcggacgatctgaaaacaatgcgagctcttatcctaatgcaaacatgatgttggatggcgtaaagtctaccacaatacccttgcccacagaatgataaatgatatatcaaactggtttaccactataatcactttttaacttatcactataatcacttgggtgatattttggtagctattgaatattttcttttacaaaagtatgctttttgtaattaggatgtgacaaattattttaacttttttactcactttgcacaatttcaatatattatctagcagattatctagattaccgttatgctttatctcatttacttctgttttgtattgagtgatatcttctttatatatccttcatgttctggcgtttacagatctgttttttcatagaagaaatgcgcaaatatccagttcactcaaatggactattggatcctcctaaagttctgtgtgacattgtggaatctcttattggtgccatatacttggactccaacttcgaccaagaggaggtctttcgaacattggctgatccacttattggcttagagacattaggcaagcaccctgtaagcgagctttttgagttttgccaaaagactcaccgaggggtgaaatttctgaaagacgaatgggataagagtttgaaggttcaggtgttgattgatggtgaggtagttggaagtgctatttatggtccaaagaaggagatagctcagaaccgtgctgcgaaggatgctctggataagctaaaggacacacatggacacacccaaagtgaatcagcatcagtagatgtttctgaggcattggacgaattagacaacacccaaagtgaatcagcatcagtagatgtttctgaggcattggacgaattagacatagctggaacactaaattgagtgacatatatagaaatgcataataggtgcaattaatggcaatgaagttttgaatcatagcaacacttggttggtccattttcattgaatttctgtgttgctatgtaattatctctactatatgaaaataccagttttcatggttccatggtttctaccatcaaagtgctccataatatttaggtaaaaagggtaaaattataggtatatgagaattcgaactatggtcgttggctccaaacccatatatatacccacctagttaacaacagaacacgtataaataaaaaaaacgtagttttgtacgtgcactttgctagtcgatattcaaacaccggttaccatcaattttgatgacaaactacaaagaaattgttcattcgatttaatttcaaggctaacctttaattttgaagtgcatcaggaaacgcaacccgataatatgttctgtatcg

SEQ ID NO: 30350 - DNA, 1985 bp, Zea Mays
aaaacctcagctccaaagctccattacaaaacggcttggaaattggaattctacgatttctagcttggaaatgccagaacattacaagaaaataaaggagaggcgcggctgctggatctccactgctctttggctctttgcttccctggtactacctagtagaaaatgcgcatctgaacggcaggcagcgccagcgatatacacctcattcaattcatcagcaggtgaaaaagaggcaaaaagaaagagaaaacagccgaaacgccttcccctccctgcgccgctttccgctacgcccggtccacgcagcggagccgtgggcctgtaggggactcggtgctggtacgtcatgtcagccgccgagccgtttcctcgctcactgctggtgctgctgcgcctcgacgccgccgccaacggcaacgccggcgaggagccaccggtccatgggcacgcactgcgccttgtgcgcgcgcttccagtccagcgcctggcacgcgcgggagcagtagttggccgcgccgcacacggagcaccgccggaactcgtgccgccgcgtctcgcgccgcccgcaccgcacgtgggagcaaagacggagctccgcgccgtctccgtcgccgtccacgccgctgccgtcgccgtccttcttcccgcccgcctgggcggcgcagcgggaggcccaccagtccaccatgaactggttcgccgcgtggggctccgcctcggggaggctccacccgaagtcggacaggagggggcaccccccgccgccgccgacgacgccggcggccgcggcgaagggcagcgcggcgacggcgtggcgcgaggcggccgcggagagcgcgagcgtgagctcgcgggcgttcgccgcgaccagcaggcgccggccctcggcggggtcccgccgcacgccgtagccgtcctggaggcagtgcccgagctcgcggagcgcgtcgacgtggcccagcgaggccgcgcgcgcgcacagggcagcccccgcgcgcaggtcgcggtccgacttggccccgccgctgccgttgaactggatgaccgccagcgagtagagcgccgccgcgtgcccgccgacggccgccctcgccagcagcgccgcgccgccgctgcggctgcccaggcagtagaagcggatctgcagaagttgtagcaggcctcgaggttgccggcgtcggcgcagcgcttgaggaacctctgcgccggctcggaccacgccgccgccttgaccgccagcgacgccggcgaggccttggcgaacaccatgtcatggctgccgagctcgttcagcctcttgcacctgcaaacgcgaaagacgtcagcgcacgatccttggcctctccctccagcttatgtttccgaaaacagcacaactgccgtcgctcccccccacgcatttcgattactccatagcgcgagggagacggtgcgctcgccgtgcgaggaaacacgaggagttgatgacaaaacgcaaaggatgctcgggcaggcaggcagacgtacgtgaggtggaccgagagcaggtcggacggcgccgaggaggcggcggcgagcttggacaggatggagaggacaaggtcatcgggaagcgcgtccaggtagtccggctcgccggcaggccgcttcctgcgcccgccgcagtcgcactctccggcgacggccgacggcgacctcttcctcttctgacccaccaaggcaaccacctcgccgccgttggaataccgggacccgctcctcgtcctcatctctctgtacctccgcaggagtcgtcgctgccggggggaaagcgggacggggcgagcggtgggagaaaaaaggttaaacgaccgcgcgcgcgggcgggcgagacgacagggagaagtgcggagcggtgtgcttgtgtgctagaagggcgagcaaggcagagggcttttatataggaaaggagctaggaggcgaaggaggagcgtctccgccgtaccgtgggccgtggaggggtc

SEQ ID NO: 30351 - DNA, 2071 bp, Zea Mays
cgattctcccagtggacttgcggtacgggaagaggtaggtgggctggtggccagcggtggccagtgggtcgttggctggctcgcccctgcagtactcctgctccagggcaccggaccgtgctattcctcttctccctcggtcccttctcaccgggggcatcacacaacacctccggacctcccctcccggtcgacgcctcgacggtccgctccctcccaaaaacccacagcccgctccgacgctccctcccaaaacccacagcccgctccggcgctccctcacaaaaacctaccacctgccactttcactccaccacacacccacacccccgcgccatggcctctcctcccccgacctccctctcctccccccacctcatccatctccgcctccaacccctacccagcgtcccgccgctccacctcactaccctccccttcctgcgctccctcccgctccacctccactcgctccgcctcaaccgaccccacctccctcccctaccgctcgcctcttccggcagcggaagcgacatcaccggaagcggcggcgaggacgaccttcctccctcgggcgggggcggcggagggggaggaggcgagggcgatggtgagggcgagggcgacggcagcgagggcgactcggtcaacaggagggaggccctgtttgttctggcgcaactcggacggaagctcgagagcctgccggccgacctcgccgcggccgtggagggcggccgcatcccgggcgagatcgtgcggcggttcgtggacctcgaggcctcgccggtgttcaggtggcttctgcagttcggtggcttcaaggagcgcctcctcgccgacgacctcttcctcaccaaggtcgccatagagtgcggcgttggcatcttcactaagactgctgcagagtatgagaaaaggagggagaactttgtcaaagagcttgactttgtgattgcagatgtgttgcagattttatgcttgtatggcttcctgctccaaccgtgtctttacagccaccactagcgatgaattctggagccattgctaagttcttctacaactgcccagataatgccttccaggttgctttgtctgggacgtcatactcacttttgcagagagtaggagcaattttgaggaatggtgcaaagctttttgctgtcggaactagtgcctctctgattggcactggtgtgaccaatgcactgataaaagcaaggcaggctgccagcaaggattttgccggtgaagttgagaatattccaattttatcaactagcgttgcatatggtgtgtacatggcagtttccagtaacctcaggtaccaggttttagctggagtgattgaacagcggatgctcgagccactactgcaccagcacaaactagtattgagtgcagcatgttttgcagttcggacagggaatacgtttttgggttccctactgtggatcgactatgccaggtggataggcgtacagtaggctcaagcatgggtacacaaatgcagttgctcggagttccagcaatatgggttcttcgtgattttatattaccacgcttcctccaactggcaagtactcgtttgcttcatgggagactcttaggacagattttgatatcattctttaaacaatgccttgaggaaagcgtgatttatcgaaattgttcccgcaagcaagagagtgaatttgttttgagggcttaaggttgtgttgtgcgtgttggattggattgattaaaattcgtagtttcgtacagttttgtcattgtttgtgcaagttcctgtgatttggttatcgtggtcgagcaccatttttgctggccatgcctacaccaaagtttggcattactggcaaacatatccgggtgttgtcacgagaagaaaaccattctaacaagtgggcttaaaagtgaaagtgagcccaaatacaaacaaaaccaacgaaaggagttggtagaccgagtgcaaacagcaaaaaatagtaaaagtagatcacagcacgtcaaaaaaaacagagggccggcaatgccttacgagctgtaaatattcgcaacgagaaattca

SEQ ID NO: 30352 - DNA, 850 bp, Zea Mays
aaagatgcgtgcctctgatattgacataattagttccctcgaagctggaacaagtacttcagcggacgcagtggagtgggcgatgtccctcctgttaaacaaccctggcgcgctggcgaaggctcaagaagaaatagacgcatgcgtagggcaaccagcacgcctaatcgaggcggccgatctcccgaagctgcaatacctttggtgcatcatcatggagacgttgcgtctatacccgccgacgccccttcttcttcctcatgaatccgcaaatgactgcacggtcagcggatttcacgtacccatggggacaatgctcctagtcaatacgttcgcgatacatagggaccctgagatttgggatagacctggaagcttcatgccagagaggttcctgggtgagaacagtgaaggcaagatgttcaacccatttggtatgggaaggagacgatgcccgggggagaatttgggcacgcagatggtaggacttgctctggggactatgatccagtgtttcaattgggaaagagtaggagatgatcttgttgacatgaccgagggagctggattaaccatacccaaaaaagtgccactggaggccttctatgagccccgtgcttctatggcgaatctgctttcgaagatttagaggtgtcgtgcgagttttatagtaaagtttatagctacatagtggttattaatcctagacaacgtatttacgtgtgttgagatatatgttggatataataggatttcgtttcctattgtatattcatacatagtgaaggtatcgacaaccttaagggtttaagcccttacaataatttttatggtatcagatcttactcct

SEQ ID NO: 30353 - DNA, 3670 bp, Zea Mays
gctgcctgagggagagtgttcaatcaaaagtgacccacctgtaaaccataggggttaaaaaaaagaaagaaaagtagggagaggccttgacgacgctgacagtgagagactacaatgaatggtattgataaagaatagtgtagatgtggagtagatctgcatcgcggcgcaggaacgaccgaacgagtggctcccgtgcatcctgctcccagccaaacgcccaaacccatccgtcttcgggactagggtcccggcatccatcagtgcaagggcaaggcagttggccgccgcgcccccgccccgcgggtctcccctcctgctccggtccagggcgccccggccccccctcgtccgaatcccgtcggtggtgagccgccgccgggtgtggcccgcgagctgcgacgcgccgacgatgctgccaaacggagaagctccctccggatccatgccgccggtgcctgccgccgacgcgaacacctctaattcagatgacactagatttgatgcgtcacagtatgccttttttggcaacaatgtgctggaggagattgaactaggcggattcgaagatgataacagcagtaatgctgctttcgctggactcgatgatttagagcgcccactttcttctcaggggattgcactagaggctgaagatagttcattttcagatcttgatgatcttgcaaatacattctcaaagctaagaagagatgttaacctaccaaagcatattggggtaaataaccttgggacttctttttcaagagaaagttctgctgctgctgactgggcgccggaatttgaatccccactctggtccgatcagcatgtgctagttgctaaccaaggaccgaatggcaatggctggtggtctccacagcatcattcttctctccttgctgattccagattgcacagaacatcctcatcccctcagcaacaggaacaacacaatcatgatgcacctattcttggaccaaggccatctcctttgcaccggacatcttcatacccgcaaaaggagcctcagtacaacccagctgaagtcattccaaatgcaccatacatgtcaaactatctacctggtgggccacccaattcagtgcctcgacaaccacatcagatgaacatgccatctttcaatgaatttcagatgcatatgtctgcgcaaagtgagaccccattctcccagtttcctcgtggagggacacctccagagccattatttggtggaaaccggggtcatatgatttcaacaggcttctcaactaacagcagtggacaacgagaccatctgctgaataatgggcagtttcatggggaaactgccagcatcatgccaaatttgctgccaaaccatctacaacgtccgaatacattcatgccccctcaattgttgacagtacgccaacagcatggcatgctcccaattcagcaatcttcaaagcagtcatcaagaacacagacacacatgtttggcccccagcatccaccacaaatgatgaataggtttgataattttgggatgcctgagttcagtgatccaagagcaagatcatcaatgcaccatggcaggcaaggtcaacattttcctctccatggctctgagtttggtattatgaagatgggtaatgggaggtcaaggtttagatccaagtatatgtccactgaagaacttgaaaacattttaagaatacagcatgccgccactcatataaatgatccatacatcgatgattattaccatcaagcttgtctggccagcagatatgtggatgcaaggtcgaagcaccgcttctgcccaaccttgattcgtgatccatcatcctgtacacggagtaaggatgagccacatgcataccttaaggttgatgcccttgggagactgccattttcttctgtacggagaccgcgtccactccttgacgttgagccagcttctgcaactgatgatgacaccgttatttcaaagcctcttgatcaggaacctctgctagctgctaggatcacgattgaggatggactctccctattacttgacatagacgatattgaccgcttgcttcagtttagccagcagcaagatggtggtttcgaacttaaaaatagaaggcaatctctacttggtcagctggcagaatcgctgcagttggttgatccactaggtgcaaataaaaacacacatctgtccgcaaatgatgatttggtatttcttcgcattgtttctctacccaagggccggaaactactttcacgctatatcaacctcatggtacctggtagcgatcttgcaaggatagtttgcatggcagtattcaggcacctgaggtttgtgtttggaaatctgccctctgatgacggcgcagctgagacagtaactaaactggctagcgctgtagcatcatgcattcgcgggatggacttaagtggcctcagtgcttgtctcgcagcaattgtgtgctcgtctgagcacccaccccttcggccccttggccatgctgctggcgatggtgccactgtcgtcataaaggctgtcctggatagagcaacagagctcctcaccgagcagcctgccgcgccagactatggcgctccaaaccgagccttgtggcaagcgtcgttcaatgccttctttgggctgctcactaagtactgcatgagtaagtttgatagcatggttcacacgatgcacaagctcggtgctgctgctgcaacagcgatacgcaaggaacttccggttgagcttctgcgcgccagccttcctcacacggatgagcagcagcgcagactactgctcgagttcgcccagcggaccgtgcccgtctctggccatggctccgacgggtgacggacgggcgggtggcggctggtggaaccatggcatctgaaacaataccagcttaaggtggtcagcgaatattggtgcgctagatgcggtattttattctatcatacgcagacctgcccaatgaatcgagcgttccttgagctgcagttcagatgggcatgccggcgttaagtggatgtatgtcccagggctgtgtttcgttggctctgggtgggaacggaacccccctgcacgttccttgaaggcaattgcaagaaaatactgcgagctgttggtgtttcggtttgcagtgtttgtttgtagtggcgtcaaggcttccaaggttctcatctcatcactccggacgggtgccaggaagatgtggtttaacacatgtataaactagcaaatgcttggaaggttgatatttggttctgtagccagccattcgaagattgttgggtggggggttttgtttcctgttatattcgcaactgaatacattatcttgcgaagctgttcagtctgtaacgagttcattgggaattccactatatatccttgttatggatggtcaggagctttgtatttttgtgattctgggtattacccttgtgttccataaaggacgctttcttcctcgctcctgaatccattgcatcgtgtcctgtccgaatgggtgatctacacttttagctttgcctttgccctctaaagataatagtcaaattaaaggactggattcaagaatcatcattttctaaaagtcgatttggaaaacaactctagacctgtttttagtggctttcgaatggaactgtaaaaacatatatcgaaaaa

SEQ ID NO: 30354 - DNA, 3311 bp, Zea Mays
cgatcctcgtgctgtccgaagtcaaacggtccaaatcgaggcacaccttttcttctccctcccgtcaccgtcgcactgcctctgcctgcgtcgcgatcgcgacatgcccggcgccgccaccctcagatcgcgcgtggccgtcgcggccgccgcgtgccttgcggtcttcgcagcggtggcgctgctccaccgcaagcgccgctggaaccgggcgccctcctcgtctcgtcgcctcggggtcgggggacgcccacgccgcgcttgcgaggaggaggagaagccgcaggaccggttcaagcgcgtcctcgcggacaactcctactccccgttcaaacacccgcgccgcaagagtgctcagttgggaagtgcagaaggcgaggcacccctgccaccgcctcaagaattgtcacaaaaaggtcatccatttgaggaggaaatcacatctttgctaaagaacccccctggttttcatagctttatgctgtgtgaccagtgcccagaaatgagtgctacatataattgggttcatacagaaactcaactggaacatttggcgagattattgggtgaggaaagagcttttgctgttgatacagagcaacatagcattcgatctttcctaggatatactgcactaatgcagatctctacccagaatgaagactatctgatagacacaatagcactgcacgatgtgatgggcattctacgaccagtgtttgccaattcttctatctgtaagatcttccatggagctgacaatgatattctttggcttcaaagggattttcatatttatgttgtgaatatgtttgatactgctaaggcatgtgaaattctattgaaaccacaaaaatcactggcatatttgcttgaagtatattgtgaagtgaccaccgacaagacaatgcagcgtgaagattggagactgcgtcctctgactccagaaatgatcgagtatgcacgcactgatgctcactatctgttatacattgcaaattgtttggcatcagagctccatgcaaaagcctgtgtcatcgctcaaatatggtgtgcatgcaactgtattcaaaagaaattgaatcccctcctggagcttccagtgcaacatctattctctcacgaaatttgcaaactcatgggttcgactccaaaaagtctagtgaagtgaaggatcttgtttggaaattttgtgcatggagggacttaatggctcggatgcatgatgaaagcttacgatatgttctgccagaccaagctatagctgcccttgccgttagtcttccaaagggcccaacagaggtgtttgctgtcatagcagaaactgacctaagcatttcaagtatgtacccttccttgtcatcaccgtcacctcttgttgtggctcatgtcaaagaactctgttatctgctggatgacatcactaccagcatggacagcatctttaaaagtttactagagaagtataaagatccaagtggattatgtcgactatcagtttataattataaccttataacacacctaagtttgaagcaaacaagtatgttttccgttgctccaagtggaaagaagttgacagcactgcctaataaaaaggtttcacgggatttattcattaaaaagttttcctgcaagtccccggtatatcacaattgcaggatttatgctagtgatggaagactactttgctactgtgaccgcaaaaaactggaatggtacattcagcgtaatttggcgaaattgattgaaaatagtcctccagcaatcatgcttctctttgaacctaaaggtcgtccagaggatgaagataacgagttctatattcagagcaagaaaaatatttgtgtgggctgtggagaaaagagccattatattagatacagaataataccgtcatgctacaggatgcattttccagaacatttaaagagccatcgttcacatgatattgtacttctttgtgtagactgtcatgaaatagctcattcagcagctgagaaatacaagaggcgaatagcagaagaatttggaatacccctttttgtgcaaaagataatgaactcgggtgatataagtttgattaccaacacatcagtatctgaagataaattgaatggaacaggtgtctccccattgcagctgaggactgctgccatggctcttctacgtcatggatccactatgccattgaagagatgtgaagagctaatgcagattgtgaagtcatactatggtggtagagatgtgactcctgaagatctcgagatggcattacttgttggtatgagccctcatgagcgaaggcgtcttgaaaagaaaaagggatattcgtttagagctcaggctcaaactattattagaaagagcagcagcaataccatctcagaagacagtggacatggatcagaaaattgtcatgccttatctgcgcgatttcctgaggttggaactggtagtaatggtcagcaagagtttgatgagacagggaatcaaaaccagctagagaatttaaccctgagccagggaagctcaagtttgccagtcagcatggaggacaccacttctgatcatgacactgtgacactcgagaccgataccgagcagcaagcaagaggtgcctgtactcctggaaacagtcatgacgacaaggaacaatccatatgtgacaattctagtcaggtcatttccaagaatgctgagaagatatccctgttgggtcatgggcatcatggtaaacaagttgtggaacttttgttttctaatggtggagaggaatttgttaaccagttttgccaaaggtggaggcagatctttgttgaagctgttcacccccgttatttaccttctggctggaatattaaccacagtggacggcgggattttggtgacttcagtgtctacaagccaccaaggaaagatcctcaatctgcaactgcaagggattaggcttacgcgggtgtcatgctgtcgttggtaccctgaggttcaacttactttccagaattggttccattcccttaaacttgatcttgttgtacttgttccattcccttaaacctgatattgttgtacttgtatgtatctcaatctgtgtgtttgttcgagtaccttgaaataccaatttcatctcctatgtatttctttgagatgaactttgcatcagttttgttgagccgtttttttatacgtgaggatttagagtactaacaatttaagtccaagaaaaatcaacagtgaagttcaactcagcagattaaatcttcaaagtgccgtttttaactgggagttgagctcaaattggtttcttc

SEQ ID NO: 30355 - DNA, 287 bp, Zea Mays
cgttgatctagttggttgcggctcggattagatcacgggtttattaaatctcgggcgtccattcgtaatcgagcggtccagatcacataccgattcatctcagggtcgatctaatcatgtctgtccgtgcttgatcgtgtggtccacagtcgaagataccccttcggccatgccattatgcaaaagagaccccgcataactctataaacaacccgcggtccatcgcagaggagtgatgagtcttagaactatttacatattaaaccatgtacttatctgttttaatg

SEQ ID NO: 30356 - DNA, 1368 bp, Zea Mays
cgttgccattttttctccgcgtcctctgtgccccaggtagcgatgctgcctttataaacctccacctccaactcactcgtatctcccttccgttccccaattcgaaatcgaatcgggtccgacgggtcggtcttgccgtgcgtgcgtggctgcgcgagcgactcgactgcacccccgctcctcccagtccccacacactgcgcgccgccgccgggtcctcctagggtttcgccgcgatgtcgctccggccgagcgagcgggagcagatgcggaagggcaactacaagcagacggtagacgcggaggagagccgccgccgccgcgagggccagatggtggacatccgcaaggccaagcgcgaggaaagcctccagaagaagcgccgcgatgggtttcccgcctccgccgccggtgtgccgccgatgggccactccaccgcgctccagcagaagctcgatggcttgccggcgatggtgcaggccgtccactccaacgacccctccgtgcagcttgaggccaccacacagttcaggaagctgctttctatagagcgtagtcccccaatcgaagaggtgatcagcacaggagtggtgccgcgattcattgagtttcttacacgtgaggaccatccccaactccaggcacatcagagaacactaaggtggtggttgagagtggtgctgtgcccatctttgtcaagctactcaactccctcagcgaggatgttcgtgaacaggctgtatgggctttaggtaatgttgctggtgactccccaaagtgccgtgatctggtacttggtcatggtgggctataccctttgctgcagcagcttaatgagcatgctaagctttcgatgcttaggaatgctacatggactctctccaacttctgtcgggggaagccacaaccaaactttgatcaggtcaaaccagcattgccagcactacagcaccttattcactctcaggatgaggaggtcctaactgatgcctgctgggcgctctcatacttgtctgatgggactaatgataaaatccaagctgttattgaatctggcgtgttccctcgccttgtggaacttctgatgcatccttcggcctctgtactcattccagctcttcgcacggtgggtaacattgtaactggggatgacatgcagactcagtgtgtcattgacaatcaagcacttccatgccttttgaatcttctgactaccaaccacaagaaaagcatcaagaaagaagcatgctggacgatctcaaacatcacagctggtaacaaggagcagattcagtcccagcaacttcaatgatatcacctggttggtctcttattcaactgctccgttctgtttggtttcttcccaaa

SEQ ID NO: 30357 - DNA, 321 bp, Zea Mays
aaatcccccggccccgagctcaccaacctttcgcgtgccgatagactgactggacttcccgccgtcttcgtgagttgcttcgcgcttcctatataaaagcaggctggctgctgtctcgcagcttcgcgccagcagcacaaacaccggagggaggagaggcagccagcagggccgggcgggcaccgagcgctgttgtgtcggtgcccaagctgggaaaaaaatcgccggagggaagagaagccccggcggctcccttggttggcacttggcaagcaagcagcaacccatacccgtctccagccgagatctgtctcgagctcc

SEQ ID NO: 30358 - DNA, 3373 bp, Zea Mays
cctgttcccacccatgtagccaccccccacccacccacaccacacacacacccaccgcgcgcagcgcagtccatccatccacgcacacgcgcacccgtccctctcggcgcccctctcccccctcctccactccgctgctgcctgcttgcctcctccttgccgccgcgaccgcgaccgccgttcgctgtcgaggccagaggagaggagtggtcaagtccgaggccacctgcccaggctcagacctcccccgccacaacgcgagccgcatcgcctcgtctcctccacgccatacacgcccgccttcccttccccggcgaccaggacccctcgcccgcggcgccagcgagctcccccggccagtcgtaggcctcccggagctcagcacgcacgcaggtgggtccagtgaggcctggttgtgcgcgttcctgcgggcgtcgtcggggcagatccatggaactcagccgcccgcagcgcggatagtactgcacttgtgcaccagccaccagcggatcgccaggactgcccacctgctgctgcttgtgtcgctagccatttttcgggcgtctggcttggaggatatggccgcggcgatggacgcgcccaaccctggagcggctgctggcccaggaatgcctagtgacgccctgtaccaggagctgtggcatgcgtgtgctggcccgttggtcacagtacctagacaaggcgagcgtgtctattacttccctcagggccatatggagcagctcgaggcgtctgcacaccaccagcagcttgatcagtacttaccgatgttcgatctaccacccaagatcctatgcagagtagtcaacgtggaactacgggccgaagctgattcagatgaagtttatgctcaaattatgttgcagccagaagctgatcaaaatgaactcaccagcctggacgctgaaccacaagaacgtgaaaaatgcactgcccattccttctgcaagacactgacagcttcagatacgagcactcacggcgggttttctgttcttcggaggcatgctgaggaatgtcttcctcagctggacatgtctcaaaatccaccttgccaagaactggttgccaaagatctccatggcactgaatggcattttcggcacatttttcgagggcaacccaagaggcatctccttaccaccggctggagtgtctttgttagctcaaaaagattggtttctggggatgcattcatcttcatgagaggtgaaaatggtgagctacgggttggtgtaaggaggctcatgagacaagtaaatagcatgccgtcatctgtcatatcaagccacagcatgcatcttggagtattggccacagcctcccatgccatctccactggaaccctcttttctgttttctacaaaccaagctactgcatccattgagtgatgtcttatcccttgccccttcctttgcaccaaagatacacactatggttgtcctagttagcattatcgtgtgcatgttttgtttccttcataatcttgctcgctaaactttatgctccttttatgtgttcccagaactagtcgctctgattttattgtgagtgtgaacaagtaccttgaagctaagaagcagaaaatatctgttggaatgaggtttaagatgagatttgaaggtgatgatgctcctgaaagaaggttcagcggaacaatcattggcatcgggagtttgccggcaatgtcaaaatctctgtgggcagattctgactggagatctctaaaggttcaatgggatgaaccttcatccattcttcgtccagatagaatctcaccatgggaagtggagccactggatgcagctaatccacaatcccctcaacctccactaagggctaagcgtccacgacccccagcttcaccttgtatggtttcggaactgccttcaggttttggactctggaaatccccaattgaatcatcctgtacactctcattttcggaacctcaacgggctcgagagttatttccttcaatccccacgtcaaccttgtcatcttcatcaaatgtcagttttaattcaaagaatgagccgtccatgctaaccagtcagttctactggtcagcaaggcatacaagagctgactcctgcgctgctagcaccaacacagtcgtaattgaaaagaagcaagagccaagttctggtggttgtagattgtttggaattaatatatgctcagctgaggaagaagtattacctgaggttactgctccaggtgttggttatgagcagactgctgcctctgtagagttgaactcggataagctctcacagccatctgatgtcaacaattctgatgccctagcagctagcagtgaacgttcacctcttgaatcccaaagccggcaagtgaggagctgtaccaaggtaattatgcaaggaatggcagtaggaagggctgtagacctgacaaagcttagtggctacagcgatctttgccagaagctggaggagatgtttgacatccagggggagctgggttccacactaaagaaatggcgggtcattttcactgatgatgaggatgacatgatgcttgttggagatgatccttgggatgagttttgcaggatggtgaaaaggatttacatttacacatacgaggaggcaaagaagctgacatccaagtcaaagttaccggttagcagtgacagcagcaagctgagcgctgcgaactcactgtctgaatgactatgaacaaaaactgcagagtgctaacgtccctctaattttgttatttccatcatttgattatgggggtgaatgctcacggttgctccgtgggctgaagttgtggttggcattcaactgccttgagttttggaggcttttggactgccttgccagcatgagcctcctggaagaggcaccctggcatctgcgtgccatttcccatttgttcgtgccgtttggtaggagtatccattggcttatttagcaggtccctggtttgaagaaagaagcggtcagctgcaagatggacggtgccttgcctcttcttcgactacttagctagtaattaggactatgtatgtaatgaatgtatatagtgccattaagacgcccatgccctggtattgaggtcccggcatttgtatgaatcaattgttcggaaattgttacctttagcagcaacgaacctgagggtgtagggtggccaggtgggagaagttgtatgtttctttcagtaacaatctttgtgcaagtgatctgtatatagtctactgttttaataagcaatgttgtgcaacttgcgctcctacaccctacagtacagtggggcttttcttgtgcttactgttcgcttgatgactgtctacatttggctgtgcctttttgttgcccg

SEQ ID NO: 30359 - DNA, 2072 bp, Zea Mays
acgagttcaaaccaattttctaggtgccaaatggaaagcgtagtccaaccaaagtggaaagtgtgaccgggatccccatccgttccagcccccccagaacccagagctccaaacctaggccggagccgcggtgcaagcagctacgtggattggacttggacgtctggctctggaggtcccaagttcccaacgcttgctggagttgagatctggtgggcttccggaggagacgccgacggtttgcgaggtttgctggctccgtggcgtcgcggaaggtcatggagcaccgcgccttcgactgcagcgtaccgagaatgcatttcagtgggaacagaaggcaattagcaggcccattttctcagccaagaccacacaacaagttggatagcgatatacatcagattgagcaacaggcatatactggtgttcttagagcattcaaaatgcaatcggatgccctgacatgggaaaaagaaagtctaattactgaactaagaagagagttgaaagtctctgatgtggaacacaggatgctattaaacatggtcaatgaagaggaggctatccatagaataaggcagtcaaggcagggatgtggaatgcaatctagcttgccttataatagcgtagttgatcacaaccttggacctatcaagcggcagaagaaatcacatcccatctattcactccctgtggatccccattcacccagcatgcctttgaaagcattggtggacaacaagatatatacagtaggtttggagtattcctgatcctgctttttgttcaccatcaagagtgtgcttatagttcttaatagttgacctcctgtcaagcgcgaaaaacatgccagttgcaaacaaattatgttcaagtggcacacgcacatacacaaattgaaccaagatgaaaaattaatcttttgaaaaataggcaagccaggaaaggtaatatgaaagcatgttgtggcatcctttttcattggcgatgttttgttgacgaggagccagaattctctagcgtctgatattttgcttgatcaattacatttttagtgaatgcttgatcaagcattgccctaacctagcgtctgatattttgcttaatgagttgggttcaacgcccattttattgtttcaaaatcttaatcatcattgaacactcatgtgtagttagtgtagcatgctttgtgtcgcactggcagttaaaaagttccccaccccccaccgcaccccgacagctggcacctgaaaacataagacggggatctgcctatcaaacccttccacatcagggtggttggctggcatctgatggtgctacgaaaggtatggatgggagaagcggaaggtatcacacgaacgagtattatgcttcacataatgacatggggcttttgaacttcaatcgtactgacatacctgatactgaaactcttgtgaaaaaggtggagagggtattatcccggccagatgtgtatgcaattgaaagggcaaaggaactgcttataggccaagagcagtcattgcttgatgcaattgccaaacttgatgaagcatctgaccatgaaagcgatgatacactcgttgggagctggatacacgccgccattgggtgacgcgggcagcacgcctctgacagggggcgatgctttggagttcagacctctggcagcaggcggagaggcaacgatatgtgaaatagtgctgtgtaagtaaaacgctacctgttgttagtccggtaggttaggttcttttggcagccaggcaaatctgtgtatgcaccatgcagtgtgatgggaatatatgtcttgagcaccatcacatgtgatgtgatgctgtctcgtttcatcttcaacgtgagtaagcccgactcctggaaatatgggtcgggtcactagttgtagtattgtagattcattgcccttccccaagttgcacaacttggaaatatgggtcggtttcactagttgtagtcttgtagattcattgcccttctccaagttgcacaactgctaatatcttaggatgtcccttgaaatggtatgctatttaaactttaccagagttcac

SEQ ID NO: 30360 - DNA, 3120 bp, Zea Mays
ggggaagggttttggaattaggccgccggacgccgttgcgtgggagagagcaaagtgaaccaggccgaaaccgaagctaccgccacgaccaccacccgcgcccactgcagcaacgccggaccctcgtctccctgtccccgactaccaggaggagatcccggcggcgaggatgagcggcggcggtgccggagggaagggggcggcggcgcccgtcccggccgggtcgaggaaactggtgcagtgtctcaaggagatcgtgaaccgacccgaggcggagatctactccgcactgcgcgagtgcggcatggaccccgacgaggcgatactttccaagaggtaaagagcaagcgcgacaagaagaaagagattaaagaggttcctgagacaagatatcgatcggcaaatagttctactaatcgaagccttagaagtggtgcagatcgtggtggacgtagcaattctgtgcactccagctctactgataacatgacctcaaggccaccagtctcagggtcttgtacggcatcagttaattccaatcaaatgcagacaattgcaagttcctctgcaaacaaacatatggttactgatggactagctgtatcattgcaatcatcgtgtgggtttcagcatggtggttggtctgggacacctggtcagttgtcgatggttgacattgtgaaaatgggccgccctcagggaaaggcttctagcaaacctgtggtcacagctgacagaggttatgctggacagtacccatctttgccaagcacaaaccagaacctcaaacaatctggaagcatggtttccccagcagagcttgacaaggggttacaacctgcccacaatttggttcaggttaagaatcatggtcattttactgctgatagcaagctcccatatggtactgattggtctccacaagacgacccaacatctgagaaccaatcttcccagcctgagacgtctggtgatccatctttgtatgaatcatcatttcagtcatctacattggttactgatgtagttaattcacatgaaaattcacacttggagttggatgaaaacagcacctttgcaatgagatcaacacctgcctctgagagacacttggaacctagtgacagtattcctgaatacaatgatggaatattaaacaactcaagttcatatcagcctcataattactcttacacagaacaagatgttgaggattccagtgctgatgtatcagcagcagcagaaaatttccagagtttaagcctacataatgatgagttagctgcaaaaaagactgctgaagataaccctgcagtgataattcctgatcatttgcaagttaccaatacagaatgtgttagtttgagctttggcagttttggatctggtgcattttctgggctactcccacaaaagaccactgatagcaatgtggaattccttgttcaagaggattctgcaacagtagatccaatagatgccaggaatcaagattactatgaaagtggtgcagtaacttcaccagcagaagaaaatcttgaggccatgctaggaactaacatggagaatgtcgatgcaccttctgtttcacaggctaatgagctcagtcaggacgtacttgatccttctgtacttaaatatgacgtgtcatcagtttcaagtcatgcttattcgaacatgaacactccacaacctagcacaatagaggacccacaaggaaacaaccaagcacatacgctttcccatttgtcaaacatgatgcaagcaaatcctttgagcactagcagcctattggcgtcaaatcaaaatcatccatctcttcatggcttagagtttgatttgccttatcttgaagcaaaatataacgcaggcacgactacaaatcctagaccagccatatccatgcaggaggccctgaaagcaggggttttctccaacgctcggtctacgcagtctcttccaagtactagcattccgacggggcatcctctccctcagcaattagcacatcacccttactctcagccgactttagcacccatcacacatttcccaaatatcgttggctatccgccgtatttgccacaaaactatgctgcttacctatcttcgggcaccttccagcaagcatacccgagcaatggagcattccatcagtctgctgccgctttgctcggatctggtatgaagtactcggcccccgagtataagaacaacctgtctgccacaggcttacaacagcaacatcagccacaaccgcaaccaccttcatcagtcatctctggttatggaggccttggaagctcaagcaatatacaaggaaattttacccttaatcagagtactggcactggatcaactcttgtgtttgatgatgcattgggcagacagtacaaagacaccagtcaacacatagctctccagcagcccgacaactctggaatgtggcttcatggctctggttcaagagcggcggcgcttccgcctaaccacttttatggttaccagggacagagtcagctgggtggctttggtcaggcgcagcagcaacagccttcccaattcggaggccacgggtacccgactttctaccagtctcagggtgggctgacacaggagcaccacccccagaaccttgctgagggcagcctgaatggcttccaggtcgcaccgtctcagccgtctcatccgagctggcagcatcagcacacctactgagcattgttctcccttgttatggtctgtctctttcgccgtcacaagccaagtttcgcgtgcttgtgcccttactcgatgcagagtaagctgctcggattttagctgagcttgtaccttcagcgctgagaagggtcccaggacccaggcatacaacagttagagcgttttaacatgctgcgtgcgtgcgtgtgtgtgtgttgccagaccgatgccttgtggtttttcgatagcgagttatatgtgcggaggcgcagtcatgtataactgagacatgataacataacaaccaatcgtttcgcttgcatttttttggtcatgcacacatgcggttatcgcttcaggaagaaaaaaaggagcacctctgactcagcttatggattataaatattttcaatctcacca

SEQ ID NO: 30361 - DNA, 909 bp, Zea Mays
ctctccttcgagcccctagactctgcctttttttccctggggcagcagccgcgccaggtgtcgtcggcgccgccacggctgcagagaaggccacggatctccagcggggattaaatgctattcaccatgttgtaaaggatcgactggataagagaatgaccaactgggagaaattctgctatcgacattgcttcgatgtacctgaaggttttgtggccgctgatgatgatagttcttgtgcaaatgaatcacaaaaagatgggatttcggattcagatttggatttggaacttgactctttgaggagaaagtttggaagtgctaacaaggaatctgaaaaccttgaaagagagttgtcctcactggaaaggcaagctacgttcaaaagaagacttgattcttctgtctctgagatagaaaagttgtttgaagaagaaatggtgcagggaaatttgaaagatcttgtgaaggcaataccggttttgcaccagaaaataatagatgcaaatcagagaaggactgagattaggagcttggtagatcaacaggcttggaacacgaagagatcgagagacagcaagccataagcgctggagaagagttctactgcatgtgttgaagacattcaagaggttgtcaacatcttacagagcaagtagcttgttgctcttttcctgattcatgttggttccacatagcgcctgcagcttgcttgcttggataaagcagtggtttgcccagttagtcttgttattgatcaaccgctattatttgatactggctccgtcccaaaatattagtcgttttagtattttaccagattcatatcatactcagtgtatgtcttttacatatgtctagattcattgttatttatttaaatatagacataaaattggtgagctagcc

SEQ ID NO: 30362 - DNA, 888 bp, Zea Mays
acatttgaggaatccgcctttgatataaagaagacgctcccgaatccgtctccgcctcctgtcgctcgctctccctgtctcccgcacgccgacccgcagccgccgccgttcgccatgggtttcctcgacgcgctctaccgtgtggtgatgcgccgcaacgccgtctacgttaccttcgtcgtcgccggcgctttcgcgggcgagcgggcggtggactacggcgttcacaagatctgggagatgaacaacctcgggaaaaggtacgaagacatatcggttttggggcagaggccagctgaggaatgataaattttggtcaccagtttgcttcggtttgaccgtttcattttggcacagtaataaacgatgtaaacttacgctgctcctatgacctccttctcattcgtttactctgaaaatgcttttgtggggatttcgtggtgcatgattgaaacctgttagggcttgttcggttagctctcaatccacatccatgtggattgagtgggattggatagttttgaatcccaaacaagcccttatatagaacatgcaaatactaaaataccttggaggattcctttgttaccttttccccgttctagtttttgtcatgacccggagcatgtactctgcccttccaaagttcggtggtcgtcgacgttcctccgcatccaaagaggaagtagtgttatagaatgatgtaagcaaactaattggtttgccacattagtgttataggatgatgtaagtaggctaattggtttgccacattagattttcattaagttggatgagagaaagaagagaagtagactgctaagagcaagtttaacctccgtcttaaattaaaattcgttttagataattaatagattcgtacaaaaa

SEQ ID NO: 30363 - DNA, 1597 bp, Zea Mays
agtgtgtcttaagtggtccagcaacgtttgccgcatgcagccgcttcaagtccgacgattttctcctttctctctctctctatttttcactctagaccgaaatcggagcgcccgataccataccaatagcagcagagcagtagcagcacagctccctcccccgtcctctccaaatctcgccggattccgtccaccgccaagccctcgcatctgccgcaggttcgcgtctgtgcccgagcgtgttgcactgccggtggtgttggtggtggttggcggagttgccgccgagggtcggtcatggactacgggccctctgacagcagcggaactgatgatgatcttccacaacttccacataggagtatcagaggcagcggacgtgttagtggtaatgggagaactattgttcctgccggttcatatgctagagcaccaactgacatggaagcacaaattcaacaacttgagcaagaagcatattgttcagtccttcgtgcattcaaagcccagtctgatgccattacatgggagaaggaaggtctcatgactgaacttaggaaggaactaagagtatctgacaaagcacacagggagctgttaaataaagtcaacaacgataatattatatgtagcataagggaatggagatcaacaggagggcttcaagcaagcatgtccaataacccacaaccgattcatgaccctgttccaagtcctaccacctctggccgtaagaggcaaaagacatctcaatctgttcctgctttacctgcacctcctgcaatgcattcacaacagctggctacaccaacacagccatcgtcttcaactgctaggaaagcagtacccccagtccctaaaggcaaaaagacgaaaccagtaagtagataatttgaacaagttattttttctatcagtgttcttttttgttctttggttgaagttcatgcactttcagggtcagaaggtaccaggtggctctgcagccaagcctatgccatcttcagcaggtcctagtggaagaggaccacacatgaataggaattttccaggtggttctgctcctgaagctcaagctcagaatgtcgatccattggttggtcgtaaagtgatgagccggtggcctgaagataatagtttttatgaagcagtcatatctgattataatgctgaaacgggcctttatgtgctggtttatgacattaatacggcaaatgaaacctgggagtgggttgatcttaaagagacctaagaagctgggaacgtggaaccatatggggttccgttgaacgtggttcccaatcgtggttcccaatcgagaacaggaaccatatggaaccatggtcgggacatgatccacactcgagtgggatgtcaaatggatcatcgtccagcacaggtaaggggcatgtaccttcgtaagttgggttgtcgcggaagtagagcaccacgaggatcttggagagttggagcggaggtcggaccgtcggaggactggcgaagcactgagacgaagcgatcgctaatcatgtgctcataccacatgaaggacaaatcgttaatcttgtgctcacattgctttcaattattttttctg

SEQ ID NO: 30364 - DNA, 290 bp, Zea Mays
aaaaaattatattataggctcaaccaatatccgcatgcataaacaaagaattagaggaggtcatcgccggaggacgccgccgaggccaccgggttgaaggagttgatcacccaaaaacgcctgaaccgccgtgtagaccgttgacctagcagcccgcatctcgcccgactgtcatcatcgccggagccacctgcgcccagcgtggcaaccaccgcccgagacggccgcgcctcaaggggcactgccgccactcgctcgcctcatgcccccaccgctcacgtgcctcgtgg

SEQ ID NO: 30365 - DNA, 2329 bp, Zea Mays
gaaaatttctttgcatgggtagtgtgtttggctaattctctcccaaaatgtggaagaaaataaagggaatactgtgcttgaattgcagcaaagatctatagaattcagttccattatacgaagacatcaatcgatgaaatcatctttgcttgaacggatgcctgtattggatgaagctaattatttggtgaagagagctgcttctatacaggctgcagttccatctgtaaattctgctccagcagtcacttctggaggcccatttaagcttcctaatggtgttggaaagcctgcagctcctttagctgatttgcttgatttgagttctgatgatgctccggtgactacctcggcccctacaacagcacctaatgattttctacaggatctgttgggcattggcttgactgattcgtctcctataggatcggagaacatccgccgcgactccatgctccaggagatcaagtctgcctaccagattcttgcccacaagtaccatcctgatatgaataagagtcccgaagcagaagaaaagttcaaggagatcagtgctgcatatgagcttggatctgaccgctgtactttgtgtcgccgcttgaatctacggttctcttcttccttgttcatcccgtggatctgtcccgtggtggtccaagcattcgatttctgctattataacatccaacgtcgttggcggtgaagagcaaggggacagataagcccaaaggcagcaaggggaacgtcgacaaggaccccaacaagcctgactcccaacattttttgtccgccggtgctgtagcggaagcccaaaggcagcaaggggaacgtcgacaaggaccccaacaaggctgactcccaacattttttgtccgccggtgctgtagcggcggcgctggtgagctcccccatgctgggctctgggatgctcccaggcgccgggttcggcgagacggggactgatctggtgctgggctctgggatgctcccaggcgccgctgccttgcagttcctcggtcgattcaagggaatattatcagtggaagagactggtgaatcaaaggccgtcaacgctagatggaggcaaagtgcctgctgcattgggccaccatgtttttggtgcgggctgttcctcacggaaccaacatatctacatatatttttcatcttctcatcaagggagtatatgggtcgggagcaaggttctacatgacctactagggtatgtaaaaattatggaagtagggccacgagatggtctacagaatgagaaggacatcgtgccaacacctgtaaaggttgagcttatacgaagattggccacatccggattacctgttgtggaggcaacgagttttgtatctccaaaacgggtacctcaggcaggactgaggctgtttcatcctcctctgctgcggggtgggctaggtcgtcaccatggcgtcactcgtggcgtcttgtgcagtagggacgacagcagggagctgtcaagatgggttacctcaagatggacgaggagttcctcaagaggggcgagagcgggggcacgtgctgcgtcatagcccttctccgaaagggtagactagtcgtctccaatattggagactgtcatgtggtgctcagccgagcagggaaggcaaaggtgctcacctctgaccatcgggcctcccaggaggatgagaagcaaagaattgagaatttgggtggatttgtggtgaattaccatgggacatggagagtccagggctccctggcagtgtctaggggcaatggggatggacacctaaagcagtgggttgtggctgaccgagagactagaacgctcctcatcgaccaccagtgcgagttcttgatacttgcttctgatggcctatggggtaagattgataatcaggatgcagttgaccaaaactctaggcattagcactaacagagaccggtggaaggcaggactttgctgcctaaagtttccatgagtcagcgctatttttgggtgtttaacattcattctttgtcatagaaccatttgttatattattagatgtaattagatctatttgattcattcttcggaaatatttattgagataatgcggggtgatctctcgcttcatgatccattgactgtaaaaggcgatttgcctatgttaatacaatgatatattctattcagagaaaacttactgtgtttttgttttgtatcctttttaatcctaaactgagaacactaaccgcatgtgtactaaatacaatagacaaatctcttttgaacttctaactttaaatgaatagctcaccaaattacgttctagagtcagctccataattt

SEQ ID NO: 30366 - DNA, 2858 bp, Zea Mays
gtcccggcaaaggcacccggtggccgcgtccagcgcctaccgtttccgggggggctcctcgcctcctcttcccccgtccacccattctcctggccgctcttccccttcgtcgtcgcactccgctagctcacctcctcgtccccatataaaccatatccctctccgggccccgcgcagccgccggcgacaagcgcgcaggagcagcagttgtcgcgcctcactgatggcgaccgccgtggcgtcgcagccgtgccaccttcccctcagcgccggcggagatcccagattcatatgcagaagcattgttgatgtaaagactcacaaattccactcccgcatttcaaagaggaagtgctacttgaggaactcactgtcggagtgtgacaggaccatccacagtggtagatggttggagtttcggagacacaagggagtcttccagagaactagaaggatggttcacattattccattggcttctgatggtgatggcaaccatatatctgttaatggagctctgcaagttggttctacaagcaacattgatgaaataaagttgaaattgaataaagcattgcagagtgaagatatcagcaatggactcgtccagtcgatacatgatgctgcaagatctattgagttggctctcatagagcacagcaaattgccaaagagctcttggtttccaaagacatggctaggcgttgagaacaatgcttggataaaatcactgtcttaccaggctgctgtagactcattgttgaaagcagttatcgatgtttcatctcgtgggaatgacagagatagagatattaatgtgtttgttcaaaggagtttgtcccgcctgctcaccccccttgagagtgttatcaagaatgaattatctaagagggaacctgcattgtatgaatggtattcatccgatcaaaatcctttggtggtgagacaatttgtaaacatttttgaaaatgatccaatgttttactctgctacagcaatatgccttgaaggcgagccgatgaatactagtgaaagtgatctttctctgcttatgctaggtttgatctgtcttgctgcaatcacaaagtttggatcagcaaaagtttcttgtcagcaattctcttcaatggtgcctgatattattggtcgattcatggatatgcttcttgagtttgcccctctaagtaaagcatataacttggcgaaagatattggtcttcggagagaatttttgtataattttggtcctcgtgctgctgttcctaaacttggcaatgaccatggacttgaaatatcattttggattgaactggtgcagaagcaattactctgggctcttgatcgtgaaaagatatggtcaagactgacaacaagtgaaagcattgaggttctggaaaaggatcttgcaatatttggtttttttgttgctttgggtagaagcacacaaggatatttgtctttcaagggtttgactgatttggatgattcactgaatggtattgtaaggtatcttatcggtgggagtgtactatattatccacagctgtcctcgattagttcatatcaactgtatgtggaggtagtctgtgaagagctcgagtggcttcctttttacaatgatgatgttttaagtgcaaaaactgatactgaaggtagagaagaagtgcctaaaggagaagtcatatcaagagtcctaaatgtgtgctcttactggatgactagttttacaaagtacagctcatggcttgagaacccttcaaatgtgaaggctgcaaagttcctttctaagggacatgtcatgttgagtgactgcatgaaggagcttgacatatcaaggtaagcccaggagcttgaattgtttgttctctaccacccagtagatttatttgtttctaaacatgtgcagaaatatgtcaaacgacagtggcttcctagaacctgaagaagaattggatactggaacagaattagcttcctttgacaagtcgcttgaaaatgttgaagaagctctggttaagttagaaaatttgcttcaagaattacatgtttccagttcgcactctggtaaggaggatctgaaggctgcatgctctgatcttgaaatgataagaagactgaagaaagaagctgagcttcttgaggcatcctttctagcaaaagcagaatatctggaggccgatgcaagtagcggatcactatctcctgcagaggaaggacctgtaaagacaagtagcaggacgaacgatacatcagcaccacaaaaaacaggaagcagggtggataataaacgtcgcccattttgggacttctttggtcggtctttgaaagttgatccagctcttgcagatcaggatctgatcactgtcgccaatgtggagaaggaaggcatggagtcaaatgacatcctccgcttcgaacagttaagacgtgagctgattgagttagaaaagagagtgcagaagagtgcggatgaagctcaaaaggaggaggagatggttgtcgcagaaaaaacaactgcaccatcgcctggatcatcagtttcttctcgtcagactaccaagaaagaaaatgtcataactaaatcagtggagaaggtcaaagagactacaacgactgtgttgcaggggacacaactattagcaattgatacaggagctgctatgggtttgctaaaaagagctcttattggggatgaactaactcagaaggaaaagcaggctcttcaaagaacattgacagatttggcgtctgtcgttcctataggaatactcatgcttttgccagtatcaaggaattagagaccgaccaggatctccggtcctctgaactcctcgctgcaatccacctgccagcagaag

SEQ ID NO: 30367 - DNA, 2062 bp, Zea Mays
cggagtttctgtggccaggcagatgggcgcgtagcttcctacgagggagaggttttgaagggtgctcaagtcacgatgaacgtagagaccataagtcagactttgaagtctctgaagatgaaaagaagacaagaataagctctttgaagaaaaaagcaatagatgcatcaacaaagattaggcactcattaaaaaagactagaaggaagagtggtagtagggtcctttctgtgtctattgaggatgtgcgcgatctagaggagctgcaagctgttgaagcatttagacaagcattactcttggatgagctgttgcctgcaaggcatgacgactatcatatgatgctgagatttctgaaggcaaggaaatttgatatcgataaagccaagcaaatgtggattgatatgcttcagtggcggagggagtatggcactgatacaattgtggaggacttcgaatacactgagttgagcaccgttttgcaatattatcctcatggttatcatggagttgacaaagaggggagacctgtttacattgaaaggcttggaaagcttgctctcttgctgcaaaaaggcacattgattccagcacgacaattctggatgtccacggagtggggttgaaaaatttcagcaaaactgcacgcgaattaattcaacgactgcagaaaattgacaatgataactacccagagactctataccaaatgtttatcgtcaatgctggtccgggcttccggttactatggaacactgtgaagtccttccttgatcccaaaacgaccgccaagatacatgttcttgggaacaaataccaaagtaagctgcttgaaacaattgacgctagtgaattgccagaattccttggtggcacttgtacctgtcctgaatacggaggttgccttaaggctgaaaagggaccgtggaaggacccaaacatacttaagatagtccaaagtggtggggttcattgtgctcgtcaaattgtaactatttccaatggtgaggaaaaatttattacttacgccaaaccgaagcgccacgcaatgagagggagtgacacatcaactgctgagtctggttcagaagctgatgatgctgtgtcccccaaagctctcagaagttacatatcacatcctaagttgaccccagttcgtgaagaggtcaaaatggtcagggctactagcttttctactcgtgtccctgaatatgatgtacctgttgttgacaaggccgtggatgctacatggaagagagagcaaccacgaaaggcaccatccgtgccccaagactcatctgtgaaaactgcatccaagccatctggccgcccctgggataagatcgctgcaaatctgatggcttgtcttatggctattgtaatgttggttcgatcaatcaaagatcttgccacaatgagattgtcatctaaaggcgggtcagaagaaagctactgtacattgtacccggactccgtccagaaagaggaattccgtcctccttcgccattccctgggttcgctgaagccgacctattcgccgtggtcttgcaaaggctgggagagcttgaagagaaggtccagatgcttcaagaaaagccttctgaaatgccttgcgagaaagaagagttgcttaacgctgctgtgcgtcgtgtggatgcattggaagctgaactaattgtaacaaagaaggctttgcacgaggctcttatcaggcaagaggaactgctcgcgaacatcgacagcaaggagattgccagggctcagagaaagaagaaaacaatgttctgctactaggacaacacctgcttccgtgaggagatgacaaacgcggcggaccccttcatttttctgacacttgtgaatcaacaggtttccgttgtaaatcaacaaaattctggcataaataaaatgttttttttttaaaaattgcaatcctgagcattgctgcctcctcccggtctcgcaatctggttgttgttagttgcagcataactgcataattggttggttagccgcgccgatgataattggttggtttcttagctgatgcgtatcgtcaag

SEQ ID NO: 30368 - DNA, 3278 bp, Zea Mays
gctttcccaaaattaactactgctgctccataggataaggattcatgcgaaatgccacctgaacttggaatgtcttctagaactgttgctggtgctgttgtaaataggaggcctcgccgcctgtttgggagatcatcagagaggaagaacccactcaaccttcagagcgtcaagtagctcgcctcgaggcaaggcagcagcaacagagaagatggcaggataattcatcaaggctactggaagataagcccacaacatccaatagcatgtctgattcagatttcttagtcaacagctttaccaagccgagtgataatgcaaggccatcaagaaggaagagcaaaaagaaaagcaagaaacacaggcaacgctgtaggaagccgactgatggatctgaagctaaattcagagagggcaatggtgctgcctctgcagctgatgttggtgattgtgaagattcgacactttcgcctaagcatgttggtgacatacgctttgaggaaacttctcccagttcttctgtcaaggaagcttctgaagaggctcctgagagtgatgatgatgagtaccattgctgctcaggtggttcagtttcgagtgcgtcctactgtgatgagatggaactgtccaaatcaacaacttcgtgccctgcattgtgtggacaatgtcctagcagtaacttacagtatttggacaacactcaaaattctgcaccaacaggtccatctcaagaaacttgctatgctggcagtaaagcgaactgtaaccatgataccaagtccctgtttatattcagaaatgaacgtggatctgatccttgtgaggcaacagagttttgcagctctagcagtggatttgatgagaactggatagagaagtttgactatgatagtggcatttgttcgccaaaaagtgttggtacatatggtggagaccaggctgcccacttgtgcagtgacacaactggtgacaatgatttctgtcttgtaatatctagaaagagggccagaaaggagaagaaaatgtcattgtggaagagttatggagcgcatgcatccacacctgcacttgatcgaaataaaaaatatgttggccattcttcaatgcagatgaccaacgaattcaacagtaacgactggtcccatagacaaaatcatgttagcaggatacaccctcagcatggaaatgcactgaaaagctccaccaaaaatttcatgcagaggccaagcattggttgcagggagactcaatatgggtttccagctaaagaatccaagttaggagcaagtctcaatcattctacaggtccaagagaaaaaacttgtggaaaattaactggcggttttgataagacagcacaacagctttatttggacagagacctatccaatgctcttaacagcagtgaatcaatacgttgtgagacgagatcaatttcctcttctgaaccgacaactccaaagtctttaaaaggcaattatacttcagagtctggtgaatcaacagatattacaataggagctcttcccatgcagaaaagaagattgcaggatttagttcgaactgatgatgccagtgaaactatttctgggcgatcatcaccttgttctgagtcatcgacaactgaattaattgctggacatagtacagattcatctattgaagggaaccatggctgtcaagggctctgtaactctagaacacatctagcccagatgctcagggttgtaaacgatgcctgtaaagttcaggttggtgcagatgttctccttgctgctggttatccaatttctgatcttgagaaatttatatgctctgcaactcccgttattggtcgtgcaccttgcatgataagcaacacttgttcattggaccaagtagttagtgactcagtttgtcagcatgacatctctaatgtttccttgaggagaatatgggagtggtatgaagagccagggtgctatggattggaagtaaaagctcttagcaatctcagctctaaaacatccagcagcagcagttcagagttctttgcatactttgtgccttatctatctgctattcagttgtttgggttgtctaggaataacatgcatcacagttttggtgtgcaagggagggaattactgatatcatcaaatactgcaagctctatgagctctcatcctgtgcatgcaaaagcgcatacactgcttgaggaaagtaatgcatgcttgccagagtcatctttagttgtagaagatcctggagaactcatatttgagtactttgaaacagagcaaccttctctccggcctccattatttgaaaagatcaaggagcttgttagcagtgcaaatgtttctgaccaccgggtttttggggacactgaaaaattgcaaaatgcgaaattgtgtgagcttcatccagcttcctggttctgtgttgcctggtatcctgtttatcgtgtgcctcgtgggaatttccgtgcggcatttcttacttatcattcactggggaagttggttcataaaaaatgctccatggatacgaatgacgggcatacacaagtagtttcaccagttgttggtctccagagttacaacgacaagggagagcagtggtttcagctgagatgcccagatttgaagcaattgccaatagaagattctttaaaaaccagtcctgctgaagttcataaagagaggctgaggacgctgaagatgggtgcattggccatggcaagagctgttgtcccaaagggaagtggggagtcggtgaaccaccatcctgattacgagttcttcctgtctcgttgcgcctaggctaagcggttgtgatatgaaggaagaggggcttttctgcttctagctcctgaatgtagtagtgaccatgaaaatgaaaaaaaaacccagagtagtgactaaccagagaccggctatagatacagtttatcttagagagaggagagcctggggtgatgcatatcactgactgtataggagatagactcgaatattagatactctaacctgattccggattaccaatgcaaaccaagttggtgagctgttgaagtatggcagtacccgcgggatgggtgctttattggggctgggggcaaagatgagaagataccacagatgagatgacgctgcaggtgttcatcttttgtacaaagaccacaccagaggagcagcaagaaatttgctaccagcaagaaatttgttaacacatttgcgagcaaacgcaagtgaaagcgtgcgagtaattagaggcgtgcaacctcattgcttctc

SEQ ID NO: 30369 - DNA, 1614 bp, Zea Mays
ggaaactgtcgtcgccgccgagagggtgcgtgaacctacctacctactataccccgcttgcttagccatcatgcatgagcatgatcctgtattcctgtgtgtgtgcgcgcgtgctcgttgcgaccaacaagctactggcatctatatggatccgcgcgcgtgggagccacacactgaccgatgcttttgttttgccaacagcgacaggtgtggtgtggatgtatcgatccacagtactcctccgacatctgcgggagctggggattgagacaggtgtgtgctggaagcctggaatgcaatggaaggctgccgctggagaggactatagtacgcaccctgctgaaagcgcatgccttttatgtttgatcttaatttcgtgacaagctagggctaggaggccctgtcaaccaaccaaatcaggactcaactccactcgccagaacatgccggggggagggcgatgtctcgcgcccagccccaccggacgccggcctccagacggggacagcggctcggacgacgggtcctgctgctcgccatacagcacacacatgcatgcatgcgcgcctagctcgcggcgagagagccagcagcggcgacgacgacgacgacgacacaagggcatcggtatcacagtatcactgcacacagatatggccgcgcggagcctgggtcacgcacgtgtacgtacagccaaatccccgcgagatacgcacagggcgaagctaccacgtaacgtgacgacgtcgcgtcggaacgtgcccggccggccggcgcccgcgccatcctcggctcctcgcgcacagggcccggcaagcgacacctgagcgggagatacggaggaagacaccaaataaagcttcctatctcctcgcgttatcgtcgcttctcgagcggcgccgatcgtacgcgcgagagaccgaccgacctgggggctgggcggccgtcatctggccagccagagccagacacgcgcgcgttgacgagacggggtaccgaaccgatcgatcgcccgcggccggccgttgctgcatcgcctcgccgtgtacgtggacgctagcgcgcgatcaggttaacgttgaggcggcggcggcacgcgcaggggtgccgtgccgtctgccgacacggccatcacatggccatgcatgggtgccgcggccgggtgggccggcggtagcactgggcgtttgcccggccccggctacgtcgttggagcctggagggcgggcggcggcgggccgcggatggccggccccggccccctccaaactgaacacgacgatcagagggatcgagaagcaggtcatcagaacgattggacggaaggatctgtgcgggtcatgctcgccagcttgggccgtttgaggtgactgcattgaataggaatggaacgtgcgtggccgcgctcttggcggttgctgcttcagagttcagaccaacggcaacggtataccaaccactaaactctaaaacttaaacctacttttggtcttcacaccttcatgctaacttttttttttcaacgtaatatatagtggaacaaagttccggcttcatcccttttaaagcctcgtttgtttacactctagtttttataatacaacttaaataagt

SEQ ID NO: 30370 - DNA, 1059 bp, Zea Mays
ctccttgcttttggaaactgagcttactcctgagcagcgtctaatggtggaaacagtactgaaaagcagcaatttgttagcaacactcatcaatgaccatgaatgcaataatagccctttcctccttgcttttggaaactgagcttactcctgagcagcgtctaatggtggaaacagtactgaaaagcagcaatttgttagcaacactcatcaatgatgttctggatctttccaaactcgaggatggaagccttgaactggagattaaagcatttaatcttcatactgttttcaaagaagtgatgggtttcattaaaccaattgcatctatcaagaggatatctgtatcggttatgttggcaccagatctgccgttatgtgcaattggtgatgaaaagagactcatgcaaactattctgaacatctctggcaatgctgtaaagtttaccaaggagggacacatcacgcttgtagcttccattatgaaggctgactctttgagagagttcagaaccccagaatttcatccaactgcaagtgatgaacatttctatttgaaagttcaggtaaaagatacaggctgtggagttagtcctcaggatctacctcatgtattcacaaagtttgctcatcctcaaagtggaggaaaccgaggggttaatggtagtggtcttggccttgccatatgcaagaggtttgttagtcttatgggagggcacatctggatcgacaacgaaggaaccggaagaggttgcaccgcaacattcgtcatcaagctgggcgtgtgtgacaacacaaacacctaccagcaacagctgataatgaagtgcatctgagcatttgaaacaaatctagattctagctctagctaaggttatacagatattgtgctgaaccttgatgctactattatgtgtagtaaaattttgggggtcggaattgaccaaacttatggatttattcaacgtttcaattcagtgacaaatgctactattttctatattcagacacttggtgggctgtcacttgggatcgaaaaggataggacatctactgtcg

SEQ ID NO: 30371 - DNA, 2122 bp, Zea Mays
cccacgacgacccacgacgcctgcgtcggccctgcccgaactggcgtgcagagcagtgctccacgacgccgccaccacctgccccagcagcggcacgctccgacaacggcgaccatggcggtgcgggcgcggcggctggggagtctgttccctgctagatccagtagatggctgactcatcgaggccctccgtgaacatcatctgcgccggtcgtctgctcggctgcagtggattaggaggcttggtgtggaggcgctcagcagcgggtggaagttcccgtcaaggagtctgtcccgtcaaggagaccgtcgtgccctggacggagtcagagcaagagtcgatcaacattttcctcacgatgattgagcgacacaggcacaattcaccatgatcccatcccccactcaaacctgcaaaatcctgtagccgaacatctcgatggtctcacgtgccattcctttctacaggaataggcctataactgatttcaataagtttatgctgcatttcattcagtgtgtttggatgcatatagagaacacgaagtttaatgtgtttggtgcataatgagaattgaggaaatgggacattctagcatgctatgtgaattgtgaaaggctatagattaatgtgtacagcattttttatgttggaactgcctacatttatgttggtgccgctcccacgagcgcaccaggacgccggcttggaggtacttgcacacaagggtcgagctcggacgtcgtagcggtgcggagggcctcggccgtagcatgccccgccccgccgcgcatgcctgcgcggtcggtgtcccgcagcacccacaccgagtggcctgtcttcaaagtcgtcctcatcctctcctcctggctcaacgagaccatcaacgtctggatgttcatagacctgctcgggttcatgctgttcttcgacctcaccctggtgcacctcggccagtacttcaccaaggtgtctggtatgattgggcacctctcctgctccggcgaccgagctccaaccagggacgtctagcgctagcgcccaggacgcacgaccccctgctcctctatcctcagcgccgagcccctccgtcctgtttctggcagcgaaagcccagcccctgcggcaagctacctactcgatggaatgcccagccgcttgtcggatctacgcagcccctgcgcgacgtcacaaactccggcagtcaggcgggataacaagcagaggtttagtctgttggaggaagatggcgagctgttgatccgggcgaaccagggacacacactaaaaaaatatagtctggaggtgacctcaatgtaattcaattagtgatggaacatttgggagtctactcattatgtatttcttctatctggaaaaacactcaagggatctttgtttagaggatggagacctaaatctgaccgaccttcattggtggataaatatgcagaaaaagaggagaccttcacctaaaaaacaaagatatatgttgaaatggttctttttaaaagattgcaacgtgatccgggtgtcagagattcagaaggtcttggacatcgccgacgagcgtagcctcattgacaccatcttcttctgctacctcgggtgcaatgcaagctaaggtggtcgacaatggtgttcgcggcggcgaactcgcagcgcagccaggtgatgaagccatcgcgctcgtcgacgagccaggcgacgggctcggccacggcggtgccgggggccggcgaggcgatgacggcggcggtggaggccatcgccgtgcgtccctcaccactgcgggccgcagcatagcccagccagcaatgccgaggtccatcaccactgggaaccgtcgtccggaccctctcccatcccgcacccattcctgtcctctgtctctgcgatgcgcttagcgccctcaccacttccacctccccagcctggctagcagcggcggagggaagaagtaccccactctggctagcagcggcggtggcagctcagattagtacggcgctgccccttcttcccccacctgtctttggatctacaaccgcccacccgtcttcggagctgttgtattcctccccacttgcttatctattcctctcaaaatagtgatggatt

SEQ ID NO: 30372 - DNA, 1717 bp, Zea Mays
ggtatagatcggcgctgttaacaattggtatcagagctccaacgatcctcggaccttcttcctccatggctactgcttcatcaccgatcgacgcccagctcactcaagcgctggaacaccaaacccgtgccattctcgccgagctcgacaaacgcttttccgccatcgattccaagtgggagctccgcgtcggtgccctggagtcccaagcgaaagagttcgcccgccaccacgaggacatctcctccacgatccgggcggatgtcgaggcgcacctctcagcggccgatgcggataccctggaccggatccgctactgggaggcatccacaggtgctcgcgttaccgccctggagtccgccatccacctgctcgatacttggcgtcctcgaatggggtcttcagtggatgctttccacacctccatggatacagttcacgctgaactgtccaaaatggagatccaatggtccaatggagcgcgcgttgacggcttctccaggcccagcctccttgacgcgcgcgaatcggcaccggcgcgctcacctgcgcccgtcagcttcgccgatggctcatgttttgggccccgcctttcctctactaaccgggactgtggatttgggccctatgtggtcgatctccacttcccggtcaagggagcgctcccaaatgcaagatttggttcatcagcacttggttcgagcccaactcaggatgcagcgtcaggctgacaaaaacaggtctgagcgctcgtttgccatcggtgattgggtgtacatgaaactctagccctatgtgcagtcatctgtctcgccgcgagctcatcataagctgagttttaaatattttggcccttacaaagtcacagctcaggtcggtaaggtggcatatcgtttggagctgccggtctcaagtaagatccacccggtggtccacgtctcacaactgaaactggcggcaagttacaagggccccgctcctgcaactctacctattgatttacctgagttcagtgttcctgttcaaatccttcagacgcgaggacttaccaaaggcaaccatctcgtacagcaaggccttgtgcagtggtccgacttaccttctgacctggccacctgggaagatcttgaagctctccgtcaatgttttcctggtgctcctgcttggggtcaagcaggatttcaagggagtgagaatgttacaagcccggcgtcagtacctgatcaaccacgggagcagccccagcgtcgcaagcctggaacgtgtgagcgtcgtgctaatgtgcgcgtcacagcaccggagtgggtgtagctgtgtgcatggtgttcctgcctgtctggtggaccagttgtgtctggtggtggaattccttatgtattgtgaagtctgaactagaaaggacataaaacaaacaaaggaaatatctattccggccagttcctatctctctctctgccgtcctccttctctaacctttacccccaattccttctgttggtatagatcggcgctgttaagactgaattcaacggatcacgctgccgctcccacgcgccaaatttgggggctacagtgcacacgatatacgttcaacgcatcacgctaccaggcgctctacgcggatgttcctcctagccagcttctctctccccctcgttctgtggtgcctctctcaccctctctaatactgttcacgtgagcccacttccaattatta

SEQ ID NO: 30373 - DNA, 1687 bp, Zea Mays
gtaccaggccggtgtcgatccgccagatgtcctggatgctcgtcggtggcgtatggagcgtcggaggagatcggcccgttccggatcaaaccaaacgggacaggcctgttcctcaacaagtactcatggaacagagaggcaaaccttctgttcctcgagtcgcccgcgggagtcggcttctcctacgccaacaccacctcggacctcaagacgtcgggcgacgagaggaccgctcaagacgcgctgcagttcctggtcagctggatgtcacggttcccgcagtaccggcaccgagatttctacatcgccggagaaagctacgcgggccactacgtcccccagttggcaaggaagatcgtcgagtacaacgaggcctcgcctcaccccttcatcaacctcaagggaatccttgtgggcaacgcggtgaccgacaactactacgacaacatcggcacggtcacctactggtggacgcacgccatgatctccgaccgcacctacaaggccatcctcaggtggtgcaacttcagcagcagcagcatctcgcgcccctgcaaccgcgccatgagctacgccatgaaccacgagttcggggacatcgaccagtacagcatctacacgccgtcgtgcgccgccgcggccagggccaacgccaccgtgctcaggttcaagaacaccctcgtccgccgccgccgctcctccggctacgacccctgcacggagacctacgccgagaggtactacaacaggatggacgtgcagagggcgatgcacgccaacaccacggggatcccctacagatggactgcctgcagtgatgtgctgatcaagacatggcaagattcagagttctccatgctgccgacgtacaagaagctgatgaaagcaggattgaggatatgggtgttcagcggcgacacagattcagtcgtcccggtgaccgcgacgaggttcgccatcagtcatcttggtctgaagatcaagacccgctggtatccatggtactcagctggacaggtacggaacttgccattgctgctgttgttgcttgtaacgtcttccgagtttggggcgcatgtgcaggtaggaggatggtctgaggtgtacgaagggctcacgtttgcgtcggtgagaggcgcagggcatgaggtgccgttgttccagcccaggagggcgttcaggatgttccggtcgttcttggccggggagccattgcccaagtcctgaaggttcctgacatgtgactgaggccatgcatgcctacctgatcatgtctagctacggtcctgacgggtgagaaggtgacgttccccaggtagagaatgacttgttgataggcgcgcagttcatagctgaggagtgattgattggtctcgggagaaggatgtagagaataataaggatggctatgttatgccatggaaacccatgagcattgcaatgattagcgaataattttcagtgatctcactctcaagtgcttatgttatgttatgttatgccatggaaacccatgagcaatgcgacgaataaatttgaaggatctcactcttgaaccaaatatgtttcatcgcaacgcagttttcacatcgtgattctttgcccctccaattagaaacgtagggtgttttaggattctcgctgttcaagttctttagcgtggctcgtcaacactggttgatgttac

SEQ ID NO: 30374 - DNA, 1570 bp, Zea Mays
gagggaggctgcccattattaactctccctccccccacgcagaagacgacgaccggaagcaaaacagccagccaaccaaccaaccagaccagggatggatggtgcgcaccaagaaagggggcaccgcaccgagccaatgatctgcaagaagagaggtaggatttaggcacggcacctatagcccctgacgagagagagagggagagagatttggtcttggataagagtggagagactggagacgggtgggtggagtgagagaagtcactcggggagcctccagattctgaatctcccgcaacccgtctcatcgccggagtggagttccaggcgagtgattatcgagccagtaagccatttgcaagcactgaactgaaccctcagagcgttgttgcgatggaccaaatcgctacccccgacgaaacagcacatgcctctgcaccttcagttcataagctgtttgatgctaaattaggccaccatagcgtgatggatggcaccttggcatccacgagtcagtcatcaaacatcaagacccagctgatccggtcatcaagcttgtcaaggagcatatcagttaaccttgagaagaggagccctgaatctgatcctgaaagcccacagtctcacgtctcgcatcctaaatttgcagaacccatgttctcgaattcttcgacgttctgcacaagcttgttttcgtcatcttcgacaacagagccatgccgtcaaatgggcactttacctttcctgcctcacccccctaagtgtgagcagcaggtttcagctggtcactcatcgagctcctctctgcttttaagtggtgataccggtttagatgtggctgaacagtcagatgatctgaacgacttgctcaatctttcgggagatgcttctgatggcagcttccatggagaaaacaatgccttagcttttgacgaacagatggaatttcagttcctgtctgagcagctagaaattgccatcactgacaatgagaagaatcctcatttagatgacatatacggcacaccaccacagctgtcatcacttccagtatcatcttgctccaatcagaatctagggtcaccagttaaagtccagcttagctcatctcagtcatcttctagctctgcaacagctaacaagtcaagattgaggtggacacttgagcttcatgagcgttttgtggaggccgtgaaaaagcttgaaggtcctgaaaaagcaactcccaaaggtgtgctgaaactaatgaaggtagaaggtctaacaatttatcatgtgaagagccatctgcagataagaaggcttcctcggaggataaaaaagcacaattaggaaagggcagcattgattcaagcaaaaacaagaatttacaagtggcagaagctctaaggatgcaaatagaggttcagaaacagcttcatgaacaattagaggtgggtccgtagtaggtgctatgttatcacatctcgcaagtactaccgttggctcatatgcttgagacatatagtaggaattagtctggcgtttggtttcggttctatatggccacttgttttctgttcatcag

SEQ ID NO: 30375 - DNA, 271 bp, Zea Mays
ccgagttggttaggtggtctgagtagtacttctcaggtcctgagttcgactcctcatgggagcgaattttcaggctgtggttaaaaaatcacctcgggctacggtgccgctgtgtataggtgggccaggggttcgtattgttaaaaaaatccccttgggctacggtgccgctgtgtatgagtggggcaggggttcagtggttttctcgacctgcgtgagaaggtattattcttcttaatataataccagggctgtcttaccccgtaggtcg

SEQ ID NO: 30376 - DNA, 1042 bp, Zea Mays
gagaaaaccttcgacagtgacccggtccggtgggtgtggctcgcttcctctctgtccgactcctttccttcattttcctcttctgacctccggcagcaccatggagaacgtcgccgcgaatccttccgctgcggccgccgccgcagggaatggcgtccaagcatcgggggccggaggggagcgcccggaggacgcgtcgaagcagaacctggcgcaggtgacgagctcgatccagaagacgctgggcctgctccaccagctcaacctcaccgtctcctccttcaactctgcctcccagcttcccctcctccagcgcctgaacgcgctcgtggcggagctcgacacgatgcagaaactagccgagggttgtaacatccaggtgccaatggaggtcgtcaatttgatcgacgatgggaagaaccccgacgagtttactagggatgtgctcaacagctgcattgccaagaaccagatcaccaagggcaagactgacgctttcaagagcctacggaagcatctccttgaggagcttgaacaagctttccctgaggacgtagaagcatacagggagatccgtgctacttctgctgctgaggcaaagcggttggctcagtcccatggcaatttgcttaatggagatgtcaaagtgaaagctgagcattgactgaagggtacgactacagagggttgcgcggtatcttcagttgataacttatctttattattcttccctgtcacaaaaaaaagagaggctggatgatatgatggtaaggtcgcatcgaatggcttaagaaacttgtagggggaaatggatatgccttgtgagtgtgagactgatcaaacccttgcaaaagttctgtgatagtcactgcttggctgattgaagtaagtttgatgttgatatctgctgggaatatatataatcaatataaaaacttatcaaagatgcagaggaccttttagacgtatgaatgactcgtgagcaactatatggcctggccacgggtgctttcggagagattcaaagtgcatccaaatgtgg

SEQ ID NO: 30377 - DNA, 1472 bp, Zea Mays
ataaatcatacaacgtatccattaatttaactagcatccataaatatagactacatatatatataaatgcctcaacaggcttgcggaactaattagaccaaacactcatggacgaaatacttcacttgaccttattacagtctaactaataagttgctagcagctcatacttgtattagacgacgcactaatagcttgtagtgcttatttgagaggcgccggtgagaaacaaggaacatagcaaccaaccttccacctgtgtatagctttggaactgctgaaaacactcacttccttgctgtccatgtcatatgctatgaatctaagttcacagtgtgaaaagaagaagaccacattgcgatccagatgcatgctggccacctcgctgtacaactccaatgcgacacttgtggggcaatttcctccaaagagctggagggagctcacagtgtccttcagcacccactcttgtgcatcgtaatcctgaagagcccagatggacagctcgtatttctcttcgttgaagtcgaataattgtttagtaatgcagtgcagatgcccctgggattggccaaagtaaacacagtagcatccctcacaattaccagcagccgcgtctggcagtctgatcatccttcttggacgtccttgtacatctacaatgagtatctgcattttgttcgagccccaaactagcaaatgcaggaagccattaacaaaggcgcatcgattacttatagataagtagacctgattctgccattcttcttcttctttcacagtttggctataggtccatatcccagttttagacgagtaagcatgcaccgacatgggctccatgtactcgcgattctttttgaaccggaccaggtggaagtgggaggatacagtcggatcaaaagccaaatatgtgtagttcattggtacattggagctgcagttgggctcgggcacggctcgccattgcttcgtggtcgggttgcacacgacatagcccaaactgttgtagtgcggcagctccataaggtgctggaataggatcaggccattgcaggaatccagtaagacgaggcgatggatcccaggccattgcaggaatccagtaagacgaggcgatggatcccaggctgttccgtcaggtaggagatgaagcctgcagggtcggcaacgtccagaggcacggatcctactgtcagtggcaggtccaggaagctgaagctgtggcggtccttctctggattcatgtagatgagtccctgcatgggttggcggagcttcttacggtggtcgggaccggcaatgaggtcgacgagaggagcccgaccccaacgacccccgctactccgcctccgctagcaagcgggaggttgttgcgatttcctcgccggacgacgcgattcccccctgacctgggatggcgcagtggagaaagtcctggcgacccggccccacatggcagtggcctgggg

SEQ ID NO: 30378 - DNA, 3032 bp, Zea Mays
atcaatacaaagctatgatgcttgggtcatctacaatttcttttcactttgcttggcatgggttggaggtcctggtaatgtggtggtaagtttgaatggacaatctctgaaaccctcatggttactgatgacttgctgtttaccagctattcccctagatggacgttttatacggagatgtaaacaaggctgtctgcagtttgtgatcctaaaaccaatcttggtcgttatcactttcatactttacgcaaaaggaaaatatgaagatggaaacttcagtgtcaaccagtcctatctatacataactatcatctatacaatttcatactctatggcattgtttgctcttgcactgttctatgcggcatgcagagatctacttcagccatataaccctgtcccgaagttcatcataatcaaatcagtggtgttcctaacatattggcagggtgtgctggttttccttgctgcaaaatctggtttcataaaaaatgctgagaaagctgcctatctccagaacttcgtgctatgtgttgagatgctcatagcagccattgggcaccgattttccttctcctacaaggaatacgctggctccaatgcccgccctttcggtggctttaggggaagccttcttcacgcgatgaaattcaatgacttctatcatgacactgtacaccagtttgcacctacatatcatgagtatgtgctgtacagtaacgagggggaggatgaaccaacaaaatacagccccagcactatggtgccaaccggagagcacatagtggagctggcggaagtcaccgttgtgaactcgaaggctccagggatgtcaaggtttttgatgtatgagcctgatcaggcagaaacaatgccctcccaagtcatggaagcgaacagaactgcttccgcggaaccatacgacctctcaagcttcctcaacgtagagctatctgatcatcctgatgaggtccctgcgattcctgatgcaagagaacaatgacatgttgaggtgtatattcatggtgtaaatgggcgatagcgctgttgagctgatcatagattaaggtgtagtgttgtacatagaaacgtcacatgtcggcgacgtttcattgttcgctcatcttgggggcaagtttatgtttttttcttctttgggtgggttaaagatgagccaagctgacagatcaattcaaggtgtaagtggaaatacgcggtgtaagcaacttgtcgtagatttgctgaattccttttgccgatgaggtgggtcatgggtgtcggttgaacgtggtttgtgtactgattgttgtaaaggttcacttatataacctgcgaggttgcactgagatccaagtggttaactgtatgatgacttaatttccttgttgctgaaatggtatactcatcttattttaggccctagaccatattcgcccagcattacaaaaagagagtagttaatgagtagtacagcatatgactatagggcggcctcctaaatgaaaaaaagtaccttatcatttggaaccagacaccagtgcactggcgtctgcttaacacaattgtacaatcaaagtaactcactctttggcggcaacaactaccagactactagtagttcaggattatcatctgaaacaagccaacctaaccgcatcggccatctccttagaaggattcatcccggcagctttcatctgatacatgattctggtggcctctctgtaccgtccgccgcgagcataggccatggccagggcactccagcacgcggcgtcaggcttgccaccgatcgtctcaaacgccctggtggcgtccgccagctgcccttgcttcgcgtacatgtgtatgagcccggagccaacgaactggttcgtgtccacgccgcgcttgatggcgtcggcgtgcacctgctgcccgcagcagcaccctgggtcctgtgactctgcgaacaccgcgaggatgctcgacagggagaagctgctccttggaacgcccgaggacgccatgtccctgaagacatccacagcctcgctcagtaggctttcacggtggcaggatgtgatcaggctcgtccaggccgcctcagggactggttcctgacagtggtgctgcatcgtcgtcgcgagaactcgccgcgcgcttctgtgaaaaccgcctccatcgcagtacagctgcactagcgagctgccaatgtcaccgtggatcctgcctttcttgacgacgagagcgtgtacctgctcaccgagacgtagctcgcctgcacgggtacatgaccgcagcacggccacgatggcatgggagtagcaatcgccgtccaggaccggcgttccatggcacatgtgggcgaacagacgcatcgcttcatggtggaggcagccatccgagtaggcggacaccatggtcgcccacgccatgccgttagtggtgggcattccgtcgaatacccggcgggcagcttcgatgtccccacacgcggcgtaagaaagcaggagacggttggcgaccggcgacgggagtccatcggaggcgcgacgggcggttatgtgcgcgtgcacggaggccacctctgctgcgtcggcgcactccctgagaagggatatgtagatgtcctcgtcgggcgggatgcccagcgcgtccatcaggcggagcacgtcgccggcgccggacgagggcggatgtgagtccgtagcttccggcggtggtttcttggtgcaatccttgccgctagtggtgtcagtcgcggtgttggtggggacggggagcttcggacgcgagaggagaggcggcggcggtttggccggtttgtttagggccggcaaccgtgctttactggtggccatggccggggtggtggcgttcgcggagagctgccggcagcgacgggtaaggcggggagtcgcggtggtggcgcagagcggtttcgcgacggagcagcgcgccatgtgcgaggttggctgaacccgaggcaccacccgagcgaaggttcggcttgtccaagagaggatttgtcgagatatttagggggtgtg

SEQ ID NO: 30379 - DNA, 2836 bp, Zea Mays
cgaaaacgaacagcccctcgctttagattgccgcaagttcccccattcctgtagatcgccggcccctcgctcggctcggccatgtcggccggctccacggcgtccctcctcgcggccgtcatctgccttgccctcgccgtgcttgctcccgtcgttcctggagatggtgccacattggaatcagttccagaccttgtgaaggcaatgtacctaaacgttgaaagcttcccttgtgtgaggctgttgaatctttctggtgaaattggctgttctaatcctggaagtgagaaggtcattgcaccaattgtaagacttagaaaaggcagtgatcaattggttcaaccatctactattctcctttccttagatcagatgtcagatttctttctgagggtatccaatgatccagaacttcaccagaaggtggcaggtgtattggttgagtcaaatggtgtcaacaatgacttacaagagctgtctcctgatagaaaatttccacaagatgattttgcaccctactcaaatcacagccatgattggaatcctgctggatcaggtatcatgtggaacaaatataattttcctgtatttctactttcagaagagagtacaaacactcttcaaaagatttcagaaaaaaatgagaagactggcaatggatataaagcaaatgttgcagaattcgaccttgttatgcagacaaccaaagctcaaacacatgattcagcatcctgcctcaaagaacaatcatgcttgcccttaggtggacacagtgtatggacttcattaccgccacttaataacggatctacagagcatccgaaacctttaatattggctattgcgtctcaagactctgcatcattttttcgggaccgtagtcttggttcagattctcccatatctggattgattgctttgctcactgctgttgatgctctttctcacattcatggtctaagcaagcttaagaaacagcttgtgttcgctgtttttaatggtgaggcctggggttatcttggtagtcggaaattcttacaggaattagatgaaggcgctgcttctgtgaatggaattagtagcttaaagattgaccaggtgagtgccagaaaaattaatacaggcagagacagcctcagactacagttaatcattttttatttttcaaacatatataaatcctttttttcgtcacttttttgggtattgtgtcatgatatttgctttctgcagagtttgtctgccaattctaatgaattctcttttcgaaattttactgacagctttgaatcacaagcgatatacatatctgtttgaataccattcccatcctcacttgttatttgagttctctttggacatatttaggtactggagattggttctgttggcaaggctatacttgaggaatatccatcattttatgtgcatgctgaagggaatccatcagcttcaaaggaaatattagatgcactgcaaagtgccagcaagtctcttggttctgataatgttaaagtaaaacaagcagcttcatcaaatcctggtgttccaccatcttcattaatgtcattcataaggaagaacatgtcaacttctggagttgtgttggaggattttgattcccacttctccaatagattttatcatagctatctggataactctgtaaacatcaattcctcgtcaatagctgcagccgccgctttggttgcgaggtcgatgtatattcttgctagtgatgactcagttgttgaccttataacactaaacactataaaagtgaacgtttcattggtcgaagaacttattggatgcctgcttacttgcaatcctggtctttcgtgcggccttgtgaaaagattcatttctccaagcaatccctgcccaagtcattatgttggtgtttttctggatgacccatctggcacgcagcttccttcatatgcagatgacacgtctcggtttgtatggaactttttggcagacagaactaattcagcaggcaataaaagctcatgtactggaaagtgtggtgatgaaggtgaagtatgtgtaggggcagaggtggagggtggaggtagatgtgttgtatctacaaccaggtatgttcctgcttattcaactcgggtgaagtttgaggacaatgcatggcacgttcttccagcgaactcgtcagatccaatgggtgctgcagatcccgtgtggactgaaagcttctggaacactattggcctcagggtctacgccgtgcaagatccagcttacgattggcttattcttcttgccgggctcggaatcactgctgcatcttattgcgctgtacactttggcagagcatacatttcaaaggtggcgaagcttgactgaagcgtcagtgagctgccccactgataatgggtatctagagctggaaatagaactaattaggctggcaattcgtagaacattagcagcgcatgagacagggtgattaagctgcgagaaagccgcaataaattatgagaaccaagcacacccgaagcaagtcctccatcattatgcggacgtccaggtcgatgtaatattaatgaaattgtgaccgtgttacgttttgtgttgaactggtactggtaggtaggttatgacacgcctctagctctagttggtggatgtttccggtaacgtgtttttctgtttgtggatcctgcctactcagttttggttgcgtataagcctgcccctcatgaatcctatgagtttgtgaacaccaactattatactggtgacttgcattcgcatgatgattggatcttgtatcgtgtttggtttcgccgctccagttgccactgtttgggct

SEQ ID NO: 30380 - DNA, 1535 bp, Zea Mays
tgtgctttcattttctgttgaatcctctgaagtgtttggcaaatggtgtgatacaatctaaaatataaaatatagagctacttctatcatagtagttgattgatatctggtgttacaaactgcttaattatcttttcctttcgggaagccagttgtttgaccagtggttgatctagaaaatgggttggccaatgactaatctttgatatttggtgatacaagctgcctattttttttgttttgttttggggaagccagttgtttgaagggcaagtcagatgcagagctgtctcactgaatcactaggtcatgagatcaaattagtctctctgcatttttttgggaagacttctctcagtttatcccttctccagattccacttatgtgggagcctccgcagggtcagaactttgtgaagccagttgtttgtgccaatggttgatcttgaatatggattgaccaatgactataacttttgtttgtgagtatatgtggaataaccatgtttattcttctcaggaaattgaactaattccagttttatataaactttaataatcctatgttctgattatacgaatatgtcaggttttttgcgattcatataacttctagtattcatttatgaaaacccgctattagtagtattatgcagctcatctccttggagttcaatgagtggagtgctgcaggagccagagggctccatggttgtccttaggtgtttaaagggttgcgggtcggagcagtgttaatgacctcaaggtgtctgcagaggtctgcatgcctctgataaatgctatcgtgactgagatcaagaatgggacttaccctcaaggatcattcttgaatgtagatgtacctacagatgctgcacaccccaagggctacaaaattacaaaacaaggaacatatatggccagaattagttgggagcagacggtttacaagaagcctgcagtagaaagttaccagacagcaaacatggatgttgatggtgaaaaggatagcgaactagttacttcagaaaatgacctactgtttaagagagtgattgtagggagaagttccaatggagtggaaggagaggaaacggaccacaattccctagttgatggatatatcactgttactcctttgggtgctctttcccgcacagaaccagacgccataccgtatttcaaagcttgtgtctcacgtctggttgataatttctcttctcctggctcttctttttctagaagcagaggatgagccatgaaatttctaaagctgtttatttatggccatgatcaagttccatattgctttttcctaacccatacatggttaccatacatgggcaatattgccattcatgctacctgaatgttattactgcaatcagcatgtgtattctgcttcatagcctatgtcagaattatgcattcacaaatggttgcccgcttctttaccatgcatcttgtaagaaaaataggttcatttacaaatttattttggtgtttaatattcaacaagagcatttgaactaaca

SEQ ID NO: 30381 - DNA, 653 bp, Zea Mays
ccgatccgcagtcgctgttacgacagtccatctcactgctccaattcttagaacggatcggcgctggagctggagctcgtcttgtccgacggcgctcctgggcgctcctctccctggtcctcggccctgtcatcgctgattggttggagctccctggcccgacggtcttctctgcccgagctccctcccggcggcaagccggtcccgttcaatcccggcggagctcccatccatctcttcctcgcgcctcgtcagctgaagctcacctttggaaatagctgacacacttctggaatgacttcaacaagaaggtcggcgccttttcggtatactaatctactgaccacaacaataactatttcatcatagtttaagcgcttgggagagggagtaaacattgcagtgtcaactgcattaggaaccatgaaaaccttctctagagatatcccagacctcaagacagtgttctatttgcttctaagtgagacacatattgcctgatcaatatctgcaagagtaaactgcagcaccttattcatgtgaatgcttccagcatcagcaaaaccataaagtgagtgatctgtgaagacaactttgtaccccattgtcctagcatgtattaatgcttcatgacacaatgttgaaaaagcttg

SEQ ID NO: 30382 - DNA, 1161 bp, Zea Mays
ctcctcccagaatctcaccttcccccgcgtgcaccgactgcttttctcccgcgtgcgctggctgcttttggccaccgatacgctgcgtcggcgctccaaagttccaggtcaggagaggctagagttccaaatcgtagttcgtgtgaaccagtgtgaaccagttgaatctcatcaatcttatcaagtcatctaataaaaaaaggtttcttcgtatttacccatacctctcatcacatgatcattttattactctgatgtatgtcctgtttattacaaaggaatagataaatattaggtcagtagtaactatttccttcagcaatttcatttacaacatcagccacaaatttctgaaattgtgtgcaagcatcccaagtgagaataactgttttaggatgcctaggctcttatgaaaattagtttgtctgaacatgcattcataaatgatgttcagtgaagtatctgcacaatacatatagagactttagcctgacgtgaaaaggctaaatcagttttgttagttgcatgtatgcttcaaagttctataagctataactaaagagatttggacagcaagctgtcgtactaaataaactcacatgttttctgtttgccggaactattctctccgagtaacaaccactctaccaaaatcatggaagacaaacctcggtaccatcttcaatgctcaactttgtagtcaccttaatatgtagccgccattgtatctttgaaatttacctttgtagtcacccttaatatgtcagaattctcagtgacaaacacggtacaaaacttcttacataataatgtcttcaagtttctgtgaaccatcttgaagatacgtaacataatgaaacatatttgacaggttcgacgcgtcttagagttctacgatgcatccaagaattcagagaacgttgacaaatatatagatcagctgaccaacaatgaattgtcatcaccacccaaaaagatgaagcacacccaggttaacaaagccattccagattctacatgttccaagaatgacaacagttagaccatcctgaaatacatcaaggttgggcggcttccgaagtcattcagacctgcgtccgagcctacatcatcatttggtttgaatcgcggaacgatgtcgttcgtcactgcgttgttcta

SEQ ID NO: 30383 - DNA, 2685 bp, Zea Mays
ctggttgccaaggcaaagggccacaccctcacctcagcatctctctgctccacttctcctcgtccccgtccgacatcgcatcgcatcgcatcaccgcctctcgctttctgcccatcagccctccctctctctcctgcgtctccgaggcgcggacgacggcgacgacgcgaacgcccccgccgcctaggcacatttgctgggaattagggcaatcaacgtttaagtacatgtggtctactgctgtttgattattactgagattcaatcatttggtcagatgagagttctggctggggacttacaagtgtagcactgttgtcggcttgtgactaaatagcatcacttcacatacaacactggataatggatcgtagggatacttcagggtttgttagtggaggatgcaaaaataatgaagcctactagtttctctatatcttctaacttggtagctttattgacaattatttaacccagaagtgaggccagctggtacttcccataaagtttggttactctaatagcaatggaacccaggcatgggcgttcagcattcactataagtttctcaaatccaaatggctttgctaatcagtgcaccgccattccagccgtcagttattcagcggctggttctagccaacttgatgtgctggctcctactagaggttgcaagagaaagtggactgagttggctctaggtctgggtgacacatcaagctcagacagcagcaagcagagcatgggtactggctgcactgtttcttctctcaagggaagcgatgatgtctcatgtatggattacgacataagtttcaagttatctcttggcaatgaagatacttccaagctgcataaacaggcttgtggttctaaaaggactatggagaagcctcggttggatcttaagttatctttggctccatctcaatccgatgtaactgacgcggatctaatcagaagcagtgcacctcaggacatgtttgtgcagccgtacttgatgtcctcagtgccaacagtcgatgaaggatctacatctgctcgacatccatctggaggcatggtggtttccttccttaaccaggctgggatttctccgaaccagttgcccccacttaactctcatctggtccagggtccagcttgttcagcaccaacagtgctccaactgccaaaaagttcagctgccacttcttctgggtttgtccgcccacagcaacgcaacggtagcacaaagatctgttcagagccaggttgtgcaaaaggagccaggggttcatctgggcggtgcattgcccacggtgggggcagaaggtgccagaaagaaggctgcaacaaaggagccgaggggaggaccatcttctgtaaagcccatggagggggcaagcgctgtgagcgccttggatgcaccaaaagtgccgaaggccggacagatttctgcatagctcacggcggcgggcggcgttgcagtcatgacgggtgcaagagggcggcgcgaggcagatcgggcctgtgtatcaagcatggtggcgggaagaggtgccaaacgctgaactgcacaaagagcgcggaagggcggtcaggcatgtgcatcgctcatggtggcgggcggcgctgccagtacgctggctgcgggaagggagcccagggcagcacaaacttctgcaaggcccacggcggcggcaagcgctgctcggctgacggctgcacgaagagcgtgcacggcgggacccagttctgcgtcgcgcacggaggcgggaagaggtgcgtggtggaagggtgcgggaagagcgcgagaggcaggaccgaccgctgcgtcggccatggcgggggcaagcggtgccactccgccggctgcgggaagagcgcgcaggggagcaccgatttctgcaagtcccacggcggtggcaggcgctgctcgtgggggcaccctggctcagacctcgggtctggtggcgctccctgcgaccggctggcgagaggcaagaaggggctgtgcgaccggcacaacccgctggtccatgacaacagcgtgcatgggggtgcgtcgttcggtggcttcagtgtcgtcagtgccgccgccctttctgagggagatggctctccatctccaggcaccgagacaagcatgcgcagcttcttcatgcacgcggtggaggctcctcgctgtgtggcggcctcggcccatgaaggccgggtgcatgggggcaacttcatgcctatcatgctcgacggtggcgtgggactcgggaagaggccggccgacaacgctgatgctggtgcctctgcccctcctcgcagctggaaaagtatggagaaggcctgtggatctgcgccgcgcagctggctgtagtatttgccagaagttcgtgacctgctcacagctcactctctccatctgggtctcctctgctcctgctccaagtgtctcccgtgtcctctggtcatgcgtggtatggtatgataacatgaactgtgtgtgtactggttggtcaggactcgggacttgtttggtactgtggatattgtggttgtttgtgctcttgtagcataggtctggtcgaacatacctactagtaacagtcgtcgtgtgcggtgtgtgattgaattgtaaatgaaaggaacgcctcgtcatgatacaaataaaaaatagtacctttcctcgcggcgcccgccaaataaaaa

SEQ ID NO: 30384 - DNA, 3995 bp, Zea Mays
ctcgcagacgcgtccgtgatccgtccgtcgccctccccttcctgcgcaagcgtgcgcctacctgcatccgctatccgtcggcgatgtcggtgccccccgccggcaagcgccaggtgtccctgcggggctcgagcgcgaaggagatcacacgcgacgcgctgctgcagaaggtttccgaggagcgccagctccgcagccacctccgccgcgccgccgcggccgccttctccatccagcgaatatggagaaggtaccatgtgataagaatggtttcagaacagctccatgaagactgggaactattaatgaaccagcctaacatcgacttgactactcaatggatatccaaaaagatgcttagaccgtttcttttcttcattactcaaccttctagctggtatattggacaatggagcaagactgtggaatctatcttaacatgcttcaagattatcttgaatagtataaattcaatggatgcaaggaaaaacttctgctcctttgctgtgggtataccagaagagagatctatttggctttatcaggccaaaaagctgatttcactgtgctcttccattcttgccaggtacgaccattcctgttgcaaggatggaagcatagtcgacatgactgctattgctatgagattggctgtctctctaactgattgcaaaacatggaaaagtttgaacagtgagaacactagcgctgcagatgcttctgtacagagtttgattgaatttattggtacgtgccagagtggcatgtataattgtgttaggcaatatataaagtctcttggtcctcatgttacttcagcgaagaaaagttctgcaactgcaacagatgatgattttcttattactgctagtgcagtcactttagccttgcgcccattcgattctaagaaagcaaagggcggtgttgatctgaatggtgcttcaaagaaatacttcacacttatacttacaataccagatctgtgcaaacgcatgccacctcttttgttacctgctcttaaacatttttctgtgctgcaaccgagtctcaatattttactggtggcggcagatctccaaggataaaatatttgaagaaataataaaactggaacagtcagaggtttcagctagtattattccttgttctggttgggctcttggaaatatagtgaacttagctaccaatcatgatgacttatccaattcagggtgtttcattcaagagttagatttctgcttatatgttgatgttattaattgtatttctgaaaacttactggaaagttttgagaaaagcaagggaacgtctcaaaatgttggtaatatcactttccatgccgacacatctgttgcagaggaagaggataccaatgacgactgcagaatgagaacattatttatggaccttctgaagccaatttaccagcaatggcaccttagaaaacttttgatgttggcaaaagaggattttccatgccgcagggcaactgattatgatccaaacttgaagaatattcactttcgaatcctaaagttgtcagatgttatatgcttctactatcacatgcttagaattttctcatcacttaacccttctatcggtgcaatgcctattctcaacatgcttgcattctcacctggatttctagttgatttatgggaggcactagaaatgcccatttttggtccacctatccagaattcacaagaaacaggacacgagaaacagttggctacaagtagttcaggtgtgcaagtatcctccatgaggcaaagaaggaatgccaaggacacagcaaacaggtggtcaaatgtgctccagaagattactggaaaatccaatgattcagaggagggcactttatctgatagtattttattttctcatgagtctaatgatgatgcattaacttcatgggatattgaagccatgagacatgcatctgagggtattggaaaggacttaatgtgcattatgtatcttttctgtgctatatatggacacctattacttgtgctagatgatatcgagttttatgaaaagcaggttccttttactttagagcagcagcggaagattgcatcagcacttaatacatttgtatacaattctttcattcaaaatagtggaagctacagcaatcctcttgtggatgtagctgtcagatgtcttaatctactctatgaaagggacagtaggcataagttttgtcctatttccttgtggttggcacctgctagaaatggccgaattccaattgctgctgctgccaggtctcatgaggcagcatttggtatttttccagggattcctcatcggagctctgtacttaccacattaccacatgtatatccatttgaagagagagtgcaaatgtttagagaatttattgagtcagacaaagcatcgagaagggttactggtgaagtttctgggccaggcccgggatcgattgagatagttattcgtcgaggccatataattgatgatggatacaggcagttgaactgcctaagatcaaagttgaaatcttgcattcacgtgtcatttgtgagtgaatgcggtcttcctgaagctggtttggactatggtggtctgtcaaaagagttcctaacagatctctcaaagtccgcttttagtccagagtatggactattttcacaaacatcagcatctgatactagcttaattcccagcaattctgctaagcttctggataacggaattgatatgattgaatttcttggtcgagttgtcggcaaagcactctatgaggggattctgttggactattctttctcaccagtatttgtgcagaaacttcttggacggtataattttctggatgaactatcaactcttgatcccgagctttatagaaatcttatgcaactaaagcactatgatggagatgttgaggatctatttttggattttactgtaactgaagagttgggtggtaaaagaatcgtccatgagcttagacctggtggtaaaaatatatcagtgacgaacgaaaacaagttacactatgttcatgcaatggcagatttcaaacttaaccgacagatacttccatttgcaaacgcattttatagaggactcagcgatctcatttcaccatattggctgagcctgtttaatgcaaatgaatttaatcagttactttcaggcggactacaggattttgacgttgatgatttgcggaacaacaccaagtatactggtggttatactgagtcaagtcgaactgttaaactcttctgggaggtcatcaaagcatttaagccaacagagcgttgtttgctcttaaagtttgtgacaagctgttcacgagctccactgcttggattcaagtacttgcaaccttctttcacaattcataaggttccatgtgatgtaacactttgggcatcaattggaggccaagatgtagatcgtcttccatctgcttccacatgctacaatacgctcaagcttcctacatacaagcggtcaagcacgctaaggagcaagctgctttacgccataagctcaaatactggatttgaactctcgtagaggtatattcagtggttttgtaaccctgctttggttttgctgtgaatagaggtatagcaaaattcgatcggatgtacaattgcatcttgattaatcggagtaacagcttctatgaaggtagcgcaatgcataaaaaatgtttgtttggccggcggggccgtttggatcgatcccaggcaaaatccgacgcctggggagctccgttcaccaggccggtttgcaattcaaacagccatacgtgtgtttctattgattgtgctgagagagagagagagagagagagagagagagagggaggggggagggagagggagatagagagagagtgagggaggagagagagagagagagagagagagagagagagagagagagagagagagagagagaaagagagagagagagagagagagagagagagagagagagag

SEQ ID NO: 30385 - DNA, 4579 bp, Zea Mays
cgccagcccgagccacgatatttgcgctgcgcctcgcctccgcgaagcaacgcggacgccgtgccttgcatttccctttcacaaaaccaaaatccaaaacaaagaggagagcgtcctcctatcctccccttcccctcccccgcggccatctcaccccgatggcctcggcccccttcccgccagtcgcggcgtcggcggcctccgcgccgccgcgcctggccccgcgccaccccttcgctgctgccgcagccgcgcgccgctcctcgctctcgttccgccccgccgcgcgccggcccgttctcccgctccgctcctccgcggtcgcggctaacaccctccgctgcacgcaccgccgcgccgtctcatccaggtcgaggagacgcgcgcaagaactcggcgcggcgcccgcgttggctgcgtcgacctggggcgtcggcgaggagaagggcggttgcctctcgtgcttccccaagagtaggcggggcaggtcggggctcgcgaggttcgcgccgtgcgcgctcccgcacgcgtcgggactatcgtttcgcagccggttgagcgggtccaaggtcaagcctagccatatattgcacgccgctggacctgatgaaccacatgttgcaagtccaacatggtctgatacttcccttgatacacgtgacatggatcatgctattagtaaggaggagcttgaagatgttctcaacactccgcttcctgagcatccgaagctaattcgtggtcaattgaagaatggacttcggtatcttatcttaccaaataaagttccagcaaacagtaaaaaacgtgaaaaacttttggggacaggtgcgaggtctaatgcgtatacagacttccaccatacggtgttccatatccactctccaactaaaacaaaggaatatggtgaagacttactcccttctgtgctggatgcattgaatgagatagcttttcatccaaagttttcttcatctcgtgttgagaaggagagaagagcaattctttctgagctccagatgatgaacacgatagagtatcgtgttgattgccagttgttgcaacatctgcactcagaaaacaaactgagcaacagatttcctattggacttgaagagcaaatacagaaatgggatccggagaagatccgtagatttcacgaacgttggtactaccctgctaatgccactttatatctggtgggggaaattgatgatattcctagagctgtgcgggaaatagaggctgtatttgaacacactctttcagaaaatgaaggaaaccctgtaccgagcactagtccatttggtgctatggcaagcctttttgcaccaaaactcccaagtggctttactacaaacctaactggtgaaaaatcacctgccacagataaaataaagcctgtaaaaagggaaagacaagcagttagaccacctgtagagcataagtggtcccttcctgaagttgctcaggacgccaaacccccagcaatttttcagcatgagttgattcagagtttctctatcaacatgttctgtaagatacctgttagcaaagttcagacctacaaggacctgcgtagtgtactcatgaaaaggatatttttgtctgccctacattttcgaatcaatacaagatacaagagctcaaatcctccttttacttcagttgagctggaccacagtgactctggaagggaagggtgcactgtcactactcttactgtaacggctgaaccccaaaattggagaagtgccatcaaagttgctgttcatgaggtgcgaaggctgaaagaatttggtgttacaatgggagaaatgacccgttacatggatgcactgataaaagatagtgaacagcttgctatgatgattgacagtgttccctcagttgacaacttggacttcatcatggagagtgatgcacttggccacactgtcatggatcagttgcagggacatgaaagtttgcttgcagtagctgaaactgtcacccttgaagaggtcaatactgttggtgcggaagtattggaattcatttcagattttggaaaacccaatgctccccttcctgctgctattgtggcatgtgtacccaaaaaggtacatgttgatgacataggtgaaactgaatttgagatatatccagaagaaatcactgaggctatcaaggcaggtcttgaggaacctatttacccagagcctgagcttgaggtgccaaaggaattgatcactcaatcaaagctcgatgaactgaaattgcaacacaatccatcatttgttcctttaaccaaagaggagaatgcggtgaaagtgtttgacagtgaaactggtatatcacaacgccgtctttctaacggaatttccatcaactacaagattacacaaaatgaagctagggttggtgtcatgcggctcatagtagggggagggagagcgacagaagattctgaatcaaagggatctgtcattgttggtgttcgttccctgagtgaaggtggctgtgttggtaacttttctagggaacaggttgaacttttctgcgtcaataaccttatcaactgctcactggaatcaaatgaggaattcatatttatggaatttagatttgctttaagagacaatggcatgcgtgctgctttccaactccttcatatggtccttgagcataatgtatggctagaagatgcatttgatagagcaatccagttatatttgtcttactatcgctctatccccaaaagtttggaacgttctacagctcataagcttatgttagccatgctaaaccatgatgaaaggtttgtagagccatcgccacattcactgcagaagttgactcttcagtcagttaaagatgctgtcatgaaccagtttgtgggtagcaacatggaggtcagcattgttggtgatttcactgaagaagaagtagaatcttgtgttcttgattatcttgggactgtgagggcttcaagttctccaaccatagaggagcgtattgaaaagatttcctttcgaccatttccatcagatgttcatttccagcaagtatacataaaggacacagacgagagagcctgtgcatatattgcaggccctgctcctaaccgttgggggttcgctactgaaggaaatgacctatttaatgtcattcagagatctgacgctgatgcagaaatatctgaaccagtaagcttggatctaacagggaagagacacatcaatgttcgcagccaccctcttttctttggcatcactttgagtctgcttgctgaaattatcaattctaggctatttacaacagttcgagattccatgggattaacatatgatgtttcttttgaattgaacctttttgacaaattggatcttggttggtatgtgatcgcagtcacttcaactccaagcaaggtccataaagctgttgatgcctgcaaaggtgttctgagaggattgcatagtagccgaattgtggaaagggagctcgatcgggcaaagaggacactgttgatgaaacatgaagctgagacgaagacaaacgcctactggcttggtttgcttgcccatctacaatcttcatctgtaccaagaaaggatgtatcatgcatcaaggaattgacgacattatatgaaaatgcaacgattgaggatctgtatattgcatatgagcacctgaaagttgacgattcttctttgtttgcttgcattgggattgctggcgctgaatctggtgaagatacaaacgatgacgagcctgatgtggatcttcatggcatgggtcccatgggaggccggggtctttcaacaatgaccagaccaaccacatgatcaccattgggatggccaacccttccaagggattaaccttgctccccaagacagggagtcacatggccctaggagactgcatgttgactgtcgtttcccagcaaaactgtttaaagataattcaagcatttgatctggatctggaagactattatatcctgagccacaaccaaaagcttggtggctgcattttttccccgaggagcgttgagttaatgactcagcaaggtcgtgaaaaagaatttattgtttgaggtcatgtagcttcacatgtacagtaaaagcaggttggttcttgcatacagttgttgtaactagtgcgttcagggcattgaagataggatgacagtagatcacagacgttgctgggctgcgaatagcgtaaggcatctgctgtaactgtaacgaaataatgaagcgcagtgtcaggaccctggatagatggcaagtgggtggcatgtgtgcctataaaaagggagaacgtatagaccaagggatatgaaagaaccatttgaacaaactaaatcctctctacctttccattactgttatctcttcataatctctcctctcatgtatcctgtttctctaccttctagaacaatttggctatcagatatcaaattagatcgtcttcctcgctgctatctccttcttcaacccttcttctacctgaacatctctcttctctccgatattcccttctgtggcgctaacacgcaggcatgtaacatttttgtgttattcttttg

SEQ ID NO: 30386 - DNA, 767 bp, Zea Mays
ggagtgtgcccaacttggagacgctcctatgctatcaccattttagaatatatggtgttgtgcggaaagaaatctggtaccgccctgacatgtacttctaccgtgacatgctatacatgctagcgaggaacaagaaaattaatgaaacaaggcaggtatgggcggatctcaagtctgaagacgtgctatttgatcagcacacttatggcgacattgtgagggccttctgtgatgctgatttgattgaccttgcaatggaaatctatgatgacatgaggagctcccccgaccctcctctatcattgccgttccgtgttatcctgaaagggttggttccataccctgaactgagggagaagataaagcaggattttctggagcttttcccagatatgattgtgtatgatccaccagataccttatctgatatagatgaagaattcaagttttgatgaatgtacgccttcatccggattcagtgcttctgagttacattccctgcactgcaggcaaacctccatttctcgttcttttggtgggctagatcaattgtaaatgtagctgtctcgatctgcccagtagctgtggtaccaccaattttaacctcttgatgaaccatttttgttaatctatgctttggagaattgtctgcttccgtctgtgtctcgtcctactttgaatcaccttgttctgaagtttggtactgctgctgtgcactgagatttgtgttccgttgatccctgctatataatcatttgtacacttca

SEQ ID NO: 30387 - DNA, 2142 bp, Zea Mays
gtactggccgccaccactcgccactcgccactcggccccaggaccctcctcttcctcgccagcaagccggcacgatccctcccttccgggaaaaaggctcccaatctgttccgagccagccggccatggcgattagggctggccgctcgccccttctccacctcctcgccctcgccttcctcatcctcgccgcctctccctgcctccaagaaattaaggagagttgctgtaaggaagaaaatggaagtagtgcagcaggatgatgaagcgttagttaaacttgagaatgcaggtatcgaacgttcaaaagctgttgactctgctgtgctgggaaaatacagcatctggagacgtgaaaatgaaaatgaaaaggcagattcaagggtccgtttgatgcgagatcaaatgatcatggccagaatatattctgttcttgccaaatcgagggacaagcttgatctctatcaggagctgcttgcaaggctcaaggaaagccagcgctcccttggggaagctactgctgatgctgaacttcccaagagtgcttcggatagaaccaaagcaatgggccaagttttatcaaaagcaagggatctattgtacgattgcaaggaaattacccagcgtttgagagcaatgcttcagtcagcagatgagcaggtccggagcttgaagaagcagagcaccttccttagccagctagcagctaagacaatcccaaatggcatccattgtctttccatgcgcttaacgattgattattatcttctctctccagagaaaagaaagttccccaatagtgagaacctggaaaatcctgatctttaccattatgctcttttctcggacaatgttttggcagcatcagttgtggtcaactcaaccatcatgaatgctaaggagcctgaaaaacatgtatttcatcttgttactgacaaactgaactttggggccatgaacatgtggtttttgctgaatccacctggggatgcaacaatccatgtggaaaatgttgatgacttcaaatggttaaactcttcttactgccctgttctgaagcagcttgagtctgcagccatgaaagaatattatttcaaggctgatcgtccgaaaacactctctgctggttcttctaatctgaagtatcgaaacccaaaatatttgtccatgctcaatcatctaagattttacctcccacaagtctatcccaagctgaataaaattcttttcctggatgatgatatagttgtccagagggacctaactggactctgggaggttgatcttaatggaaatgtaaatggagccgtggaaacatgtggagagagttttcaccgatttgataagtacctaaatttctcaaacccaaatattgctcagaattttgatcctaatgcatgtggttgggcttatggaatgaacatgtttgatctggaagaatggaagaagaaagacattactggaatttaccacaaatggcagaacatgaacgagaacaggctgctctggaaactggggacattgccaccagggcttctaactttttacaagctgacacaccctctggacaaatcatggcatgtgcttggcttagggtacaatccaaccattgagcgctcagagatagacaatgctgctgtcatccactacaatggtaacatgaagccctggctggaaattgcaatgataaagtatcggccttactggacaaagtacatcaattatcagcattcctacattcatggatgcaagatcagccaatagaaaccaccctcagatattcttctgtgatgaacattgaagttggatgggactcaaaatgaaatcagtataactatcacatgttctttattcgtgttatattagatttgttagttatcacgtgtatgtagtttcgtcgcccttttgtggtgctttctcccctagctcattgttggttcttgtccctttttgtcatgaaaagaatgatgagctctatgattctcatcagctgataaatgtaatgtctgaatttctgtcggtggcaaattaatgatcccattcaaacggtatcaagtgttcgaacattcatgctagcatttgatggcaggttgagagttatttacgagcatctgttcgttcgtggttgagattgttttttta

SEQ ID NO: 30388 - DNA, 2205 bp, Zea Mays
ctggcagtcgcgtcgacctccccgccgcgcccacggcactcgccactccacccaccaggccaagcacgcggcggcgacgccaaagcatcagggcaccaatggttgtgctccccgcggccccgcggcccctactcctacagtcctaaataatagccttccattccaatctgttcccacagttcagtcgcacactcgggcgggtcaaattcgactcgggaggaaccaaccacccggaaattcccccctcctccagtctccacttgatcggcgaggcgctgcggccgcgggcgaatggcgtcggaggcggagtcgcccgtggtgatccacgcgtggtcggcgccgcgctccctcagcaccagcctcatgtactccttcgcccagagggacgacatggaggtgcttgacgagcctctctacgcaaatttcctgcgtgccacaggcgtcgacaggccctaccggcaggagctcctgtccaaaatggaccctgatggaaataaggttgtcaaggaggtgatttttggcccaggggacaaaaagtatcgttactgcaagcacatctcaaagcaacatctcccaaatctgtcaagcgacctcatgaagaagggaaaacatttcatattgatacggaaccctctagatatactgccatcttttgataaagtcgttccaccatccttcatggagcttggcataggcgaacttgtctcaatatacagtgaattatgtggacttgggagcccaccccctgtgatagatgcagatgatctgcaacaggatcctgaggccgtcctaagtggtctctgtgaggatctgggcattcctttccagccacaaatgttgaaatgggaagctggccccaaggaatttgatggtatatgggcaccctggtggtatgggagtgtgcacaagtcttcaggtttctctaagcctcgccaatatcctctgactttcccattcgtgttttatgacctgcttgagcaaagcttgcctttctacaacatgctgaagcgccaaataaggaagataagaggaccgcagcaaccaccattatcggaccctcctctgcctgtccctgcaaataaaaacattcttgtttgggttggagatgaacttttgccccgtaacagtgcaaagtgtttgattcagttgtacaaggaggagatgctgtttgggaaggtttacgtatatatgatggaaaagtattcaaattagatgaacatttggacagattgtttgattctgcaaaagctatggccttcagcaatgtgcctactcgtgattggattaaggatgccatctttaagactctgattgcaaatggaatgttcaacaatgctcatataaggctcacgctcacccgtgggaaaaaggtgacatctggaatgagtccagctttcaatctttatgggtgtgccttgattgtgcttgcagagtggaaaccaccagtttatgataactctcatgggataaaattggttactgccaccacacgtcgaaattctccaaatagtatagattccaagattcatcacaacaatcttatcaacaatattctggcaaagatagaaggtaatcttgcccaggctgaggatgccattatgctagataaggatggctttgtatcagaaacaaacgcaacaaatatttttatggtcaaaaagggaattgtattgacacctcatgctgactattgccttccaggcattacgcgagcaactgtcatggatcttgtggtgaaagaaaactttgtgttacatgaacgacgcattagtctgtcagaattccatgctgcagatgaggcgcggacgcgcatggccaaggtgtgtgttgctgctgccgcggcacagatgccactgcagcacatgtcgctgctgccgcagaagctgccctggacgctaccgctgcaggcacagtcggcttgggcatgggttctttccccacactcctgtcgcaaccccttcctcctggtctcctccggtacgatggcgccttgtcagtgccgctgcgggccgctatcccccaacgactcttttaccgcctacttcacccttgttactaccattgccacccaagtatgttgtcgttgctcgggggtgttgtgatcaccgacactttacttgagtccgatgatatcaaggtttcctaggcatatgaggcagttgccatcgctaacctacatgctcagtggactagtgtacacaacat

SEQ ID NO: 30389 - DNA, 3244 bp, Zea Mays
cggctgttgcgggctctgggctcagacctctcacctcgggcctcagagagtcagagcgagagtcggtccaacggctactggttccactgtctccgcttccagactctacgttcctgtctcgttcaaaaccctaaacctttcctctccatcggactctcgccgccgccccatggcggcggaaccaagagagcccacatcctcgctggatgcccagctcgcggcctcttcctcctccgcagccggcgtaggcggccccaacccgtgctgcgcgacgcagtggaagaattgccagaaattggtgaggagccggacggcgctgcgggaggcggtgaagctcctgcaggctgagaacgagaagctgcggaaggagaactcggagctcagcaaagcatgctagtagcgtgctagcaggaattttaacagaaggtgcctatcacagagaagatgtctttcaaatgtgcaaggaggaacacctccgaggtgattcagcagaagcagctagggcaactgagtctgatgccagagatctattggaaaaggagataattgaattaaagacacagaacatgagtttgaagcaaacacaaaatacctgcaaaaataatgatgaacttttacgtatctctgaattagaggaagaaaatagaaagctcatacagattttaggagaagaaaggaagaagatcacttctgagaagaaaaaaattgaagaagaaaagtgcaaaactctagaaatgcaaaggatatggaagtcagaagcacagaagtctgaagagtatagaagagttgctgatactgaaagaaaagttgccaatgattggagagcatcatgtgaaaggttgaggagtgaagcaaatgaactcagagctcagttgactgctcaaattcagaaaacagaagaaatacttaaaagggctgaagcggagaagcagaaggtcgccagagaaaagaaacgtgctgattcagagaaatcattatctgaaaagaatagaacacttgttgaagttgagaagaaaaaagtaacagaagaaaagtgccgtgctgacaatttatttgctaagttagaggagcagaagaaactcaatgaacatttgcgaactagcatacaggttgaaacgaagaatgcaatagaagagaaaaaacgaggagaccatttgtttcagaaattagaagagatgagagaacagactgaatgtttacagagaaaggcaaatgaattctctgcaggtagagatgtaatttcttctggcaagtgtggccggcgacacattgatagaatttctgagaatgcaaacgttaagcttctcaaagagaaacttaagctgaaaaaagaacaactaaagcatgtcaagaatgtgtccaagctagataaagcaaaaactgctttaataagaagagagcttcaaagtttaaagcaagactggacacagctactgggtcggtttaacatgctggatgaccaccttgcacgtggtgttgaagatattcatgtcttaacacaggctgggacagttccatttggctcttctatcccaagtgaatacacttcatatcagttgcccagagaaagctgctcacgatcaatctcaggtactagttctgaattatgcccccctcttggtagctctcacagactgctgaagtcaaaatgtcagcacagatcttcatgtccaacatccatatctgatgaaaaattcatgggctcacagggcaaggataacctatttgtctcatcgacagatatcaggaaaaaacaggattcagttgttcccgagctggctcctaaaattagaaatgatagagcattgccttgtggtacgcttacagatagaagagaaacacttggtggtgataggaagagaaaacacaccaaaatgtctcaagacccctctgcttttcttccctcaaaaaatgatttgctacatttgaaatcaaaggtgcctgctaccacttcaaatgttgcattatcctttgatgatgatcctttgtgtctgcagcaaggaaataacaccatatgtgttactgaaggtgacatggataaagctccttcattcagtttcccttctaaagtgtcttgtggaggaaatggctgtactagtagcaagtttgcttcattgatcccctttgaggaaatggtcagggaaaactgcttaaagttgctcaatttggatgatgatgcagatgaggaaaagtttagaaaggcaaaggagagaccccattcaccaaacctgagcatcatccgaccccgtagaactaaactgccaacgtatgcagaacctcacagcttgggtagatctctcaacggttgtcctgccttaggatctgatgccattgattccaagacaaggtccaaagcatcggaagttaaagagcctgtaattcagaaatcgactcaaaattatatccagcttgatccgtcgtcaaatacaatcgagtgtagtggcattgctaaacctctttttgtgaatgataaatccaatgcagctgtcaatgtttcttgtagcaccagtttggttgtagtgccagcgagcacttcttttgacagccttttgcatgagcatgtggcccagaattctgtagcatcttctgctgaggcattagacagtataagcagaccaatgttatcgggaggtggtcattcagattccattttacatttgtccaaggaagtgtctaacaaaaacaactcacatctgatttgtgacaaatcaagtcctgggctgcaagctaatgttcggacaagtgaaacaacagtgaccaagccaaacaattcggtctcgaatagtttgcttcggcaccatcatggatccgaaaaccctccattgcacttagttggatttacaagaatgaaaagaagcaaaatgattaacatatttcggtattgggagatactgagttctcaatctcaaaagcattctgacgaagcttcagttgatggtccactgcttgataaagtgtcaactgacacaatgctacctatagacgagaaggtttccctcatattttcccttttgttgtgggatactagattcactgaagaaacttttgtggatggaaattttgcctcatcagctttttcgtcgagtggtcgattttttttacaagagggtaccacaagctaaaaggcaagttttataggatggcgattagacctgctatcttgtatgatttacaatattgacctataaaatgacaacatatttagtagataagtgttgcggaaatgcgtatgttgtgtttgccc

SEQ ID NO: 30390 - DNA, 1790 bp, Zea Mays
aaaccttgcgtgcgccaccgccaatggcagcaggaatcctctgatcctctttcccgcacatccaaagaggcgccgccgtcctctgaaaaatcctagccgctttctacatggccgagcccgccaaccggcggatggaggccgtccgccgtcacctccttctgccttcacccgcgccgcttcgccctaatccgttaagcagcctcgcggaggtggagcccagcccggtgatcattggcgggatggtgctggatatccatgccaagccttccgtgccgccccatcatggtaccactgtccctggaatggttaaatacatcagtggaggcgtagcaagaaatattgctgagtgcatgtcaaagcttgggacacaacccttcatgataagtgttgttggaaatgatttggcaggggacttccttttgaagtactggaggtcagctggattatgttcagaaggttgataatgttgcaaccccagtagtatcaaatgtgtttgacggtactggagaattaatcgctggagttgcaagtgttcaagcagttgaaaattttattacttcgagctggatttatcacttccgtcatcatattgctaatgcaccacttgtaatgcttgatgcgaatttatctcctgagtcacttaaagcagcttgcataatggcatatgaatttggggtgcctgtgttatttgagccagtctcagtggtgaagtgtcgaagaattgcaccagttgcagaatatataacttgcacttcccccaatgaaattgagcttgttgccatggcaaattcattatctccatcagtgaaatataattttcacacaatagagcagttcaaggagaaagcagatactgttgaatatatttttcaaatgcttagcccagcaatgttcttcctacttgagaagggcatcaagttgcttatcgtgacacttggctcaaatggtgtttttatttgttgcaaagagcacactaacttcatgaaagaccagcacaagtgcaaacagacgcctttctccagacagctacttgaaaaaatggacgggtgttttccatcgaacaatcttgttaatttgtgcagagaaagctcttcaagaacatgtgtttttcatttacctgcaatatcggcctctgtgataagcctcacaggtgctggcgattgtttggttggtggtgccctttcagctctatgtgcaggcttcgatatcatccagagcgttgcagttggggttgctatagcaaaggcatctgtggaatctgaagccaacatacctgatgacatttctgctgcgagtattgcagatgatgcacaaagtgtattgcattctgctaaggtgctttggtgcaaatgaagaatagaaaaactaccatcccggtgtaaattgaagacagtcaggtgctattgaagctattgaactctgttactgttccaacggcacaagacggataagaatgaaatcgctatatatgatggatttttggttggaagaacagagggatcaccaatcagaattctttctactatagcatatatttttcatgtacattgtgggtgcaagttcgatcaagggagcaaattctgttgtatttttttagttagtgagattatgtgatgaaaaattggttagcgtcaaatttgcaattgcaaagtgactaatataatgacataatataatacactgataagatataattggttgcaagttcaaattcatcattgtgatgtagttatgatacaatttagggtgtgtttcgttgaactgtgattttttaagaaagctgttgtgtg

SEQ ID NO: 30391 - DNA, 1532 bp, Zea Mays
atgtcgatctgcatccccggatctcctcttcaattcgcctgcaatcttgggggtgatcgattacacagcattatgggtcgcgtgaagctacagatcaagaggatagagaacaacaccaatcggcaggtgaccttctccaagcgtcggaatggcctcatcaagaaggcctatgagctctccgttctatgcgacatcgacatcgcgctcatcatgttctcgccctccaatcgcctcagccacttctccggcaggcgcaggatcgaggacgtgatcacgaggtacatcaatctcccggagcacgacagaggaggagttgttcggaatagagagtatctgatgaagatgcttgctaaactcaaatgtgagggtaacatagccgaacaactcacacctaataaagagccaataaattccaacgtagaggagcttcagcaggagattaagacgtaccaacaccagatggaagtcttaaaggagcaacttagatctgacaacattgatgtcgatgaacgatttcgagacgtgtgagaaattcctcatggacaccctcacttgcgtggaggagcgaaagaaatatttgctgtgcaaccacgtggccccgttcgatccgtcggcctccgacatgcaacaacacgtagacatgttcgccctgccgccggcgccgcctcaccaacaggagcaacaaggggacgacctaggaggcgccgccagcgcgttcggtggcgatgtctcgtggttcgccgatgggatgccgacgtcgtcgatctttgccgcgtcggacccaatcttgtactttagggatcaggtgatgttcgactcgacgtcgacgatgcggcgtgactcgatggtggcaggggtggacccaggaatgacctcggtgtgccagatggagcagcaagcccccagcgtggactggcagcaggcgtacacgtcggcggagttcttctccacgctgatcccgtccacgccctacccccttgatgatcagatgcagaacgacatggctcaagtgcttacatctccgatggtgccaccgcacgagcacgataaggtggaggtgccgatgagctcgtccaacgtgccgacggacggggattgcggcaccacccttgccgccgctcaagaggacggcctgcccggggtggtcaacattggctagctagctgcatctgcatgcatgtccggctcggctctctgccttcctcacttctttaccaactgcagccatgatttgatcttgtttcacatggacagatgatacttgttattcgtttataggttttattgagcactatttgtggcactggtctagatggtccgacctgcggacggttcatttatagacgtagacagttcacgatagtattagatcagacgaattaacttcctttctccatgcatgtttatctctctaaacttgtggaagttgttggagaacgtctagaacgggtctagaccccccttatatatttgaagtggaacggccgattgaactatcaacaagcaaatcaaatcaatatatcttctattac

SEQ ID NO: 30392 - DNA, 3374 bp, Zea Mays
gagacccattcagcccaccggctacacggcccatattccgtactcgtgaacctcgtgctgacgtgctcacacagtcactccgtttagctcaaatccttatcggcgactcggcgtcggagctcacgaccacgaccgcttccacgccctcgaccccgaacccccaatcccggacgcgaccgctgaaccctagcatactccggccatctgctgccggccccggcgatcccccgccatggcctcccccgagggcacaacgtgggtcttcgactgtccccttatggacgacctcgcggtcgccgccgacttcgcggcagcccccgcgggaggatttttctgggcagcgccgccgtcgctgcagccgcaggcgccagtgcagtctgtcgttgccgcgtcggctcccaacccatggtaattgccggattacggtctcgatttgggctcggccgtggcggtggttggttggacttcgtggggttgggttgcatttggtcggggttcgttgccagcatatctgtagattctgtacgtatagtagttcgttatatggatcaatgacttgattggaattcggtgaagcggctgaactgtgggatttggaccgtgtccttggaatcgtgtttgcccaacattaatagtagaactgattatggttctttatgtttccaatttactataccagcgtcgtcctgtggaaggtgtgggctgtggactctgttggttctgccagtggagttgtgtgagaggactgaggaaatggttcacaggatgggtcagtggacctttactataagttctaagtagtatggcgtgaaaggactgttcccatcttatggtgtgcaagctggtaggtaggtgcatataggtagtctcatcaagcctagatgctttcctttgggcacacctttgtgtcatctatactcttgtcacaaaaacatattgtttattaaaacatttaataaagcattagaaactacaaacatcaataaccatcacattatttatttggaaatatgtaagttatatatgtgtagatttgtattcaaaatctgttaaacttgaaggattttaagaatttattctgtgtggccctgtggaatgtgtggatgagtcggtgtacctttactgtaataattctcggtagaacggtggaaaggattgttcacatcttatggtgctccgctggtgggtaggcaactaggcatatataaggcctgtttagtttagcttttttctgactattttttctaagaatctggatgtggagaaaatctgactgtgggaagaatctgaatatcgtggggattacacgcggaggaagatgaagtggtccaaagggtcaatgatctagaaagcgatgtatttctaatatcgtgacgactcgaccgattatgcgttcatgttgattttggacggtttttaccaaaacaattcttatagaagcggactgaaaagctggggcgtttggcagtccgcaacagattttggtggccggaagttgaaaaaagcccaaacaaacagggccacaggtagtgttatggctcctcatctagcctagattgcttttgtgcacactttgtgtcatctatactccctccagtcaccattgaaaatatttagctaaaccttggaaactacaataataactgtttagggttacattatttatttgggaacttaaagttttatgtgtagatttgtatcaaaatacttgcaaaatctcgtaaattcgaagaatttaatctatagaaaaaggtggtcaaatatacgtattgaagactactccaagtcaaaggtggtcaaatattcttgactgaagatagtagtttgcagaatctgttagaaacatacaatcctcattctgcaatcaacttgtggctgctctattgttgggcctttataaggctagttactacccttgttcacagagaagaatagataaattccttttgggtcagtatattctttatgtattgatctcttggttcatccaatagtctgcagaaacaggttgcacacaagttgttgtaattgaatccttcatgattggtgtggtgtgaagaggattaccatattgtgctggggttctgacagctccattgctctttagtacatacaagctcatctttgatgttaagttggagaagttttgaggtgtttggttggctgctttaaacagttgtattgtgtgctgtctgtggtaaattcttcttctatttttccacatatatttcgttagatgtagtttgtagggttatgacttgctatttgctaagttgaaaagcaccaagtagtgattttttatatttactaattattgtcttcgatttgcttgcatagatattttgtttaccatgctatgttatttgtctttttttgcttcttattatggcgcattatcttgatatttggcatcctaagggcgtacccagtgctgtaggcttcccgcactgtgcggggtctggggaagagtatctttaaatatttggcatcctaacattggcttttattttagcagtatggaaatcagtagctctgtggactgtggtcaggaaaaagaacagccaacaaataaacgtccaaggtcagaaagtactacagaatcaagcacaaaagcatccagggagaaaattagaagggacaagctgaacgagagattcttggaattgggtgccattttggagccagggaaaactcctaaaatggacaaaacagctatattgagtgatgctattcgtgtagtaggtgaattgcgtagtgaagcaaaaaagctcaaggattcaaatgagaatctccaagagaagattaaagagctgaaggccgagaagaatgagctgcgagacgagaagcaaaggctgaaggccgagaaggagagcctggagcagcagatcaagttcctgaatgcccggccaagcctcgtaccacaccacccagtgatcccagcctctgcgttccctgctccccaggggccagcagccgccgccaggcacaagctgatgatgcctgtgattggctaccctggattcccgatgtggcagttcatgccgccttcagatgttgacacctctgatgaccctaggtcttgtcctcctgtggcgtagaagccgtgcgaaatcctgttggaaagaggcgatgctgccttccattgattcaaatcttgatcggtccgcagtgttgttggtgtagttgattccagaactgaaggggatgttacatgtgtcggacggtgacatggggtgatctgatgacccctttgtatattatatatggtatggtataaataaattccgcgaccagaagctaatgtggatcggtggattagcttatgtctattcttgcctgtttggttatgttcctcctcgcatgtgaaaactgac

SEQ ID NO: 30393 - DNA, 3504 bp, Zea Mays
cttaaaccaaacacgcgctgccaccgaccgatcaggcgaccccgctccaagaggaaatccaccaccgcggccggggcctcccagatctcgctggaggcagcggcagcggcggcggtggggggcgatggcgctcaacatgaagaccctgacgcaggcgctggcgaaggcgtcggctgtcatcgagaagacggtgtccacgacggtgcaggaggtgacgggcccgcgcccgctgcaggactacgagctgctggaccaggccgggtccggcgggccgggactcgcgtggcggatctacacggcgcgaccgcgggacggcgccccctcggcgccctaccccgtcgtctccgtctgggtgctcgacaagcgcgccctcgccgaggcacgggcgcgggcggggctgtcgaaggcggccgaggacgccttcctcgacctcgtccgcgccgacgcggcgcggctcgtgcgcctgcgccacccgggcgtgctccacgttgtgcaggcgcttgacgagaccaaggccgccatggccatggccactgagcccgtcttcgcctccgtagctaacgcgctcgggtgccttgacaacgtcggcaaggtgcccaaggagctcaagggcatggaaatgggactacttgagattaaacatggactgctacaagttgcagagacgttagattttcttcataacaatgctcatcttgcccatcgagctatatcgcctgagacggtctttataacttctaacggatcttggaagcttggtgggtttggttttgctctttcagttgatcaagccacaggtggtttgacttcatcacagctattccattattcggactatgatgtcgaggatacagctttgcctcttcaaccgtcgttgaactatactgcaccagaattggttcgaagtggagattctaaagttggctctgcttgtgacatgtttagctttggatgtctagcttaccatctggttgctcgtagaccacttctggactgccataacaatgttaaaatgtacatgaatgccttgacatatttaacaagtgaagccttttctaatattccttctgatttggtatcggatttgcaaaggatgatatcgatggatgcagtatcgcgtcctagtgctgtggcctttacaggttcttctttcttccgggatgatacgaggttgcgcgctcttcgtttccttgaccatttgcttgagagagataatatgcagaagacagagtttttgaaggcattatcagatatgtggaaggattttgattcccgagttcttcgatataaagttcttcctcctctttgtgctgagttacgcaacatggttatgcagccaatgattttgcctatggttctaacaatagcagaatctcaggataaaggggattttgaacttgcaacactgcctgcgcttgttccagtgtttacttcagcatcaggtgaaactctacttttgcttgtgaagcatgcagatctcatcattaacaaggccacacaggaacatttgatatcacatattcttccaatgctggttcgggcttatgatgacaatgatccccggttacaggaagaagttctgcgtcgaacagtatcactgtctcgtcaacttgacaccaagctagtcaaacaggctgtgcttcctcgtgtacatggattagctctaaagacgacagttgccgcggtgcgcgtgaatgcgttgcgctgtttaggagatcttgtgccatccctggacaaagaaggtatattgggtatcttggagacggttcggcgttgcacagctgttgaccatactgcgccaactcttatgtgcacacttggtgttgctaatgcaatctataaacaatgcggtgtggagtttgctgcggaatatgtgattcctctcatcttcccattactcacagcacatcaactgaatgtacaacaatttgccaagtatatgctatttgtcaaggacattacaagcaagatcgaagagaagcgtggtgtgactgttacagataatgggaacacagaggtaaaagcatcaccttcattggcaaacgggatccattctgaacctatgccaggacaaataccagctgcaaagagcagccctccatgggatgaagactggggtccttctaagaaaaccggtgttccatctctctcagttgattctagtgcacagacaaagcaaccctcagtacacccttttgacttcagtactcaaacaaagcaatccacaccactcccctttgatttgagcacccgagcaaagcagccatcattagtttctcatgctacagcagctacaatcccacctgcgcaaccacaaccagtacaatctcttgtgcccagttcaggacctcaaacttctggctcatgtgcccctgttgacattgagtggcctcctcgaagaagctcgtcatccgacttcaatgcatccttgtctattagcaaggagaatgaatctggaaggctatctagcgacggacttgacgatattgatccttttgctgattggcccccaaaacctagcaatgttactagcattacagcaaccgagcatcgtccaagcataaatcaaaatatttctggatttagctcaggtaacatagggtttggtggcagcgggaattctatagggcaagcgaaaagcaaccaaatgagctggtcaaacacgcctaatctgatgggcatgaactcaactggcagctatttgaatcagggcagtgcagctctaggttttggaaatccaattggaggattgagcactggcctctccaatccaagcagttccagtacaggcctgagcatgatgcaaccaaaatctgattttggatcactgtccatgtctgccaataatgccgcaaatggcccacccagacttgcccctcctccatctacttcagttggaagagggcgtggtagaaatcaaggacaatcagcactctcccgagcatcaaggcctcctcattcgaactcgtcatcaggacaacaacctatcctggatttactttagtaagagaggcttgcctctattcttggcgatgacgattgtcaatgtgtacatcttcaaacctttgtaagtctgaaggagttctacttcggggaatctggaccttgcagaggttaccttctctcatgcgtagggttttgatttgggcattgaggctatcttcatattggtgacagaagaaatgtcgttgtgtatgtttctgtctaaaatcggctgtagcttgtagagttgatgaatatagttgacatgcttatctggactgtgaagttttgaatgtttacataatgtttcatgtgccttatatgtggtccctgcccattttctccccgctccccaacatcatgtaattcattagttaaggctcgtgttgtgtatacttagtctgtcgagtttaaggccaatcggcaattctgcttctatacagttgtttggttgctggtaggatcaccactgttatgttatgataccccacaactgtgtgaagtcgatcttcatgtttggtc

SEQ ID NO: 30394 - DNA, 4367 bp, Zea Mays
tcgaccgaccccgactagaaacacttttgcgagccgccccctgcccccgcgccctattcccacccgccgccaccccaccccacccccccgcggcggccctcccccaatccgacggctcctgcgcgcgccacgtcgccgtcgtcttcctccccccatccactatttaccctccacacccgctcgccctcccttcctcacaacttccccccttttccgtcccgtcccctccctcgtcgccgcgcgcgctagggttagggtttcgccgcatcccggccgctccgcccgcctggggtcgttccggtgggaagccatggcgatcgtgaggaccggaggcggcgtccgcctccccaggcttgacggcggcgcggaggcctcactggaggccacggaggacgaagacgaggaggaggaggggtcacgggcaacgccgtcgcatgagtccgatgccgacggcttctccgccgaggaggagaacggcggaggaggaggagacgatgagccagaggcggaggaggaggaagaggagttcgaggaagaggaggacgagggggactcggggatgggctccgacgagctggacgttgcggagctgggcgagcccagcacggagatgtgccaggtcggggaccagagcatggccgtgccgttggagctctacgacctcgatggtctcggtgacgtgctctcactccacgcctggaatgacctgctcagcgatgacgagcgtctgcgcctcgccgccttcctgcccgatatggaccaggagacctttgcgcgcacactcgtcgagctcctcgcggggcaaaacttccacttcgggagccccctcgccgatttcctcaagcgcctcaagggcgggctgtgtgacccgagggtcaatctgtaccgccgcggcattcgcttcgtggagcggcgcaagcattactactggctgcagagctaccacaactccatggtacggaggctccgggagattaaggattgctggaagggccgcgagggatacagccttgatgagaggctgaggatgttggacacgatgaaggcaaagcagcagcaccaacaacaacagcagagaaaagctctagatttcacaaggcgggctgggtcggagactgattcagagagcaggggatctggggaacaggtcttagctcgacccaagcacgataagagtaggcagaagaaggcagggaagttagcgaaggagaagtcgaaggggctgttgcgggtgggtacaccgaaaggagtggatgaggatgacatgggagggtctggccgtgatgctgtggtggcactctctgagctttctcgtcgagggtatgattctggcacacatagagggaagcttcacaggagcatagatggcctttactcggagtcggaggaccttggatatgaaagggattcgtcaagacctcggtttccgaggccgcttcccaagccagtgaagaaggaattgtctacgagctgtgatgtcaatctgtatgcaaataactacagtgataaccatactgcatctccttactactacagcaggaatctcagtgctaatcagggagtcaccttagcagcagcatatgatcctccatattttgataccagaaggaatgcaaggtacttggagagagactgggtgcaaggtggaaaaggtgtgcacattaacgctttaatgggtgatgagatgaacttgccagctggtaatcacactggtaactcagatgactggcagaaggggcaatctgcaggtgattacaggagcaggaaagatcaagctggctatggtctgaaggttaagtcctataaaagtattgagaaagaggttaatgatgcccgtgttggttctgaccctagaagcaagatatcacaagcgaaggtggcaggtaaatccagtagacaactagataggactggccagaagcactggagcaatgctgtctatggtcaaagtgacgagacagaatctgattcatcagaaaagtttgaagatggcagggaagcacattatctcgagcggaagccagagcgtcaccattctgggtatcatagaccagcacatggtgccaaaaaatcaaacaagcttgctaaagtggccaaaatgaactatcctactgctgatgcagatttagaaccttcccagagcaaaggattcaaagggaaggtttcagagactggttatttacgtgatgtggatgtgatgatgacaggacagattagtgatgtcatgaaacctctagcagcaagtggtgaaaggaaacgcaaaggggtggcaaatttggacatgcgtgtttatgataactctgatctgcatgaagtcaatgaagatgcaaatgactctttcaggttggcggaatatgaaaggcttgccagtagatcaggccatgcagtccaagattctaatggtggttatggtggtactgaaagaaccagctctagctccaaaaaagcaaaaggaagagtcgaagttcctagcctggatgagcatggtgagcatttgtcatctggcccaaaggttgttgagaacactggtggatccaagaagaaaagcaaaaagaagccagagagcagcaccacagatgcagttattttagcagaaccagctgttgctgtacctgaaaataatgtgatagctgcagagcctgagaaggttgagaagcccaagaagaagtatgtaccgataacaccaacgatccatactggtttttcattctctgttgtacatcttttaactgccgtaaagaaggctatggtcactcctgctgaagatactcctccagccacagcgacacaaccggatggagaggagggcaaaaagtggttcaacagtggagagcgcagcaaaacgccccatcaagaacaaagtgcaacagatcaaactgaacaggtccttgagggtgcaaatgccagtgctgtagaacagactgtaccaatcaatacaccagcgcttactgttcaagagattgtcaatcgaattagagcaaatcctggagatcctaggatacttgaaacacaggagcccctccaggatttagttcgaggagtattaaaagtactttcatctagaacagctcctctaggcgcaaagggctggaaagcactagttgcctatgagaagtcaaacaaaagttggttctgggttggtccagcaccttctgtttcatcatatgatgaccccgatgaagaaacctctgctgaagcatggagtataccacacaagatgctcgttaagttggtcgacgcattttctaattggctgaaaagtggtcaggaaacccttaagcagataggttccctcccaccacctccaccgccaaatcctgcaaacttggatctgaaggaaaggttcaaggagcttaaagcgcagaagagtctgaacacaataagcccgagctcagatgaagcgaggacatatttccagcgtgaggaatttctgaggtactcaatacctgatagagcattctgctacaccgctgctgacggggagaagtctatagttgcacccttgagaagaggaggtggaaagccaacagcgaaagcgaggggccaccccatgctcttaccggacaggccgccgcacgtcaccatcctgtgtctcgtaagggatgccgcgtctaggttgcctgcaaggactggaaccagagccgacgtctgcacactgctcagagattcacagtacctaaaccatgaagaagccaacaaagaggccgcaattaatcaagtcgtcagtggagctctcgaccgtctgcattacgagcgcgacccttgcgttctgtatgacaacgacaaaaagctgtggacctatctgcacaggggcagggaggaggaggatttcgaggacgacggcacgtcgtctacaaagaaatggaagaggccaaggagggatgtctccgatgctgcagagccaggtgcagcgaatgatgatatcgacgacgatggcgctggcacccctccatcaaacaatgtgaaaaaacagaagacaacattgtcaggagaagctgccaacgatgagggaaatcatccgactcagaatccggcttctggtggcctggaaggtgattctgatctcaatgctgttccgtcttcaaaattttttgaagaaccatgtggagatgcctacattgatgcaagaccagatgacggtggcccaaattcagtagatgcgaaaccgggcagcacagctgacgacaacacggcactccctgggaacaccggcatggacgctaccaccccaccatgaataaagaacgtatcatggttcaatcagctagagatttgctgaagggtcagcgtaggtaacttgtgcagaaaccgtatctcatctgcgttgttcttatcgctacagttggctagtattaggagagtttgat

SEQ ID NO: 30395 - DNA, 711 bp, Zea Mays
cctggactcgttgtcgcgcgccagggcaaagactacgatgggcgaaagtgctccagagataactatgttgctggactccagacaaattgaggaaccatatcaaagatttgatctttggcacacgattttcttataatcatctgttgttgctgagacaaagcagttctatggtatcaaccaaatgaaagcctgtatgagcagaagcccgaagaaacagctcctgtcctgccatatcttgtttctctgcacttggttgcggcctgtggtactggtcgactatggcggcacaatgcctcagctacaagaaaatctttgtggactgctatatcttgcccgacagttcaagctctgcaaggtgaggtctgtttagtttggccagaaaggcatcccctacctgaacacctacgacggccgcaccatccgctaccccgatcctctcatcaaggccaacgacaccatcaagattgatctggagaccaacaatatcatggacttcatcaagttgtatttgcccatggacttcatcaagttatatacttagttaggctcaatgttagcacaaacagttgatgagcaagtttaaatttagagtacacttatgtatgagttatttgacaatgcttatttatgagatattgaatgttatttatctatattatattaattatagtgttattaaatatatgtgtatgtatttttctcttttaaatt

SEQ ID NO: 30396 - DNA, 3505 bp, Zea Mays
ttcatttcttcgctgcaccattaggctccgttctacttctacctaataacagggtgtagttgtttaatttgaaatggactctgaagccagtatgttcgatcacattgagctcatgctacttgatgaaaagtgtggagccgtcagacatgccattatcatttttaacagcaatcaccaataatttctcagaggatcagacaattggccgtggtgggtttgctgtggtttacaagggactgctgcgaaatggactatccgttgcggtaaagaagttctatgataccattgaactatctgatgaaatgtaccgtaaagaggttcaatccatgatgaggttgaaacatgcaaatatatggaaaatgttcaaacacgatggaagacatgtgattgcagaagcacgccaacgattgctttgctttgaatttgtgcctaatggaagtcttgataaatatatatctgatatgtttcatggcctcgaatggagaaagcgctatcagataatcaggggaatttgtgagggcttgcgttatcttcatgatgagaatgttcttcacttagatcttaagccttcaaatatactgcttgatcataatcttgttcctaaaattactgattttggtctctcaagatgctttgatgataataaaactcgaaccgttacagcaaatctgattggatcggtgggatacctggcaccagaattttttagtggattgatctctttcaagtcagatgtatatagccttggtgttataatcatggaggtggtgacaggaataaaaggatactgcgaaattgaagatgtacttgaaagctggagaaaaagattgaaaatgccaatgggagatgcactggaacaaataagggtctgcgttgagattggcaccatgtgcattgagagtaacccattgaatcgtccagatctcaggcatataatcgagctgtttgatgaaatggaaaacatgcggctggttacaaaaactacaagttcattaggaacccagggaagtgatgaacatgattcagaagaaacgattgcttcagctatcactgatgaaaagagagagaaactttcagtactaagtacgttgcctaagtatttaccatttgcattcctcgaggatatcacagatggtttttctaaagaacggcagcttggcagaggtgggttcggagtggtttataaggtatgccaacatccttgcgtttcatgttcattatgcatatttatatttgtgcaatctgagaactgagacgcgacagtaaaccgattgagtggtaacatatatatcttctttgcaacagggaatccttagtgatggatataccattgctgtccgcagactccttagattccagggaattgagatgaaacaattcgacaatgaggttaatatactcatggagcttagacacaaaaatattgtcaatctcctgggatactgccacgaggttaggggtacgtacgtacagtacaaaggaaaacctgtattcgcagaaacctccgaacagttgctctgctacgagtatctgcactgtggaagcatcgacaagtacatttttggaaaaaaccatgaactagattggcacacgcgttacaaaatgattaaagggatctgtgagggtttacattacctccacgagaatgacagagctccaattattcatttgaacttgaagccagcaaatgttttgctagacgcagccatggaacctaggatcacagattttggtttatcaaggcttattggtgaagggaatactagaatagtcaacacacacactcctggaccaatagggtacatggcacctgaataccgttacatgggggaagtttcacgcaaggtagacatattcagcttgggtattcttatactagagattgtaactggtcaagacaatagtaccaaagttgactttatcgatcatgtatgtgaacactgcatggaagggccacaaataaaatttatgtatccctctctggaacctgaattacatgatcaggtagaactgtgcatcaaaattggcctagagtgtgtccagacagatcgaaaaaaaagacctactgcaggggacattatacgtaagctcgaggaaggaaccaaattgggccctacaccatcccgtgaaaatattactacagaaattggtaagccacagatgttttcgtttgaactcctgaatgacatcacagaaagcttcagtccgggacgcctgcgtgggacaggtggatttggatatgtttatgaggggataccacatggtaacgagggagcgatggccgtgaagaggcttaaagaaaaaataggtatatcaccgaaacagtttgagaatgaggttcataatctgagcagaatcgagcacaggaatattgtacggcttataggctactgcgatgaaatacgggaaatactatctcatggtaaaaacaagaatgatccacctattcgcgaacatattcaagaaaggttattgtgttacgagtatatgcctaagggaagccttgacaagataatttatgataacctcgattggcatacgcgatataaaataatagaaggtatttgccatggcttacattgtcttcacgagggtcaacaggatattcagattgcgcatttggacttaaaaccagcaaatatattacttgacagtgacatggttcctaaacttgctgattttggtatgtcaaggctcttcagtctcgaacaagtttatatccttgcttccaagcctatgggaacaattggctacatagcaccggaataccttgaccacaaaaaggtatcaacaaaggcagatatatatagtttcggcattgtagtactggaaatcgtaacacgaaaacagtgcccacgcagttacgcagacataaatgctcagcattttatccaccatctgcgtcaaaatttgacaaaagataactacgtcaaatccatgtacccggcccttgaagcggactgccttcagcaagtgaaactgtgcatagaaattgggctgaactgcgtggagaaggaacctacaaagagaccaactgccagggaaataatctctatgtttaatcaaaaaaaggattcgagcagatctggggtatctaactgcatcgttaatgtgatagaggcgtggctatcaaggcttccatggcatccttggcctctaactttgctccgtcagacttaagcttgatggcaacagcggtatttgaaagatttgcaagggtgtccgcttgagttcctgcgatgcagcggaaggaagaaaaaaactagcagattaaaaatgagaatggggatcttgtatatctatttatgttttatccttttcatagaaaaattacaagctatgattttgatggtatagtggcaatattatgtcaatgtaacattcaatgggcatcgaattaaaatataatctaagtattttttttcctagcattgtaaggcgtagaaatatatgtcaatactcctttcattttaaattggaagtcgttctggatttgtttttacat

SEQ ID NO: 30397 - DNA, 1592 bp, Zea Mays
gctcccggccactagaggtcgggcaacattccccagtttggaaggacacgagtggatccaatcgactgcactccaccgccaccatctccaccagcatcgcccacaccgctgtcatccgctccgtcgctgtgccatcgtcgtccactgtgccgccatccgctccaccgtcgtgccatcgtcgtccactgagccgccattggaagataatgggttcttgggaggagcatgttaggcggtttttgttggaggaggaagaagacgatgacgaactattctttgttattctccttgctataatcccatacctctcggaagagaaaaggcccatccacacaacctccctcaccggtgctaaaaaggttaaagaaattaatgaagggcatgagagctggtgcaaatctgggttcagaatggagaaggaaatattcaaagccacatcaaattttcttagaagagagaatttactatgtgacacgcgaggagttagcattgaggagcagcttgggatgttcatgtatatgatctcccacaatgctagtaaccaaatgctacaaaaggcttttcaacacagtggagatactatccatcgaaaaatatccgaggtttttgagatagttcccatactaactcaacgatttgtgaagctttctagtcagttcaaactcatgctaggattgcaacaggttctaggttcatgcccttttttcagaattgccttggtgccattgacggcacatatgtacccatcactatcgcagaagacagggcccctccatataggcccctccatatagaaatagaaaaggaactctttcacacaatgttatggtagtctacgacttcgatcttaatttcacatgtctcatgtggatgggaagggtcggcatcagatgcaggggtgcttcgatctgctattagcaaatgatttattgtgccagaaggaaagttttatttggtagatggtggctatgcaaatacaacatcatacattgcaccatacaaaggagttcggtaccatctcagtcagcttaggaggcgtcgttcatcacaaagtggttatgcaaactacaaagagttcatcatcgccatgcaattcttcgtccatgttagtgctaagtggaagcaacatatgaagctcacatggagaaggaaaatggaacgacagtccacatgaagcttgtaaaaaaggagttaaactcataatactttctagtgtcaaagttcaacatgatacatggttgtgggtttttatttgtgcatctagtgcatatttctacgtgtgaattgagatgatcttatgtgatgtgatgatgactagattaactttcttggatattagatgatatttaagttaaactttgttgtatattagatgatcatgttgggtgcatgttttttagatttttagtgatgtttcattgtgtttttgatttttctaaatatttcctatttttcttttattttttctgaattttctgaagtattttctataagaggggtttttagccccttggttgccaaactgtggtagggaaatacacccgagtggaaaaaatcctcccagggaattgaagtgccatttaaaatcccct

SEQ ID NO: 30398 - DNA, 1391 bp, Zea Mays
gtgcttggccagttggccacatgccttgccttgcctttgcctacctgttgatcgagccgagcgagcagggagagacacggcaccgagtgaggccgccgcatcctcctcctctccgatcctccagtccgcctgctgcctgcctcaacggatcgacgcgacaggagggagggaggaaggagacggtcgatcagagtctgagacggaggccgatccaccaccgcagcgacgagcgggaggagatgaagatcatcattgacacggatcccggcatcgatgacagcgtggccatcctgatggcattccagatgccgggcgtccaggtcctagggctcaccaccatcttcggaaactgcaccacagagcatgccacacgcaacgccttgatcctgtgcgagaaggcaagccatctagaggtcccagtagctgagggcagccatgagcctctcaagggaggaaagccgcacgttgctgacttcgttcatggacctgatggcctcgggaacgtagatcttcctgatcccactatcaagaaagtggaggaaagtgctaccgacttcttggttgataaggtctcgcgatttcctggagaggtctctgtgctcgccttgggtcctctgacaaacatagcattggccatcaagaaggatccctcattcgtgaaaaacgttaagaagatcgttgtgctgggtggagcgttctttgcggctggaaatgccactccttccgctgaagcaaatatccacagtgatccggaggcagccgacatggttttcacttctggggcggacatctacgtcgttggcctcaacatcacaacgcaagtcagcttcacagataaggatctcctggagctaagaaactcgcaagggaagtacgcacagttcctatgtgatgtatgcaagttctacttggactggcacaccgagtcttatggtgctcctgtgattttcctccacgatccggtcagctttgccgcgctagttcgtccggagctgttcacgttcaagaagggcgtggtgagggtggagacgcagggcatctgcgtcgggcatacttccatggacatgttgctgaagaagtggaactcagagaacccgtggactggctactcaccgatttcggtcgcatggacggtcgatgtgcccaaggtggtcgcgtttgtgaaggagctcgtcaccaagccgtgaaccaagttaactaacgtgttgtggtctcgcgcaccagatgtgcagcaaatttgagatgtcgatatatttactcacattcgaagcactgcaaacactattatctcaatagttggttcctgtggaggattgcaaatcaatttgagatgttttaaattgcagcatgtgccttcggccattgaatggtatgatgttttttttttcttc

SEQ ID NO: 30399 - DNA, 3347 bp, Zea Mays
aggggcagtttcatcaatccacatctcgcccttcgcctgccttccttcacccggacgcagcagcggccaaccaaataaaaacacgccgcgccgccccgacgcggcgcgctccgtcttcctctctccccgatccctgcgacgggcgacgcggccttgccttccacatcaaaaccaacctgaccgccacagccgccgcgtcctcgtcctcttcctctgccatcctcccggcatcgcccttcgggatcaccgcgtcggaaccctaccggatcaccattcgttcgcgcgcgccccgccccgccatggaggacttcgcgcgcgcggtggaggacggactcaagctctcgaagaggctcgtgctcccgggaggggtgccgccgccgcgcccgccggcggggatggagcgcaccgtgtcggccgcctcggcgtcgggtcccgacccgcggctgctccctaccgcgccgatggcctacgcgctcgtcaccgacccggccgccgtcgacacccccgacgtgcccagctaccagccctacgtctacggcgacctcgacccgcccgcgctcatcccgctgcagatgaaggaggtcgacctggccgtcgactgcgcgctcgacgccgcgcacgtcaccctgcgcgcgcgctggtggctgcactgcatcacgcgaagccgcgactccgacgtgcgcctcgtcgtgcccttgggcgagcagggttcaattctaggcgctgaggttactgttggaagaagatcatataatacccaagtaatcgaagtagaagaccacactttggagaaacatgcaaaaattgagagtggtggccttttgcagccacatctgtttttcttgacaatacctcaggttgagggaggagcagatatttgtgctacatttcaatggtctcagaagttactttatgatagcgggcgtttctctgttgacatacctttccgttttccgtactttgtgaatccattaccaaaagtgttcatgaagaaggaaaaaattcagttgactgtgcacagtggtttcagtaaagagattttgctgcaaggaacaagccacccgttgaaggaaaagagtaggcaaggagataaattgtttttccatcatgaagccattgttgagaattggtcgatcaaagatttcaatttttcatacaatgtttactcgggtgatttgtctggtggtgtgcttgtgcaaccagcaacattatgtgactatgatgatagagatatgttctgcatttttcttctacctggaagtggcaacagaaaggtatttggaaaagcagttgtgtttattgttgacacaagtggaagcatgcaaggaaagcctcttgagaatgtcaagcatgcagtttctactgctctttcagagcttgtggaaggggattatttcaacattataacatttaatgatgagcttcactcattctcttcctgtttagagcaagtaaatgacaaagcaatagcaagcgcaactgagtggatgaatgcaaactttgttgctgagggtggtacagatattatgcatcctttgagtgaggcaatggcattactatcaagtgttcatgacacacttccacaaatatatcttatcacggatggttctgttgatgatgagcataacatctgccgaactacaaaaactgatctctccaacagagggtctaggtctcctcgaatttctacttttggactaggatcgtattgcaaccactatttcctgcgcatgttagcttcaattggcaagggacattatgatgctgcacttgggacagcatcaatcgagaatcagattcttaaatggttcaggagagcgtcgagtacaattgtggcaaatatctccattgatgctttgacacatcttgatgaattcgaagtggattctgagtacattccagacctttcagcgaactctcctttgtgtgtatctggaaaatacaaaggaaaattcccggacacaattaaagctaaaggttacttagctgacatgaaggagatctcggttgaactgaaggtccaacaactaaaggaaatacctcttgacaaagtattggtgatacaacagattgattttatgacatcaaaggcatggatgtctgcagataaacaagtggagagaaaggttgggcatttgatcagacaaatgattgcactagggtgtgtttagtttatggtagtgcagtttaagcaaaaaaatgaccatgccaagtaaacttggccttcgtttggttggatgccgaagtgttgatggccagccaagccaaattctgttcaacaacaaaaaaaacttaagtgaactcaggtgaccaaaatggccttcccaatttttggcttataaccaccaaaaaggacaaattttgaccggccaaagcatgactgttttttgctttgtctgcacggacctagatttcattggcagatttgatctcagtgttatgttatggtatgaattgaagggcaaagtaacagaactgaaaacgcactgctatgtagtgtgattaaattaagtacacaaaatggtgttccgtcggagtacacagatatgatctttcttcaaacaaatctggataaagtagaaggaacacaaaaggtcaagcaaaaactgaaaggacacaaaggcagagatgagcaacagatttatggcctgaaactgggattcggtaacaaagatgctacacgggaaaatctcatcacaggatttggagacatgaatccggcagagaaatctgtgatgctccaaaagggatcgggctgttgcagccgcgtcgcagactgcctctgctgcatgtgctgcatcaaggcgtgcaacaggatgaacgaccagtgcgccgttctgatggcacagatctgcgcggctctagcgtgcctcggctgctacgagtgttgtgcagaggtgtgctgtggagggtcggagtcgtagtaggaagtgttttgtatatttgtatggaagattggagaattggagtgtacataatagagttcgcggaagcccggttctggcccggctcttggttgtatccgtccaaacgttctataatttgctcgttacatgcaatgcaaaagagggatggcacacttgagtagtattttgctgttgtgcagtgcaaacgagggatgtatctgctggcagttcgtgtgcttggagtcggaggtgatataaaataacagttatcattagatctagatcggatgtaccagatcgtttgattgcatgcttgcatcaggataagtgattgcataggatattttcccgacttgttatgctattaagtagctaaaattagggtacaggacccgctaaatttagaggacgtagatctggagggagtagaggacgtcctcg

SEQ ID NO: 30400 - DNA, 1356 bp, Zea Mays
caaccaatgcacaggcgagcttttagttggtgttattaacgattaattgtcaaagccacctaaatcaccaccacctttgctcagcatggttgactaaacaagctgttggttttgttgaggcacaagctgctgctcatcccagtggaaggaaacctcagcctcagcgctcgcgatccatgcgtataaagaaggtctgagaagcggcggtagcagcagtcatctcagtctcacattgtcacatctccaagcagcagccagccaacctcaccacctcactcacatctggaaccgcaagcaagaatccttctccaagctcgtcgattatcctagctagatagaagctcaattggcagggccggggcacgccacgccatgatgaaggacgcggtgatcgagcacggggagagctccatggcgcccctggtggcggcgtcagtagcggcgggcggcgtcggccgcgcggtgtccatcgccgacgtcttcctcaggttccttgccatcgtggccaccatcggcagcgccgtctccatgggcaccaccaacgagacgctccccttcttcacgcagttcatccagttcgaggccaagtacagcgacctcccgtccttcaccttcttcgtggcggcgaacgcggtggtgtgcacgtacctcgtcctgtccatcccgctgtccatcgtgcacatcgtcaggcccagggctcactacagccgtctgatcctcgtcttctttgacgcggcgatgctggccctgctgacggccggcgcgtcggcggcggcggcgatcgtgtacctggcgcacaagggcaacgtgcgcgccaactggttcgccatctgccagcagttcgactccttctgcgagcgcatctcgggctcactcatcggctccttcgccgccatggtcctgctcatagccctcatcttcctatctgccctcgcgctcgcccgacgccactgatgatcaggccccgtctatcagcgctgggcatgcatgatcgcaatgaaggccgagaggatttgttgttctcctctggtcgatttgatcgtgcatgcaccaatactaatgcttgcatttgcttctgctgtgtggtctttttttttctttcgtttttattactcgtttgctctttgatctgaattgctagtagatctctcttccactctttcaaactgtgtggtcctccaactataaaggacgagtttcaggtttgtagtgtcatggtaatgatcggaaagaaaaaggaaaactatacaatgcaacttcatctcgatctgtcgcggagcagtcctggttagaaattgagatttccatatctattgcagagagaatggtttttatactttcatatatacatactag

SEQ ID NO: 30401 - DNA, 1339 bp, Zea Mays
cactcctccaacagtcgagctccaagggattatggagataagctcctcatcaaatttcacaagaatctgctgttctggtatgctcctctatcatgttcagcaagggaatcaaaacatgtttgacatacatagaagctgttccctggaatgagaacgaggaggagaagctgaagaatctctttgcaagattcacttttgacgaagcaatatcccaggatatactggcaagactgcgaccacacaactggaaaagctcagatgacctcgctgtacagcttattcaatctgtcactaacagcaccagcactatggcaagaaaagacatgcaatctttggtgaatggtcttctaagcaaaagttcagtctatcaaaaggactcgtcaggattaaacaaggagagcctgtatcagatctgttattcatgtctagagtcactggtggacctctttgaagaggccatagaaccaacatattacacaggtcaggctgtggtagttagagggagcaaaccactgatcgagcgaatctctacgcaaacagagaacctcaattggctattggatattctagtaaacattgacattgcagaagaatttgtagaactgtgggcgaagcaaggcaggctcattaggatgcacgagcaagcatcagcgatcgtcaggtatgagctaagtcgaatatcagctggtgtgttcattgcacttggtaaaggaaaagtgcagtgtcgtggtgacgtacgaagcctcctctttcatggatggttcagcacaatgttgttggattttggctggcttcagcgctgccccaaaggtctcgacctaagatcgttggaggagaatttagggcgaggccttttaaccctccctctcaggcagcagcaatgtttgttcgaggaatggttccagttctatgcgaccaaaggacccgagtgtccgaaccttattagagctttccaggtatggtggagaaggtctttcattagatcattggtagaacctcaaaactaagtttttccttgatgtactagtatgttgcgtgtatgatttgtaaaattgcaactgttctgatgacccttaaaaatgttttttcgtttgtagtttagttcttcccattgtatgtgaatagctggatgaatttgcttgaggataacatctgcggcgtggagtatgtaataacccaacccagtcatatgtcgaacttttgtactttttgtagcatgacagtcaatagtgtccgtggatttaggggtgtttgaatgcactagagctatacaattagttgaagacatcaaaatagtctaactaatagttcaactattagctaatagctagttactagc

SEQ ID NO: 30402 - DNA, 1006 bp, Zea Mays
cccatggctggcttctcccaagccgccgccgccccctgctaactccttcctctcccctattctctctcctcccttcttctctctctcacgctcgcgcctgaaaccgccgaagccctgcaccgtcgcgcagccagggagccggccgagcagcgcccgcccgaccgagcgtcccgagccccgcgtgagccccgatggcgccctgcaccgaccggctgcgacgacaggcacgccaaccgaggctgacccacccccgcggcccagaagccgtgcgcgcgcgccagccgacccgacgccgcgacggtccctgcacctgagcgacgtccgagcccgactacagcgccgcgatgcccgcgcaccgaacacccgagccgcaccggccacgacgtccatcaagccgcgccatgaatgtcccgcgtccgttactccctccctattactctctccctcactccattgatgtcgaggaagaaacggacccatcaatggcgccatgaagtccgacggcgcccattgaacagccggccacccctccctctctctggccgactctccctcttccctcctgctctctataaaaggcagcagagcctctctcccttctcctgcctaccaagctcaccccatctctctagctcgccagtacactgctcgacgccgtcgtttgttgccgttcgtcgccggagttcacggagcccgcagttcgtcgccggagccacgcactcgccgtccgtagtcgagccctgctcttcacccggccaaaaccctgttgagtcgtccctgtcgcactcacgaacccaaggttgaagacgacccaaattattttgtgtatcttataaaagtactttttgattcgattcatgagttgtatattttgtttgttgtaatataaacacgtgtgattcgcaatttatgtgtatgtgcgttatagaatttttggtagagatatgcgattgttagtacaccattatatttcatgttattcgtggcgatgatttttggattagag

SEQ ID NO: 30403 - DNA, 3549 bp, Zea Mays
cgcctcccgctacacacccacacccaccacggcccaccttccgccttgcgactccaaaaccctccctccttccccttccttgccccgccctagggttcgcgccgccgcgctgaccctgtcgtagccatggggtcctcgctcccgcccaaggaagccaacctcttcaaagtcatcgtcaaatcctacgagactaagcaatataagaaagggcttaaggctgcagattccatattaaaaaagtttccagagcatggtgaaacactatcaatgaaaggtttgacgctaaactgcatggaccgaaaatctgaagcgtacgagcttgttcgacgaggcctgaagaatgatctgaagagtcatgtctgttggcatgtttatggtttgctttatcggtcagatagagaatacagagaagctataaaatgttacagaaatgcattgaggattgatccagataacatagaaattcttcgtgacttgtcccttctccaggttggcgtaaattaacaagcgttttttatttatattttggcagtggtgagagcattcccattgagtcaccaggtcacgggttcgaagcagcctctccgcatttgtggggggaaagcttgactcggtttatccctcccccagactccactcatgtgggagcctccgtcactgggcacagatgagggacttgtctggctttgttgagactaggcaacaacttttgtcgttaaagccaaatcaccgcatgaactggattggttttgcggttgctcatcatttgaattctaattcttccaaggcagtagaagtattggaggcatacgagggaacactggaagatgattatcctccagagaatgagcgatatgaacacaatgaaatgctgctgtataagatatcattgtttgaagaatgtgggatgctagacagagcccttgaggaaatgcagaagaaggagagcaaaattgttgacaagctatcattcaaagaacaaatggcatccgtcttgttcaaacttggccgctttgatgaatctgagagcatatacagatccctgctttttatgaatcctgataactacaaatacttcattgctgtgcaaaagtgccttggcttatactctgataatggtcaatattctgctgctgatgttgagcgcttaagtgcattgtacaactcacttaaagagaagtatgcttggtcatctgctgtgaagcgtatccctcttgattttctggaaggtgagaagttccaggaggcagcagacaactatgtcagacctctattaacaaagggtgtgccctcactattttccgatttaagcccactgtatgaacatcctggcaaggcaaacatactggagcagttatttcttaaactagaagattcaattagggattctggatgctttcctggatgtccacagaaggagcctccttccacactgttgtggaccctgtttttgatttctcagcactacgacagaagagggcaatatgacattgctttgaataaaatcgatgaggctatctcacatacaccgactgtcatcgatctatattcagtaaagggaaagatattgcaacatgctggaaatttcacagcagcagccgcattagcagatgaagctaggtccatggatcttgctgatcgttatttaaacagcgagtgtgttatgcagatgcttcaggctgaccaggttggccttgccgagaagactgctgtcttgtttacaaaagatggtgatcaacacaataatcttcatgacatgcagtgcatgtggtatgagcttgcttctggggagagctattaccgtcaagtttcaggatcgtttgcatgctcatgaatacttccacaaggctgctgctggagctatcaggtgctatatgaaactacatgattctccaacaaaatcttctaaggaagagaatgatgagatatcaaaactgccacctgctcagaggaagaagttgaggcaaaagcagaagaaagcagaagcgcgtgctaaaagggaggctgaagagaaacaagaggatgaaacagcttcatctaacagttcaaaatctggcaagaaacaacatgcaagaccagttgatctggatccacatggtgaaaaattaatccagattgaagacccgcttgcagaagccacaaaatacttgaagcttctgcagaataactcgtcagactcattagagacccatatactttcatttgagctaagcatgagaaagcaaaaggttttacttgctttccaggcagttaaacagctcattaaattggatgaagataatccagacagtcaccgttgtttgataaagttcttccacaagataaacagtcttcctggacctgtgactgattctgagaagctaatttggaatgttctggaagctgaacgacctgacatgaggcaattacatggaaagtccctcgttgaagtaaacagaagtttccttgaaaaacacaatgcttccttgatgcaccgagcagctggtgctgaaatgatgtatctcttagagccaaataagaagatggaggcaattaatttaattgaagattcaacaaatattacatcatcagggcatagtttgcttggtcctgtaaaaacatggcaaattcaagattgtattgatgttcataaattgctggagacagtctttggtgatcagaatgttgcaaataggtggaaggcacggtgcgcggaatattttccgtactcgacgtactttgaaggcatcaagagcgctatttcaacctatgccattgaccatagtctcgagagcccaccagaaaatggaattgcttcaaaccctcatctgaaatcaaaagatggagaacaagggagtttgaatgggactctgcatattgtagatgatttgagcagcctaagcattcggtaatgcacgaacaagttgctgaatggtcacaactggaacacaacattttagaactggagccagtacccaattaaccaaagcgtacacgaacaaggggaacaaagtgctctggtgcaagtagttgtcggcacatcacatatgaagagtatattattgattgggagctgaggtgtccagtcaggttattgtcttggttccagcctgtacctttttgttgccattttgtagacagggaaagaaaaaaaatcttccgtctcaattacggtgaagttgtgacagcgtttgttgcctagcgatatcagggtgtgaccattcgtttgaaacagtgctccctctctttttggactacaaaattttggcacaaagcaggtgtacaaggttaaaccttttaaaactttcatctatttgtttcgggatagtttggtgtgtgggggggtttgtcttgatcctttgtgctactgcaacatttggtcctcgacattgtaaattagttaatcttaaacatagaaactgtattccagttgtcatgacaaataatgatcaatgttaaccctgggtgtttgatctattccatttgggatgcgttgaaaagcatgcattgtcggatttgaagataaaaatccataatgttacatttattaatcatacttgtatagtgacc

SEQ ID NO: 30404 - DNA, 307 bp, Zea Mays
caggaagaggaagacgcgatctggctgttgatacgctgatgtggggcaaggattagaaattaccataccccttcgctgagttcatctcggtcgtggatttcaatcagacggctcacaactgatttagggtaggtgattccttcaccgtcgatcgtagatccgacgtctcacgtggcacactggttcgcttcactctagatctaatctgggtcgttggaatttgatccaacaacagggaaacagccatacccctttggccctgtaaaattgtataagagaccctggataattatagaatcaacaagcc

SEQ ID NO: 30405 - DNA, 4338 bp, Zea Mays
aataaatctacctttttttactgtctccgagaagatctctctctgctgttcttccttccccataaaccaaaagagaggggaaaaaagaagaaagaaagcaaggagcaccgcaccactccactccacttccctcctcgatccagccatggcggcctaggccccctagggttccctgtcagcccccacccaggcgcctcctgccgcttcctccgctcccacccggtggtcgcgctgcccgattcggccgccggcgtcgaatgggaggcgacccgatgctcgaagccggccgttgccgcgcgctgccgacggagattccctgagctcggcggcgggttcccgtgctcgccgagcgatgactctcggcgccggcgctgcccaaggcactgggtctagggcgcgtggctggttgggagcgcgccgtgcgtgcaatgggggatttaaggcggttctgtagagtcgccgcggcggtcttggttctgcgagcgcgtggcctgcgctcgtgaaggtagggctgtctagctgctccttcgtctgatgagctcagcttctgcgtcccgcctcgttttgtgcccgcgtttgctccggcggctgcccaaagcccagcggatcgggccctgctcatttcggcgcttctcttcggttctttgtggaaagggaggagctgtgaggtgttgcttggcgagggtgcgcagctgaggattccgggcatgaggtcagcaatgacgcgcatttgtcgcgacaggccggaattcgagtagcggtttcttgaagtggattggctgctgctgcgtgggaagggggaagcggcggcatcaacagccgcagaggaaggcttactctgaagcggaggggaagcaggctggcattgctactgggagcatggcgaggtgctaaggacgtgcaggttccgcaatcaccgcatcttggtgttcttgtttcaggtcgtagtgggagatgaacctctcaccgcccaggatgtcggagccatcgcttgaaagtgacggggaacaaaggtgtctgaactcggagctatggcatgcatgcgcagggccccttgtgtcccttcctgtggttgggagccgggtcgtctactttccccagggccatagtgagcaggttgctgcatcaactaataaagaagttgacgctcagatcccaaactacccaaacctacctccacaattaatctgccagcttcataatgtcacaatgcatgctgatgcagagactggagaggtttatgcccagatgacactgcaaccattgagcccggaagagcaaaaggaaccttttcttccaattgaattgggtgctggtagcaaccagccaactaattacttctgcaagacgttgactgcaagtgatacgagtacccatggcgggttctctgttccacgccgagcagctgagaaagtcttccccccattggatttttcacaacaccctccagtgcaagagctggttgcaagagatctgcatgataatgagtggaaattccgccacatttttcgtggtcagccaaaaaggcatctactgacgactggttggagtgtttttgtaagcgcaaaaagactagtagcaggggattctatcatatttatctggaatgataataaccagcttctattgggaattcgtcgagcaaatcgtccacagactgttatgccctcttccgtgctatcaagcgatagcatgcacattggtctccttgctgcagcagctcatgctgcagccacaaacagtcgtttcactattttctacaacccccgcccttctgagtttgtgattccactggctaagtatgtgaaagctgtctaccacacacgtgtgtctgttggaatgcggtttcggatgctttttgagacagaggaatcaagcgtcagacgatacatgggtacgatcacatgcataagtgatctggactcagagcgttggccaaattcacactggcgttctgtgaaggttggttgggatgagtctacagctggtgataaacagccaagagtttcactctgggagattgaaccactgatggcctttccgatgtacccaactgcctttccattaaggctaaagcgtccgtgggcttcagggctacctatgttcaatggtgggaggagtgatgagttcgctcgttattcttctctcatgtggctccgagatggaaacagaggggctcaatcactgaacttccagggacttggagcatcaccatggcttcaaccaagaatagattatccattattaggtctgaagctagatacttaccagcagatggctgctgctgcactggaagaaattagagctggggatcatttgaagcagatatcttctctcctgccagtgcaacagccacaaaatttgagtggtggattagatcctttatatggaaatcctgttctgcagcagatgcagttccaatctcagcagtcatccttgcaagttgtgcagcaaggttatggtccaaatgcaagcgactctgggttccttcaaaatcagctgcagctgcaaaagcagcaggagccactaccacagcagcagcagcaagctctgcaacaacaatcgcatcaggaaatgcaacatcacctctcagctagctgtcatgatattgctaatgtagcttctggtgtgtctgagtctggatctgcttctcaaacagaatcttctttgctttctgggtcatcgtaccaacagatctatgatggaaacagtggtccaggtctgcatctgcacaacggtttccacaactgttcaagccaagagtcctccaaccttcttaatctctcaagaagtggacaattcatggcatcagagggatggcctttgaagaggttggctgtggaatctctttctggtcatgagctccaacctgtgcagcacaagtttgagaaagtgaatcaccaaagtaatgtgtctcacatttctagcaccttgcccccactgtcagcaagagacagttatagtgcccaggctagtggtacaaatgatcagagtcacctgctttcatcatcatttgcaatccatgatggcttgacagccgtcaggagtggtggtgttggcagtggaactgatgcgataaccatagcttcgttgagatataatgatatgaatttgctacctgaaaaccccatcgcaacttccagttgtttgggcgaatcaggaaccttcaattctctcgacgatgtgtgtggtgtaaacccatcacaaggtggaacctttgtgaaggtatgtaatctcacttatgctgtatgctccttattcatcaaatggcatgtgaagttgccaagttggtaactgcaagagcacttcattttgtggaaggtaaaaaggtccattttggtgggtgggtgttgggttgacggttcagaaagcagtcaattaaatcttcaagttggtaactgcatcacatcgttttaacgccttatgttccctttttgtatcaccactaggtttacaaatcagggtcccctgggagatcgctcgacatcaccaggttcagcagctactacgagttacgtagcgagctcgagcggttatttggtcttgaaggccaactggaggaccctgtaagatcaggctggcagcttgtattcgttgaccgggaaaacgatattcttctcgtcggcgatgacccgtggcaggagtttgtgaatagtgtatggtgcataaagatcctctcgccgcaagacgtgcagcagatggtccgcggcggaggcgaccttctgtctacaactggagtgaggacactgcagggcagtgtctgcgatgattattctgcaggccacgacatgcagaatctcaccggcagcatcgcacctgtggtgcctctggactactgagaccgagatgaagaccagaaactgaagttctgaaccaaaaccggcaattcagcaccgcaggattgccgtccacgagtcttttcggttcctatgatctatcttctctcaagttgtgttggtcagaaataacctagtcgttaatatagctagatccattgtatcattatggtaatggacatgttgtacgatagctgttgtagctacgtgtagccatagcctaagctctaaatggcaggcaagaattggtctatgaaagtatggatgcaggcactcactgtagaggtgacctagccctgtagttctctatatcttctcatatctaaaagctgacggttccatgtggcgcctaaactattgaaccctgtcacctttgtcatatttttttcacctcaattcgcggttgtttgatcttgttgcatgccatacaagtcaaatttttttgtcctgtttgtagttcagtaggctgtaccctgtaggcttttgcctgttaatccccggg

SEQ ID NO: 30406 - DNA, 1018 bp, Zea Mays
ccgacgactcggacccgaaaaaatactcattttagctctgagaggtaacgtgcgtccgtgccctcacacgtcgtctctctcgccgcgcaccttgtctctgtcctctcccatccatctccctccgcacactccgccgcctcaccttctccccctctctctccccgccgccgtggtccccgccgccacgctgtggcccttcttcgacgccgtctgctccgacaccgccgtcaccttcggctcgctcgtcgcgctccacgagtacctttgagaattcgtcgttcttgtttcttacaagtggtgatggtggtagtggtctggtctctgtgtgagcattggtctagaggatcgtgaagctatgcggctcttctttcatgttcaagatgaagttcatgaagcttggatcgaatctggatacctttaatgatgatggcaatgaagtcagaggttataatcactcctgagcacaacgaagaagggatttacacgatcagattctacattcagcgaagatgcaggctatctcctgctaatgttgctgccgaagaaatgaacttcttacttttatgtagaggcaacacttactaatatgatgctcgaatttgcaatgaatgatgtgtgtgtgtgctatttttggaccactggtatttaaaactgacaaccatgaagttttggtacacatgaatcccaagcaatttgtgtaaaatatggctaaacaaaacattgatgcctgatttatgatccagctgattttgatgtcaatttattatacatgtatatatctttacaataacttcttatgtatatggttatattgcaaatactattgtctctttactgtctcccgatggggcgtccgaatggatgcctcctcttctagtaaattaaactcgcccggcctctttcgagattcccatgcatgacatgattactgactagtgcgtcgatcgcacgtccactccagaattaggcaccgtactactacgtggccgagaagcagtcaattaatttgttccttcaa

SEQ ID NO: 30407 - DNA, 859 bp, Zea Mays
catcaccatatataagtttaacaggtccccgcaggaaacggggatggaaaatgtttccctatccggtccccgtttacccatcgagaaaggttttttctccgtttacgtccccgcgggagggaaccttccctatccccattccctaatggaggaattctggggattcgaggatcggggcccattgccatctctaagctagccatggccgtccgacgcgaagcggtcccacgacgatgagctcataggcgcccatggcacagcgatccggcgcccaacatcaacagcaactacacgttttatggacgaattcgaagcggccaaggggaaaggttgtgcatcaggagagggtcgaccgatccggtcaaaagcatgagacgaacggcggtgaccccaggcttcagcgacaatcattctccccccgccggagatctgatggatggagcgcttgttcccatcagcaccgcttgagctgcagggatcggcggagccctcgaacccgccgcgacaaaccacgagctccagcacgaagccggccacaccccggccacccgcgccgagaactatgcgtgtcctgggactctacgagccaatgtccaagttagccagcagcggctccacccttctctcccttccctgtctctctctctctctctttatttccaacgccaaggctctagtctccctgtctgtggctcgacgtgcggctatggagatagaggctgggagtctgtggagaaaaggtctagctgagatctggtgcatgcgggtggttgcaacagcttcaggaagaagccgactgtctgcatggccccatgcgcgagcgtcacttgcgcggcgtgagggatttgcatgatgatgt

SEQ ID NO: 30408 - DNA, 746 bp, Zea Mays
acaaacttataatgcatcaatttataaagtataaggtgactcaataaaccaaacacatcgtaaagaggacggcgagtgctatcagtcatcagaaattcagaacctttgttctccctgcctcctcaaagcaagacatcggttcactgacagccaagacgcgcgagatatgacactaagaggcgatcccgagggaggcgaggcagtacgagctgggggaggcccggtactacatggtgctggcgtgggcggcggtgctgtggcagtgcttcttcctgggcgcggtgggcgtcatcttctgcgtgcacacgctgctggcgggcatcctcatcgccgtgttcatcccggtgacggaggtggcggccgtcatcttcctgcacgagaagttcagcagcgagaagggcgtggcgctggcgctctcgctctggggcctcgcgtcctactcctacggcgagtggagccaggccaaggccaagaaggagaagaagagcgaggaggacgacggcgaagtggcccaggcagtcccatgatccgtgccccacacacacaaacacaatggtctgccccgttgtactctctgtctgtgtgtatgtaaatgttgtgttgattgcggccgtgttggtcctgtgaatggcgtcctgagtcgtcggttgtcagtgatgtttgatttccagggattaatcttttgtctctttatttttattttatttaataatttacatattaaaataaaatagaatatatgaact

SEQ ID NO: 30409 - DNA, 1925 bp, Zea Mays
ccaatcttatgctgctgtactgcgtgaattacagattggcgatatcgcctttgtgtcaagagaacagtgattgggttttggggttcaacaatggagcaaggatctggagtggttgctaagaggctcctctgggcgagtgcgagtggttccttcgagaaagataacatcggggaggacgcggtgttgccttctcagatagcggtggagaataaagtagattttttgaagattttaaagagtgccaactccattattccccatatagtgctggggagtacaattctcgccctggtgtacccgccttcgtttacatggttcactaccaggtattatgcaccagctttggggttcttgatgtttgctgttggtgtaaactcaagtgccaaggattttattgaagcaataaagaggccagatgctattgctgcgggctatatcggacagtttgtcatcaagcctttgtttggattcctttttggcactcttgcggttgcagttcttaacctcccagctgctctaggcgctggcataatgttggtttcatgcgtgagcggagcacaactttcaaactatgcaactttcttgacggatccacatatggctcctctcagcattgttatgacatcattgtcaacagctactgcagtttttgtcaccccaacattatcttactttcttattggccagaaattacctgtagatgtcaaagggatgatgtccagcatcgttcaaatagttgttgctccaattgctgccggattgcttctgaatagattcctaccaaggctctgtgcagctattcagccatttctcccttcgatgtcggtgtttgtcactgccctgtgtgttggctcaccattggcaataaatatcaaggctgttttgtcgccatttggattaaccatagtgctgctcctttttgcattccacacctcatcttttgtagctggttatcatcttgctggtacttggtttcgcaagtcagacgacgtaaaggcactacaaaggacaatatcttttgagacaggaatgcaaagcagccttcttgctcttgctttagcaaataagttcttcccagatccactagtgggtgtgcctccagccatatcggttgtgttgatgtccttaatgggatttgctcttgtcatgatttacatttttttttgaatcgtgctggcatgccgccccaagagccgatggagttcaatttctggccacttgccgtagggttagggtagctcgtctccaactgctgttcatcgaaccgtatcagttctcgcatgattcgtcagaatttctagtattcgactgcatcccaatgacagcgttgaaggaatacgagtaacctagacatacggttgaagttgtacacatgtccagctgggtatccccatcgatgatccttaaatcaggacctctattgggatccgatgaattcactttcttttctcgaacatcaaatccctactacttattaagacagtaagaggtaggctgtcattccgtgttctgccattctcatttctccttttttttcattgcccctctccgcaaagctcatttccattccgtgttctgtcattctcatcccccttccggcagtgtcattctcattcccacctccccgcaaagctcattctcattcccacgtgcatcccacgtctagctaaaattaaattaaaaaaacacaaatgtgaccctaatgggattcgaaccccttcccgcaaagctcattcccattccgtgttctgtcattcccattcctccgtgttctgccattctcatttcccttttttttcattgcccctctccgcaaagctcatttccattccgtgttctgtcattctcatccccttccggcagtgtcattctcattcccacctccccgcaaagctcattctcattcccacgtgcatcccacgtct

SEQ ID NO: 30410 - DNA, 1565 bp, Zea Mays
atctcttgttggcatttatgcatcttaatgatgtggcgaacaatgctttatgctgcatgtgtacctgggattcttattgttgctgggatgcaatttgctgttgagagtccacggtggcttgccaaggttggaaggttcgatgatgctagaaaggttgtagagagcctttgggaaccttctgaagttgagaagtccatggaagagatcaaagctgttgtgctaaatgatgattcacggggcagctggtcagaccttctggtggaaccacataatagagaatgcatgtttgggtgtgcgtatgttcacgcttggttgttggactgcactgcatgtacattcgtctgattctgccatccttaaaggcccatactggacgatctattatctgggcactaagtttgcttcttgacttttgctatgatgagttattgctgagatgttctgtcataatatttggaacattcatgtttcacacaccacaacaatatctacatgtttctgcaggtttttctcagttgcatattaattttcttcatgctatcaagtatcaagagcttattctctaatatatatgcagttgcattgattggaggatcccttttctttctgcaacagtttgctggaataaatggtgttctttatttttcatcattgacattccgtgatgttggtatcagtagtggtgctttagcaagcttatatgttggaataaccaattttggaggggcactagttgcttcaaatttgatggacaagcaagggcgaaagaagcttttgataggaagctaccttggaatggtatgtgctatggagacttttatgctatggcttttgcaatgttccttatagtatatggtattagcttcccgcttgatgaaggagttgcccacagcttatcaatcgctggaactcttttgtacatttttacttttgcaattggtgctggaccagttaccggtatcattataccagagctcagcagtgctcggacacgctcaaaagttatgggcttcagtttcactgtgcattggatatgtaactttctggtgggactatttttcctggagcttgtgcacaagtttggggttggagcagtctatgcaggttttggtggggtctccctgctgacagcactcttcgcctacaatttcatagttgaaacaaaaggacgttcgcttgaggaaattgagatgtccatgagcagtgctacccctggcaagcaagagtagaacatctcaactgtatggacaaactgaacaactgacgggaggaatttaataagagaagagggggcctaatcccatgaatcttcagcagcagcagtttgttgcaaacaacatcaactcctatagataatgagcacaatcaaattcagcttttctttggtagcatgagaatcgttgtacaatattaaaaagggtgaagaaaacgacccttttaatttgttttttgtacatctgatgtatatattttacgccttctgtagtacgtaaaataaagggaacagatctttctgatattacttgattgatgaatttggaatattcgcatcctttgttctggca

SEQ ID NO: 30411 - DNA, 5078 bp, Zea Mays
cgctccctccccatgaaacccccttcccccaatctacccctctctgtgcccccgacatccacgctgcctcagcccgccgtccagcgccctctctgcgcctccctccccacaccgcctcagcccgccgttcgccacgctccccacgctgcctccccccgtcgcccctccctcccgcgcggaactccgccatgctccccacgtcgcctccccccatcgcccaccagccgtcgcccaccagcccacactatctcacgccatggatggtggcaacagtccccgcccccgtacctcacacgcatcaggctgggctggccgatcccgccgccgcaaacgccgcgcccagccccgatgtcagcgcggcccgcccgccaacgcactttcggcctccccccgcccctcccttcgcccgcccacccgcaacctccgcgccatccgcaacctccgcccgcttctcacgccaccgacccgacctccgcgccatccgcaaccgtcgtgcgtcttatcccttctctaccgcgcactccgtgtggaacaacctccgcgtaggaagcctcctcccttccccatccccattccccaccacgcgcttcggggacggcgagctccgggcgggagcgaccgccgggcgcttctgctgctggtgcggaggaggaggagcggcgagggtggttcggcgcaggctccacggcggcggtgcccgagccgagttcgactggctggcgctctactgcaacctcacacgcggcgatgggccggacggtaacaatggcaagctggtcctggaggagctgctgtcgtgcgccgccacccaattttgttttccccaaatcctgagctgtgaagagaagaagaagacaaggacgcggcgagtacgatgacgagcgccgcacagcaagtcagcgaggagcacgatgacgcgatgaggaccacgagctgccgaggaagtcaaggacgacgacggcgcagagacccgcgagttgagacatcttcttcgccggcgtgaaccgcaaggctgagacatcttcttcgccgggttcggccacgccgacaccaccgacccgatgtacctatcctagccgtgtttgcaggcctctcaaattgaaccgattgcttcaagggtgccatacatgattgtgttaaccatgagagggattggcctggcactggttcattctacgggaacctcgacttcggtggagaatgtggtgtccctgtccaaactgtgttctacactccaactgaaaaccgtgcaaagttctggtacgcaacagattacgacatgtttagccttctgcattgctcacatggaagaggacttgagacccgggaccgagcagtacagattcatcgagcaatgccacattggcctcatgaagtttcacaatcacagtggtttttacaaggatttcagttcatggttgtacatagtttttttagttttttttttgaaaaatgaggcattttctttttaccggcggcggaggcgatggcaacaagcccttccctattcgaatctctgtgaccacagagcctacctcgctgagctcatcaccgagatcactggtgggatcaatgagctcgccgacgtagcacagttcttttgatgagagtggttcaactctattttgcttggttcagtggagatggtagcatggtgaaggataatgcctacgtgcgcagcaattttcatttttcttttagtttcttggagtcgtggaaatctcgctattcacaaggatttcatggcggcgttgttaatttgggggttgggcagaggctttaccttttgcgtcagacagtgctctctcacagcaattgtccttttgcctacctgtatcattctgtcatactatctgcaattcagctatgcacagaactatcaaaagcaagcaaagatgctctagagtacctgaggaaggctactttgtgctctataaggattgccaggaaagtgccagatttggcagagaacttcatgggcctggatgcatcattgttaaaggagaaacaccatgggtccttatatctgcaattcagctatgcacagaactatgcaaagcaagcaaagatgctctagagtacctgaggaaggtaagggcatctatttcttaccacaaggccccaacaaatataagtatagaactacagagctaggataaaactgttgattgttacagccctgggcaaggattgatgcttgctagcttcaagattaggaccctaccacttgatgagaacagatagtgctatactgctatgtacatctacatttctccagttatacataatcagatcttgcttctagccaactgttgcaaatacattgatcccttaggggttgagatggaaactgccacaagggagggaggacgtgagtcagctgcacgtgccgacatacacatcacttcctgcctcgctgtccttgatcgagacaaaatcagaagagctgtatctatatgtactccataccttgacgtatgcaggggctagatccataccccggcctatctgccctgtgaggaatgtatacttctgcaagtttgaatactttgacaccttgtgaggagcactctttgaaggtggagaaggtgttgttccaagggaagccagactaccaaaatgttatggttttttagcttctcaatagccggcgacagtgcatacgacctgccccgcgctggggctgtgtctgccttctcctccttcgatgccatgacactgtaaagtgaagccttcgagctaggcgcggaggccagggagatgctatgcgcccacatctaccacgccgccttcatattgctcaagctcgcgctccgcaactcctgccccatctgccgccatgagatgcccaccgatgctgccctgcgggctgccgccagcgtcggcgttgccgaacgcgccgccggggaggaacaagcgtgggatgcgccccacgcgcgcgactttcacctgcctcccaatttgatccgtgagttcaccaggaccagaacttcttcgatgatttgttggaccatccctgctgatacaaacacaatcattttgtggcaggaaatcaccatattagagcttacaaccttcgcatcaactgtttgtgcagcaatgagtttatcttaagttatgtttttttggtaatatcggttgactgcacttaagttctaataaagcatctttgatgtcacttgtaggaagagtttgacactcatgatccaaaggagaacactttgctactcccttacttgaggaaaaggtcaaaaatcattgagatagttgcagcgcgtgatatagtctttgctctatcacagttaggagtatgtgctgcttttagtagcggtacgttcgccgaggacaagacaaaaccggatgctggtttccctctttttgactcaccatgtcaacatggcaatttcaggacccaacgtctctgcgagagaccttgggttcccttatccgaaggcaggcaccgctaagcctacagacgtggtggtgaagttctacgtcctctacgagaagtggcggaggggcgagctcctgggttcttcgtcagttgcgcggtacttgaaaagcatcactggcaacaagaatttccgggtgtgggtggacagactggtcacatcgccgatcggtacaagcaactggttggtgaggtttgataactgggagatggaaggtggcgttcggtactgctgccgcactactcttctgctgaataacaaggttccaaaagaactagaagtacagattggttgaacttcaaacaaatacaaagagctatgcatacaagtggtggaggcctggtggatcaaggtcgttgtcgtctccaggtccatcaaatgcgacaaggtcgagcgcacgcaattcagctccgaagtcatctcctttcaacagaaagatgcaagtaacaccaagtcacttgcctttgatggttgatacatttcactgtatatcattgcacgacagatccatttagtacctttttctgagttaaactacttcaaacattgctgaagactacaaccagcctacagttgttgtaattgaagcgggtcaagacatagcatttgcaaagatttagttcattctcatcactctgcaatattcggttcatggcctgtcttattttttcccctacaagtcatctacgacagtttgccagtagcactaaatcttttaactgtggttctctactatgtgtaatctcatatcaagattaatgagtatcgtgatcgtataattttgaatcctatcaacccatatggcaaggcaaagaaaaatgacagtggacatcattctagattttacaaaatcaaaggagcaaccagacatggctgtcatgatctaagatacttcaacgtgattggatcgaacccaaacatatgactaggagaagctccaaggccactttgtcaagggtctctgcaatgcacctactggtgcatgatttactggaggttgtgcgcatgaatgtgccacacattggtatgggggttggagttgaagcaggagacatgattgttattcctatcatgtgcacactgcctcctcgctgtcatttgtcgtcactctcgtagtcctgataccggagcatggttgccaggggagagcagtccaaggcaaatttgccatgttggagcagtcacaggagccaaggggctgcagtcacaggtcctgctagccaggatggagcaatcataggacctcctagcagtccaaggaaaatttgcgaggtggagtagttgcaacttttgaaacccacgtgataacatgctcaagcgttcgtatgataaaaaagatggcacataatcaaaagaagatctcatgttctgcgtttgtgaacctgtttgtattttttgaacttgttttgtgaacctctatttgtaaacctgtaaaatctgaggttgtgaatagatttgggtaacttcatacaagtggtggaggcctggtggtaatcctggatgcatataaagcgaggcatgcaatatccatagcactcgtttgacagaaggcaacaccatcaaccttgtcctccacctttaaactagcatgagcaccatccttcttcacatttatattcatgtccc

SEQ ID NO: 30412 - DNA, 2904 bp, Zea Mays
  misc_feature (2903)..(2904): n is a, c, g, or t
ctcctactgcgcgttgacgaacgctgtcgctggctagctgcaggcggagttcgctttcgtcttccaggtacatgaaaaatggaggaataagttacaaacaacaatggatgcagctgcattggagacatattgtgaacaagtagtgagatgcattgaaatggctttaagttgtgtggagaccgatcggcacaaaaggccgagtataggggctattattgatgagctaaataagatggagacaaataccgaccaggtattttcagtggatatatgctcgactccagcacaaacacaaccaccaccccttcctgattctagccacagcacagaagaaacaagcaacacaaagggagttagcagactgggaccgagagagtacgtacagagcacaatgcgggacctggtaattgggataaccaagtcggtggtggagggggtgatcagcaaggcccagtcggtgatggaggaagaaaatatgctacttattagcatgcagcatgacctccacttcatcaccgatgagtttcagatgatctattcattccttagcatcactgatgaggagcgtatcaacaacgcggtagtgaggatctgggtgatgcagacgcgtggtctggcctatgacctggaagactacatggatgccttctcctgcctggacaagaccagaaaatggtggtcccgcttgttccgagcatgcctggcaccaccggggtctccatacatgtcagtgacatctctggccgtggaactcaagcatctaaaggcaagggtcgaggacgttagccacaggaacactcggtataacctcatcagcgacgccggctcaaagcccggcctcgtgaggcaacagccggtgcctcctggtgctgtggcatacgaaaacgacacaagaaggaaacacatcttaggggatctcacccagcttatcaccaacaaggacgatgctgatcttcaattgatttcaatgtggggtgcaggtggaggcaccgggacgacatccatcataaggaagtgctacagtgatccagagatcatccaaaatttcatatgccgagcctgggtcaacctcagccatccattcaacccccatgagtttgtgcggtctttgatggctcacttttatgcaaacagttgccaagaaagacaaggagggatcatcggtgttgatgtcctaactagcatggatgcgactgccacccagggggatctcctcagcgagttcgttcagctagttgacaagaacaggtaccttgttgtcttggaagacctgcccaccatggcagagtgggactctatcaggacgttccttcccgacagaaagaatggcagctggatcatcgtgtcctcgcagaaatatgaaattgcaagtttatgtgtcggacatccctaccaaatattggacctgaagcagtcctcgcccactgagcactccgtatgtgccttcttgagagaggaggtcacattaaaagaaaaaaaaggaggcaatagaaaagaaaaaatttatgtcggagatgaaagcgaggtgaacaacggtagtacatcaaccaacagcaaggtgatatcaactgagtatgacttaagccataaccataggatggtcgccaactctaaatggaaagaagccagagactggatgcagaattcttcccttgtcggacgcagattgcagatgtatcaaattcatcgctgtatagctgaagcacaaaggaaccattcccatgttatgtctgtttggggaatagttggcgttgggaaatcagctattgtcagaaatttttactgcgacaggatacttgagaatcagcaatttcaagaatacggttgggtggatttatcacactcccaacccttcaatttgaaggacttctcacagaacttgcttacgaattttcaatcagattctcttcaagccaatgaaactacaccctctcgtggtatactggggacagtccgaaaatgttgtgagtttctaagtacacgtcattgcctcgtggtcatagatggccttcagtccaaagaggaatgggatttgatacaatcatcattggtatctagatactctaaatctaatactattatcattgtgataacaactgaagcaagcattgcagcatactgcgcagataaggatgaccttgtgtttaatgtcaaaactttagaaactgatgcagcctttgatctcttcgaaaatgagatatctaagaaggctccgttgtggaccacttcattatgtgatcgaggaaattcagtgacgcaagaacttgtttcaaagtgcggggggctcccaatggtaatagtggctatagctggcatattggctaccaaggtagtctcctggatggacactgcaacatccatcaatttgaggtttatgtttgagctagagatcaatccagacctgcaggatctgtttagctgggtgcattcctgcttccgtacttgtccagatttcatcaagccatgtatcttctacctatcattttttccaagagaccacaacattcgacgaaggcgtctagtaaggcgttggatcgctgagggttactgcagggacagtgatgataaatctgcagaggagaatggggagttcttcttctccaaactcctcggtatgagcataatccaaccggagtccagtgacgcgaggatggtctcgtgtcaaatcaatggatttttccgtgagtgcatcctctcacggtcaggggaaatggaagaccttgtcattgaactggccgacagatgcaacctaaccacccaacgcagtgggcgtcatcttgtcatatcggaaagctgggacagagataagattttattcgagagcatcgacttctcacggctacggtcaatgacagtgtttggaatgtggaaatcattcttcatctccaaaagtatgaagcttnn

SEQ ID NO: 30413 - DNA, 2039 bp, Zea Mays
cagctttggaggaacgcagaaacgtcgaaaccagcacccggaaacccagacaaagcacgagccacgcacgccccgctgtctccctcccgccgtcccgccgccaccgctactgccggagtctctcgccaccgtcgttgctctcccgccttcaccgtgccaactcccctccttgcctcccccgcgcttcagtcgctccactccccatcgctttcgcctggtcagaattccagatccaggtgtcctttgacccagaccgcgcctgcctttccctccgctcggattcttcgccgtcttcgttcctactgggcgccgccggggtggagcggagatcggatccgccaggagctgattccttctctcgtagtttgatgcggattcattcgctgaccggcatagcatgatcctgcggtgattgcggtcgcggatagcttgtgcaagctgttggcttgggagttatctttctaatctggcctaaagaaatcctgaggcggtagcgtcacatggatgcaagtacggaggttactgatgctattgctgcagtgggcattgacaatgggccaacggggaagttgccgccccgtgatagtgtaggggggcacgcagaagaacacgacgtgctggctgatggaacacattcgggtgagagcgaggtgatcaacccgtctgaagaagtggaaatggaagccacctcgcaatcccaggacataaagccccgagttcctgagggggttcaaggccattcaccgaaggttgttactaaatctccgcgacagagccctcggggcggggataagagtgaagccaggaaaatctctcccagtccttatcctaaggtgcccatcgcacgggtttctgatctagatatagttgatagctcttcgagcaatggtgatactggtgccagtaagaaaaagactgaaaagagcagtttccgcccaattgccaaggagagcctgtcacttgaggactcaaaagagaagaataaaactcagaaggcatcaaaccaacgctctgccaaaaacgatattgacgaagaatcaaatgaaagtgtgaaacctcaaagggtgggcagcactccttcatatggatttagttttaagtgtgatgagagagctgaaaaaagaagagagttctactcaaagctcgaggagaagattcatgcacaggaactggagaaaagcaacttgcaggcaaaatcaaaggaaactgaagaagctgaactcaaaatgctgagaaagagtttaaagttcaaggcaacaccaatgcccagcttttataaggaaccacctcctcccaaggttgagttgaagaagatcccaacaacaagagctcgatcaccaaagcttggtcgctccaagaacacaccctcaggagggacagaaggaaattcaaaccccccagctcgttcagctcgactgagtctcgatcaaagggtcccccaaaatggtgccaagaaagcacctgctgcaaatgcggcgaagaagccccaacggaaatctctccctaaattgccttcggagcaaacagccaaagttgttgacattgcagcgtctgttccatctggagaagagctggggaagaagccatcgttgacgggtcttgttcgagagccaatccgcgcgcaacttacgcctgatgaacctggactcagcgtgtaggaaaggaacctatcaagccgactcatgaaagaagagagttgtgcctcagcttcctttatcacactttgctatttctgcattaactgctggctggtattatgtactaaaattagtctcatcaccaggatggagttgggagtttggagaatggcaagtgacccccgtgtattgtttatgctagtttctgttgacatacgaagtgtttgtagttggcaaattttttcagattatcatgtctcctatctccagggctcggagccaattttcttgccgtcgtagagaagccttgtgattcggtgcattagttcttgcagtttgatttcggctattgttcattgcttgtactgatacacaggtgacaaggaacattctgcacgtaaa

SEQ ID NO: 30414 - DNA, 3849 bp, Zea Mays
gtttacacactgcggccttgcttctgttctctcgcgtcgttctcccgtagtcccgtgccctcgcgtgcgctctatctgtttctggtggcgacgacttggcggtccccgctgccgccgtgcccaggcctctacttcgggaccttcaccggcgacgagcacccatcgggttgcttcgcaaaacttccaacatccaggatacaattaattacgattccttcaactttatctcgatttataggaggttgcacagagcccatccaacagggtgtctcagacatactgatggatggggtgcccaatatccttgagaaatcatcacatgaatgcatgtactcttggtacttcaccagggaagaactagagaaattttctccatcaaggaaagatggtattactgaaaacaaggaatcagaaattcggcatttatattgttcatttatccgggatgttggcatcaggctgaagctacctcagatgacactagcaacagcagtcatgctttgccatcgcttctatttacaccagtcccttgccaaaaatggatggcaggtgagagattatattgttgtgccagtgatggttgctgatgtctatgaaaagcgacaagagtgcagagtttcattgccaagcatttgttggaaatatgttctccaccatgtctaacttaacattacagaatatccttcaaaccatttgaagtattttatcttgtaataatattactgtattagttttctgattacatgctaattgctgattcatcttgatgctactctacctcaagagtcatgatcacttcgtgattggacatttcaaagggatcatttacctgctacaatgtgtcaagggcaccagggctcagagtagctggaccttgactactggacctcgactacatagttcgtagtcatggccgggaatggggtgaaggtttctcccctctgcaccctatgttgagggaggagattagcagtagaaagtttaatcattgcttaatcgtcaagtgttccaatacaagatgtaaataggcacgtagcctctaacgaacaatagatggaaaagctcctcaaattgaggcaccgtagtttcctaccaactaaactatgcaggcctgacactagctgcagtgatcatgcctacagcgcgtttgacacgcgctgcgtgttcttggcggcatctctggcatgggtctggtgcgtgtaccagggattaccttcccggtcggtaaccagcaaatttcggtagtttttctcgttttcgatgtctaccgagaaatgaaaaccggtgtgattttttatgtatttcgatttcaaatttgaaaatataatagtcaaattttggtcaacaaaacggtttttgaaatcacgaaacgagaatgtaatccctggcgtgtactggtggccccacatgacacatgttattggaaaacttctttttagaacttttaagtcctgattgacttctcctagtatactaaaaagttttgaggtagttaagagttattttcagtttacctaggaagtttgtgtttgtcagatatgatactattgtgattaagtacaatacttcgtcataactgggcaaatgcattcagaactttcctattgaagttacttaaccccgaccagccaactgggttgcaacttactgttacaacttaagcaagtttgacatactttgacggatcatcttgtaaattacatattcaccaacagttgcaacagtatgtgtatttctggcgtcgaaagttgaagatactccttgtcccctggaccatgtagttagagtggcctatgaaacaatgtataggcgggacactgctgcggctcaaaggatccgtcagaaggatgtttttgagaagcagaaagcgctcattttgatcggagagagattgcttcttacaactattcgatttgatttcaacattcagcatccttatagaccacttcttgatgccatgcaaaatcttggcatcaatcaaaaagaagtgaaacaagtagcatggaactttgtgaatgactggcttaaaacaacattgtgtctacagtataaaccccagtacatagctgctggttccctttatctggctgcaaagcttcacaatatcaagcttcccttgcatggagcgcatgtttggtggcaccaatttgatgttgcaccaaagcctctggaagccgtcattcatcaaatgatggagcttgcggctttgaaaaagttgatgcctgctcgacccaatccggttaagctgaaggaaactttatgtgaagctaaactgagcttatctaatagcccagactctgtgttgaatcaatcaaacttgttaataagcagctcaagtcctgatattggcgagcccagtgacaaagtgcaggtggattcctgccaatacttgataagcagtcacatgggtgattgtagggtctcaggtcctgacagcagttcgttgaatacttgtgctaatagaaatgtctcttgtaaagcacatgatgaagagagcttggatcaggccttaataatcaaacatgacagtgggatgatgccttctagtaatcagacatcattatatgctactgtaggcactgagggcagtgctgaactgaagcaggatgtaagccattgtaatgacttcaatatcagagtcaatgacgaaagcttgaaccaggtgttaagaaatcagcatggtgatgctatcccattacctgacgtggtatcgctggatgccaaggtggacaaggaaaggagttggtgtgtggaaccattaattgcaaactctgattgctgtactgacagtgttaatgtggatagcttgtgcactgatcagagattggctgatgctccttcaggccccacagctgatgcaccatccatgctggccgaggaggaatcttatccttttagtgcaaagcttgaaaatattgatgttgccaggatcaaaggtttattgatgaagaggaagagccggagagagatccaagaccgagccattgcttcagatggtctaagtgaagaagactggatcgagagggagcttgaatctgggattgttacaaaccaagaagccaattgtgctgccatctcagacgagctaagtgacgaagcctggattgagagagaactcgagtcagggattgtggtcggaccaagaaatgagcaagcgatcacttttgatggtttgagtgaagatgattggatcgagagagagctggagtctgggatcatcgttgagccagcacctgctaccaagaagcggaagctggagtcaagctgttagctctgcattcgaaggccagattccaagcaggtgaataataacagatggttgcgagtaggaccacatcgaagccaagagatacatgtcgcacagatgggaggatcaatattatcctttttttatttctttataaccaaacaccttggagtactttgacacaaggggtgtgttcacagtgggatctccccagtttcttgaatgcagaaccgtatccgttgtatttgttccttcttgtcgtgagtgtaaatctagcgtgtccgaagttcggttttagattgtaggtgtaactgtagcagggattatctggtgttaagcccaacgagaaaatgattcagtgtaactgttactgtaaggaaagaagttattcagtgtagatttatggttaacacaagaagaggcaattactggtgtatgatgtttataaattgatgatgaatgttactggcagctcaaaagaaaagacagttactggtaactaaagaaaagtacgtttaacggagctgatcacattcaatcccctattgagctgcccttggtcgtcaattgtataacaactttctgcgtgaccatcaaaaaat

SEQ ID NO: 30415 - DNA, 2068 bp, Zea Mays
cacggacacggagtagtttatatgttgtggagctagccctcgctgctcgtagttgtagctccgggcctccggctgctgccgccgccgccgccacagggagagctagcaaggaggtatataggtatagccgtatagctagctagctgctgctgcgtgaacggggaagaggggagggggctgctgttgcagtgttgcctgttggcctgttgcaggctcagctcgcaagtcgcgtctgcagcagctgctgcctcagggaggggctcattactccctcgttgcgtgctgcagttattgcttgctaccgctagctactgtgtacgttttggccttgccaataagctctaatggagaggatgcagctgcaactgcaagggtccatcgcctcttcgctggtaagttcacatacactacacagccaggggagggggcagccgggcaggcaatggagcacgcacgcagcttccatttgtagcggcaggcagcttctttctggaggaagctccgtcgtaaatgcaatggagtattaattctcctgctcctgctgcatgccgctgctgcctcctctagtcttgacgcttcctttcccttccatgccctctctgcattgttcacctttgctagtacttccctctcatgtcgtcgcagtggcagctctgccgccggcacccacgcacgcacgcacgcacaattcaatgcgcaccactgtactcgctctctgtgcttcctgctaggagatcgacatcgactcgactactaggagtatctttaatgtcgttgctgctgctcccctttctcgatcggcttgctgatgatgtgcctttcttgctccccttccggcgatggcgtggtgatgacgacggtggcggtaatggaacagtgggcagacaagcagcagcaggcggccagcaccaacgccgcagcggcggcggcgcagatgcccttcctggcgctgctccagggcgcgggcgttgtggtggaggcggagcagcaggaggagcagcaccacgacgggcgcaagcggcaggccttcgcgcgcgccgtctccgaccttgatctgctcgagagctgcgtcacgcaggcggtagctcccgcagcggcggcgtctgcgcccgtggccggcaggaccgagaggcggaggaagcggcagaggccccgcgcgcgcgccgcgccgccgccggagaagcgcaagaagcccgaggaggccgagagccagcgtatgacgcacattgctgtggagcgcaaccggcggcgcctcatgaacgaccacctcgcctcgctccgctccctcatcccttccagctacaccccgcgcggcgaccaggccacggtggtgggtggcgcgatcgactacgtgaagcagctggagcagcagctggtggcgctgcaggcggccgcggccgcgcggcgtggcgtggccggcaccggcgccgccgcggtggcaacggtcgcgtcggacggcgtgttcgtgtccccgcagtacgcgagctactcggactcgcgcggcgccggcgccggcgtggacgtggaggcgacggccgcggtgggcgggcacgtgcgcgtgcgcgtcgcggggaggcggtggcccgggcggctcgtgcgcgtcgtcgccgcgctcgaggacctccgcctcgcggtcttgcacctcgccgtcacctccgtcggacacgacgccgtcgtgtactgcttcaacctcaagatggaggaaggatgcgaggtggcgacggcggacgaggtggcgacggtggtgcaccagatcttcgcctacgccgcgggcgcatgctgctgacgacgacgacgacgacgggcagccggggaggacgggggacggcaagtcaggaccatggtggaggcgggcaggcacgacgatgcatgtacacgacgaacgcgggcgcggaggagaggagaggacgatgatggctggctggccgggcgggcgggccaccagaggaggtcatgcgtacgtagagaggtagagcagcggcagcgagctaggggaccaagcaagcagcggcaggcaggtccagagcagcgcaggggggaggataggagccggagactcctactgtaa

SEQ ID NO: 30416 - DNA, 757 bp, Zea Mays
atataggaagagatacatgcatggcgtatagaaggagacacaataataggcaacaaccatgcccagaaaggaggcgcagctccaacagaatcaagcgtataatcaggcgtacaagccttacctaacaaggagatattttctatcttaacacttggctgctacagtctcacctcgatctctgtacttcataggatgcatttttggaatctactgatgcgcacagtgacatctcagatatggtttatggaaaaaatagagaaggagagaaggattttcgaggaatgtattgtgtagtgttaactgcaagtacgcatgttgtgtctgctgcgattctgaaagtgcgcgtggaacatgctgcagaactggtccttattgctactcgtagcgagtgcagaaaaaagggctacttcagacttctcctagagtcaatcgagacaaatttgagagcctgtaatgtaagccttcttatggcacctgttgaccctgaaatggcacaaatctggtcagataaactcgggttcaccattttatcagccgatgagaagaagtccatgctggagtcgcaccctttggtgatgttcaagaacctagtcttggtgcagaaaccacttgcttgagccaatttaattaatgtttgattatactactcttttcatcctgaaatataattcgttttaggctaaacatacattcattatttaaattatgagtgtagtttgtatgcatgtctatatttcatggttattttttcttaaac

SEQ ID NO: 30417 - DNA, 1781 bp, Zea Mays
cgaatctcaatcttcatttatgccacccctttttcttctcctccattattccattctttctgcccatgtagcctcaagcatccatccccatctgcgaccatggctggcggctccaaagccatgtcaccaccattgactatcccttcttattttccgtgcgtgcatctgtcatgcatgtgtcccttcttcttcatcggcagtttccctcatctcttacactgactttgctacggatacaccatcgagatattatgaagagatcgacaacctattccagcctaatctggtgggggaggtgtcttcaggccgactccctatgtcgtcgcgcaccgccgcatcacagttgcaggaacgcacggtgctagtttcgagtgtagcgcggcaatatggaggcaaagagcgcggccgcggaggtgctcaggaagaccgacgctggcggagacaatgagaggtataggcatggggagctggggcgcgaggctgtggaggaggaggaggtgaaaccgcgaagggtggcggatgcgccgctgccggcggagaggaagaggaagcgcgcggcggacccggaggacgacggcagcgtgagcgacagcggcagcggcagcgaagggcctccgcagcagcagcagcaggtgaagccgtgtctttccccggtgccgcctctccaacggctcctgagtgcgtgccgcgccctgctcactggctcctcctccccgccgacgccttccgctgtcgccttgatccgtggcattatggacaagattgggccagacgacgtcgggctcagggacgagatccgcttcttcaacaagatgaacgccgctggtcttcaaaaccctcctatcgtcacatgcaaacctatttacgagggcgccaactttacgatcgcggtgttcttcttgccactgggagcggtcatgcctctccacgaccacccgggcatgacggtcttcacgaaggtgctcatcgggtcagcgcgcctggaggcctacgactgggtccgtccccgtgtcttggccggctgctgctcgggctcccgtcgccggacgctcgcgaagaaggtgcgggacgaccacggcgtcaccgcagcggcgtccgcctgggtgctgttccccaacagcggcgggaacatgcaccgcttcgcggccgcggaggacgcccactgcgcgttcctcgacgtcctcacgccgccctacgcgcccacggaccgaaggcgctgcaccttttaccaggacctcccctacgaacaccatcgtcctcgtccctgtacctgtaggtcgacagccacaggcggtgccatctgtgacgacgacgtgcttgttgcggaggagcagacgtgtcggctggcatggttggaggaggtcccgcagcctaggaacctgagggttgtctgcttgccgttccgaggcccaacgatcttctagcctcatcaacagcccatccggcaggcagaccctgcttactatctctagctatgagggaggcatagttgatcaaaaaaaaatattgtctttttccttttggagaataggatcccgtgctgataaatgatgatgtttacagtatgtagtgttaagctactctactgcgtcactgagacaaaacgtattcagctcttcacaggtggacgacaaagccactggcttctgtacttctgtttctgcgatgaaccagatcaccgccatagtcaatataataggctctaagtctgcattctcccctttcacatatctgcagccatagtcaattttccctgagttgtacacctgactattctcttg

SEQ ID NO: 30418 - DNA, 3232 bp, Zea Mays
gcctctgtcaacgcgatacagcagtaaacatgagtacaacgtgagctcagagccgtccatggcgtacgagggcacgtcggtaaaatctcaacgtcccgtcccgtgcctgcctgccatttcgattagttagaggagctgcgcctgcgtctgcctgcccccttgaactccccaagagccaagaaccagcgcagcagcgcgccccctccccgccccacaataaaacagccacacgctcgccacccatggccaccaccaccaccaccaccacagcacaggcccactgccaccgctaccgctaaccatggcctcctcagcgtccctgcagcggttcctcctgccctcctcgcacgcggcggcgacggcggcctcgccgtcctcccggctgcgccgcacagggcgcgcccgcgcggccgtctccgtgccgccgccggcggcggcgggggagcaggtcccgacggagcggctggagccgagggtcgaggagcgggcgggcgggtactgggtcctcaaggagaagtaccgggcggggctgaacccgcaggagaaggtgaagctggagaaggagcccatggcgctgttcatggagggcggcatccaggacctggccagggtccccatggagcagatcgacgccgccaagctcaccaaggacgacgtcgacgtccgcctcaagtggctcggcctcttccaccgccgcaagcaccagtgtacgtccactcccactctgcaacagggctagtttacttgcatgcagctcgtaatgcggccgagccgcttgccactcgttcggtctcgggcgactctgttcttcacttcttgatgcgctgtgacgtgctgtgtctgcggcagatgattgaacaggacagttgttctctctgagacataatgtctgccaatcgttgcttacggccggcttagagctcgcgtctgaatgttcgacgcttccgtctgatcgttttcgcgcgctcatgtttaccttttgggctggttctggaatctgcatcttggttttgtttccctttcagatctgattcacgctgcgtcaacgtgcttgcaaagtgattcctcattcgtcatgcacttttttccttgataaactggtgaaatacaaagtttcgttctttcttggaccacccgttggttggtcctacagaggagaggacaagacgtcccggattgggttcactccgagctgagcctgagaccgtgagacgaactggtcaagcaaggtgacaacactgttgttaactaacgagcaacgactaacgacacctccatccccatggctgtgctgcactgcagacgggcggttcatgatgcggctgaagctgcccaacggcgtgacgacgagcgagcagacgcggtacctggcgagcgtcatcgaggcgtacggcgccgacgggtgcgcggacgtgaccacccggcagaactggcagatccgcggggtgacgctcccggacgtcccggccatcctggacggcctccgcgccgtcggcctcaccagcctgcagagcggcatggacaacgtgcgcaaccccgtcggcaacccgctcgccggcgtcgacccccacgagatcgtcgacacgcgcccctacaccaaccttctctcctcctacgtcaccaacaactcccaggggaaccccacaatcaccaacctgccgaggaaatggaacgtctgcgtcatcggctcgcatgacctgtacgagcacccgcacatcaacgacctcgcgtacatgccggccgtcaaggacggcgagttcggcttcaaccttctggtgggcgggttcatcagccccaagaggtgggccgaggcgttgccgctcgacgcctgggtcgccggggacgacgtcgtccccgtgtgcaaggccatcctcgaggcgtaccgggacctcggctccaggggcaaccggcagaagacgcgcatgatgtggctcatcgacgagctcgggatggaggtgttccggtcggaggtggagaagaggatgccgaacggggtgctggagcgcgccgcgccggaggacctcgtcgacaagcgctgggagcggcgggactacctcggcgtgcacccgcagaagcaggaaggcctgtcgtacgtgggcctccacgtgccggtgggccggctgcaggccgcggacatgttcgagctggcgcggctcgccgacgagtacggcaccggcgagctccggctcacggtggagcagaacatcgtgctccccaacgtcagcaacgagaggctcgacgcgctgctggcggagccgctgctgcaggagcagcggctctcgccgcggccgtcgatgctgctcagggggctggtggcgtgcacgggcaaccagttctgcgggcaggccatcatcgagaccaaggcgcgggcgctgcaggtggcgcgggaggtggagaagcgcgtggccgtgccgcggccggtccgcatgcactggaccggatgccccaacagctgcggccaggtgcaggtggcggacatcggcttcatgggctgcctcaccaaggacagcgacggcaagatcgtcgaggccgcggacatcttcgtgggcggccgcgtcggcagcgactcgcacctggccgacgtctaccggaagtccgtgccgtgcaaggacctggtgcccatcgtggccgacctcttggtggagcggttcggggccgtgccgagggagagggaggaggatgaggagtaggaccttcgtcaagcgccggctgggactgtcctgacctattttatgaggtcttgattggatgtatatatatattcatcttaatctatatggatttctgaagtttgatctaaagttcacaccagattactgcaacccacgtggattaaagtggatacgtagcattcaaacaagtcctcagcggtgagatgttgtttgctgtaaaaagtaagatgttgcctcttcgctggcacggcaagtgttgttgtagccaagacgtccccccccccccccccccttctctattcatttcacgctatagagaacgccgatgtataaagtaacacgctatcaatcatcctactactgttgtggtccgtcaaccttgttacagtattttgtatgttgtgaacttaccctcttgtttaaatcagttggaatttttttcgctgtttaatcgtctcacagaatataaggttattgacaatgctactgcggggtgatgtgggtacaagcactatacaacacgaaatggaagttcagacgcatagagcagcaaaactgtg

SEQ ID NO: 30419 - DNA, 986 bp, Zea Mays
tttaccaatactgatttgattcgatatccgcgagggcgatgacagttttccagtttagatatttggttgagtcccaagagagcgcttacaggcctcgcctctctcgaacatcagagacttatcatccaaagtaagtccgacttcaagcttgcgagaacgtcgacagtctccgaataaaatctttgatcgaacccttggcaatcattaaactaagcttcacttcgacgacaaccagatcgatatcgggactcgacggcagcgcaacactaccacgagatggaggcaaactgacggcttaggacatatgcggaggctgacagcatgggacttcgcgatgggtagcgagactcgacggcgaacggcgcgacacgacgcgcggcgaagggagcaggcgtggctgccatgggcgaagtggcgcgcggacggcgagcagcaaggtgacgacgggctgcagcagggcgcaggggccaggctcggccaccagggagcgggagaaacgccggcgagctcggcaagctgcagggagaagggaggagctcgctggcgagcacacggcggccatggaggacgacgcgctggagctgaaacctgccagggacgtgcacgtccagccccatggcgcgcgcctccgcacgcccacgcgttggctgtcgcggccgactgcgctcgcacggccagaaagttgaagcaaggaagttgagcgcgtgtgagataaatagggagagagagagcggcgagcaggaaaccaagagagagagcgcagcgtcggggaaggagatgaggacgacgccgagcgaaaaaatatcgcgctgctggagctgaagatcgagtagagcggtggcgtacgcaggatgggcggcccagagacttccacagtgcgcggcggagggaaggatcaaggaagaagtctcgcgtactggagggatgaggaccagccgaccagagcgctgcgtagataggaagcagggagcggtggttggaagaaa

SEQ ID NO: 30420 - DNA, 671 bp, Zea Mays
gtcacatcttccgacgattgaaccccaactctccaaagtccaaagcccccaaaacccaaaaccctgcgaccccaagataccaaagccagcagcagaagccgatgcccatgcagccgcaggcgccatcgatgaccccggccgccggaatcaccacggagcagatccaaaagtatctggatgagaataagcagcttattttggccattttggaaaatcagaacctaggaaaattggcagaatgtgctcagtatcagtcacaacttcagaagaacctcttgtatctcgctgcaatcgcagatgcccaaccagagactgctgtaagccggcctcaggaaatcaactgggaggcctgcacaacctttatggccctaagctggtggaaacatgtttatgggaacgatgagaaagccatgtgccaagttagtgaaattgctttgaaaaatcgtgccatgttggcatgtgctcatgttaaatagccctttggacaactatcatctttggatgctgctctcattggagagggaagccattctcagaactgttcttagtgagtgtttagtttctagtgacagtctctctattttattcaattttagtccctaaattaccaaatttattgagaaattaatatatcttaaatttgattaaatacatcaaaaaagctgttgatg

SEQ ID NO: 30421 - DNA, 3508 bp, Zea Mays
ttttcatttcacattttttcctcacaaaaaagagagggaaacaatattgcagggccgcccgcgccggaaccgaccacttcaccggcagcgagccggagactccgtggagcccctgtccccgcgccggcgtgggcggagggaggggagcagcggcagcggcagccagcagaagaaggataacggggggctcttggagcctctgggaagaagcttctagaagctgcctgaggcgagggcgagcgcgccgttgccagagtgatctcggtggaataagccgcgcggggccggcgccgtgggggatgcgcctctgggtgccggcaccctccgggatttgaatggtagccagatctcgagggggaggggagcttctcgaagctgggtgaggcgcgcgggccggccgccctgcggttagggtttggtggaagcgggatggtggggagctcggtggagggaggagcggacggagatggaggctgctgcggcgtcggggacacctcgcccgggaccatcgtgtgggtgcggcggaggaatgggtcctggtggcccggcaggatcctgggcccccaggagctcccaccatcgcagatcatgtcgccgaggtccggtacgccggtcaagctcctcggccgggaagacgcaagcgtggattggtacaaccttgagaaatcaaaacgtgttaaagcattcaggtgtggggagtttgatgcctgtattgagaaggcagaggctactcaagggactcttgtgaagaaaagagagaaatatgcaaggagagaagatgctattcttcatgcgcttgaattggagaggaagcagcttgcatcaaagtaccagactcaaggtttcagacctggaccacctgcttgcacaaaacatcacaaagaccttggaagtactcgctacaagagtaagaagggcaagaagcgcaaagatgcatctgttcctcctgatgtaaaaaaagaagtgggacaatgttttctgcctgctggttcaaagagaaacttttcaggatcacttactcaaggaaatcttgtcagtaatcacatgggtgacttctcccctttgggacattctcatggaggtgccactttagaaaacaaggagagtacagttgtgaagaaaaatagatcagatggaagtgattttgaagactctcttgtttcaaaatcagacagacgcagaccactttctcaagtattgcagagcagtgaaaacttgcttcctcacttaaagcaaaatgatgattttggggctttgttaatcgcggagagtaataatccttcacttgccgcctcctggtccagaagaaataaatatacgtacatggctagtgattctggcgaaactgagagtcatagtgatttaccttctataaagatgtcttctactagaactgattttgagaatgaaagctatcttcagcatcctgtttatttttctgaggagcagacttctgacttcattgagaagcaaataaccgagtcttccgagagggaatgttcagaaagcgagactgaagatgatgctgaacttctgcagaatgcaagtgtgattctacgtacagaatcacatgctccttgtccatattctattccagtttctgacaagttcaagcatgtggattatgatgacaatgaggtgatctattctacttatatgccccagttgaatgaatatgaggaagaggatggttcttctgagctgggtgtctctcagtggcacatgaaaggtaaacgtaacaatcgtaatgccgtgaagagattagtggatatgagagatggaaatacatggttaaataaatacaatggatcattaaaaggatctttgcataacacaaatggtgggaatcccagaaaagaaggtatgcacacatctggtgagcagttttttgaggaaagcttttaccaaataaaagaggagcccaattatgattctgatgaaactaatttatttgagaacatgagccattcagagactaacttgtactatggtaaaaaatacccttcatccttgagaaccacaagagatcttagccgaggctacagttactttaatgactcttcaaatgtttctcccctaaacaaggacactgaacgaatatatcatgttgatcggaatgcatattgggatagaccttcattttaccaaaggaagttgacttcaagttttggtggcatgggaccaatgttgttcaatgttaacctcaaagttcaggccagctaccaaggagagcatgtccctcttgtctctttgatgagcagacttaatggcaaagcaattgttggacaccctatccaaattgaaatagttgaagatggttccacagcagtattctgtggtgacagtggtatgcaagagaccacagctgctccacctgcttggccaacaggtagaaggactgccatgcaaagagttccccgttcaaatccatcaggagcactgttggatggcgataatgaaggtggtcttgtgtattctgattatgagacgaaaccaaccttaagaaagtactcatcttcttcgaatcaccaggttaaggtgaataataaaatcagttctaatgctaagaggtcatcagctaagccccctaagaagtcatccaagaaaacaaacctctcaagccagaaacttagagctctctcttccatctccactgcaaaaaaccatcatggagaaggtggtcaagcgaaggcaaattggcacaatgacatatttggtggtttaatcggatcagaaggagcagttcctctagtgacatgtgtcccaacgaaggttgtgttcactaggatattggaagcagttggaaggccacctctgtctgccgctcgccgtgttagaatggctagtcctccggtacgagatcctccataggcttcaactgtagtgctacatgcggtttatgtcgccagccatcgacatgcaagttttatgtacattcctgttaattgatgaagaggcagaccattcaatcatccggtaacacctgtgaggagtcgattgacatggttgctccgtaataacttggaacagctgatcccttattagcagtggtgacaacctgtaaaaatcagtaatatttctgactggagactgaggtcatgaatgcttcagagcagctcacatatttctgactggagactgcgtccatgaatgcttcagagcagttgagccatcgataccatgaagaggtactcttcggtgtagctagcactggtaactttcgtcacaactgtctcctgtaaagtactagtttcaacattttaggtggcaatttagtcaaaacatttgtgccgtcatatatagcgataggtcatagatttcctaatgccatgtataatcccttaattacatcctgatgtgtctgtcatttgttgtcgagaagtagttggttcaactgtatgtttagagaagcatgtgtacctagtcgatgtaatatatactagtccagagcgcgcgccctgcgcgcgtttataaacaattaggtataaatgcataaacatcttttaat

SEQ ID NO: 30422 - DNA, 1719 bp, Zea Mays
gaaaaaacgagagagtcgttcgttttcatccctaccggccgcctcttctcctctccacctctcaatttcccaaattgaatcctcctcctccccgcctagggttccgattccgcaccgtccgagaaccacccaagcggcggcaactgtcccttctcgtcggccaccgccgcacaactcagttgcttgttcagccgctccgctgccgacccgcctatcgcctgagctccaacggagttacccagaaaccatgattttgaggctctctaattggtctcccaaacaacaacgctccacagcaaattcacaatttatttcattctccatcttttaaaagtgacacgtaacaactttgtaccgctccttacctgtctgtcacatcgcaattgttccccaccagcgtgtatcgtgggtccttccgcttcacccaaccacgaggaagttcttacggtgccacggagttgcaactgcacaaaggccttttgtggtcacaaagggtgctattgtgttacaacaacagttctagttgaagtaataagacattttttaaactgtctgctacattgcttccatggcaaccaatgagaacctcccaccaaatgtcatcaggcaattggctaaagaactgaagaatcttaatgagtcacctgcagaaggaattaatgtgactgtcaatgatgatgacttcactactatttttgctgatattgaaggccctgctggaactccatatgagaatggagtgttcaggatgaagctattattgtctcatgatttccctcaatctcccccaaaaggattcttcttgacaaaaattttccatccaaacatagctactagtggtgagatatgtgtaaacacactgaagaaggattggaatcctagccttggattaagacatgttcttctggtagtgagatgccttctggtcgaaccatttcctgaatctgcacttaatgaacaagctgggaagatgctactcgaaaattatgaggaatatgcacggcatgcaaggttatacactggcatccatgccctcaagaataagtccaagactggagctatatctgagtcgaccacagctctgaatgtcgacaagtcaagcactgctcccaacgagaacgcaccatcgatgccaccggcaatacctacctccgctgcatccagagcacttggcacaaatttgcaggatcagagccctactgtatctgatcctactgtaggagcggcggcggcggcggcggcacgaaggaaggatggcccaatgccttccaaagtacctgttgataggaaaaagatggatgcacggaagaagagcttgaagagattataggcggaaccttcatagtccagcatttaaatctgtcggaaatttagcagatgcctagcgaagctgggagagagacaattagttgggaggcatctgatgacctggcttccgggaggtaggggtcctgggctgggacaaaagtgaataatgtggcctgggtgagtccttcgggacaactgtatgtgcaatgtccaatcatttggaagaacacctgcctatttccttctgtcctctgtattttgttagcttagcggtagtgttagctagctcataggggcaattccctgtctagccatgggctgctgctccgtactctgcttgaataataatttgtccgtgcaattacagctattgttttgtttggaggaatagttgcctttttctgttgattc

SEQ ID NO: 30423 - DNA, 784 bp, Zea Mays
ctcccagtttccgtttttttaatgctttgtttactcgcggggatcatggggtaatcgcgtgggccgtgcctggctgggtttatttatgccgacctgccaattggagcaaatcccctttcctgcccctccccctccgcctttcctctctctcgctctcctcctctcctctcctctccttccgcatcacacaccacgactcccaaccgccggttggctttgctgctccgagctcttccacacccgccctctctcttgtgggtcggcggccgagtgtctgcgtcgtccacggagatcagggatcggcggcggggtatggcgagggagcgtcgggagataaagaggatagagagcgcggcggcgcggcaggtcacgttctccaagcgccgccgcggcctcttcaagaaggctgaggagctctccgtgctgtgcgatgccgacgtcgcgctcatcgtcttctcctccacgggaaagctctcccagttcgccagctccagtatgaatgagatcattgacaagtacagcacacattctaaaaacctggggaaagcagaacagccttcacttgacttgaacttagaacatagcaaatatgcaaatttgaatgagcaacttgtggaagcaagccttcgactcaggcagatgagaggtgaagaacttgagggattgagtgttgaagaactccagcaattggagaagaatctggaatctggtctgcatagggtccttcaaacaaaggatcaacaattcttggaacagatcagcgacctcgaacaaaagttcttca

SEQ ID NO: 30424 - DNA, 2241 bp, Zea Mays
gtcctggtgaaattttggcgatggcggtgttgaccaagggacttgatcattttcgctctggaattctgcagcagaagccatttatgcaatctccacagcaatttcagcagctccagtttctgaccccacagcagcagcagcagcttttgctgcacgctcagcaaaatctgtcgtcctcgatgtcaagcgatgttgataccaggagattaaggatgcttcttaacaacaggaatgtggtccttggacaggatgggcagacaaatagcggcggtgatgttatcccaaatattggttcgccagggcaaagtggtggatcgcgtaatgatatagatatactaataaagaagaaatttgctcttctacagcagcagcagcagcagcaaagtcatagccagcagcagcagcttcagcaacctgcgctctctggacagcaatctcaaagttcaaaccagcttctccatcagcatggaaaaccaggagttgggagcttgcctattgatggaaacttgccaaactcttttggatttcctgaacaaggatcaaagaagagaaagaaacctgtctcatcctctggtagagctaatagttcaggaacagcgaacactgctgggccatctcctagctctgcaccctcaacaccatctactcacacgccaggagatgcaatgtccattccacagctgcagtataatggtggcccttcaaaaccattgatgatgtttggctctgatggcactggaagcttgacttctccagcaaacccgctgggtgatgttgaacgtctgttggaagatggttccttggatgaaaatgtagaatcttttttatcgcaagatgacatggatcctcgagaaacaatgggacgctgcatggattctagtaaagggttgggttttactgaggttgcaaaagcccgtgcgagtacaaacaaagttgtttgttgccatttctcattggatgggaaacttcttgccaccggagggcatgataaaaaggtcgttttatggtttacagatgtgctaaaacgtaaatccgcattagaagagcactcttccctaattacagatgtccgattcagccctggcatgacccgccttgccacatcttcctttgacaaaaccgtgcgggtttgggacgctgacaatccagattattcgctacgcacttttacaggtcattcagcatctgtcatgtcacttgattttcatccgaacaaagaagacatcgtttgttcgtgtgatagtgatggtgaagtgcggtgttggagcataaataatggtagttgtgtgacctgcgttagggttttcaatggaggagctactcggttaagatttcaacctcgccagggtaaatatctggcagctgcctcagaaaagggaatatccatactggatgcggagacattacaagtttgtagaactcctttgcagggccacgtacagattattcagtcagtatgttgggatgccgcgggcaactatctggcgtctgtcagtgaagattctgtcagggtgtggtcatttacctcagggaactacatcgaatgcatacatgagctgatctgcagcgggaacaagttccattcgtgtgtttttcacccaaattacccgaatttgcttataatcggttgttatgagtccctagagctttgggacataagggagaagaacacggtgacaatcagcaacgctcatgacggcatggttgctgccctagccgcgtcaagtgcatcggggctggttgcatcagtgagtcatgatcagctcgttaagctctggaggtgacactgaacacagcaacgctcgtctgtgtcattctcatttccagtgtcgtggcaaaagcgaaagggcagctgatctgatctcctaggttgatttgcgactgtggcatgcgcaaactattcaaatagttgtcagtaatgtgcttcccttatttctttgtttgtttatccatgccgggtgatactatgttacaattttatctatttagagaactgctattataatttgacctcccacttaggcctatttggctactctagtatttattccaatccatgtgtattgaagtgggttagggtgtaaattagtttaatttatacacaattcaactcaatacatgtggatttagttgaatactagggattaatgtaaatactatagtatccaaataaagtaggcttatgttcatttcatcccctagtccacggggattgaaggagattggagtggactgatagtg

SEQ ID NO: 30425 - DNA, 2464 bp, Zea Mays
tgcatacatatatatcgagatggtggactcagttcgtagtaaaccgacctgggtacaaccggccatgaacctgccaaacttaagtcggtctatacattactattgttgctgagctaactaacctgacactggccggtataggacaaaactgttgcagtctgttgactacagctgctactgacctggtcagcagcaggccaaaacaaaattggttgctactactagctgcagacatgaaacttactaaggaacgtctgcttgacaggcgtgcaagaagcttcttaatggcaatgatgtgcgaaaggtctctagctgagttggttaggtggtataagtagcattcatcaggtcttgagtttgactccctgtaggagcccacaggtcgattttttttaatggcattgatgtgtgttgttgtggtggtgggtgggttgggggttctttctcccgcagagcacaggtccaggttttttaggattgcagtacataatttgcacgtcaaaatttatgtgcagtagattattttcaagggatgtgctggattattttaaatgcagtgtgctatataatttatccaaagatgctaatttgcttatgttattttttctgtattttacatgtacctgttccttttattctcttggaagcaaggagtgtcatcacaacaaacaactgaaggtactggtgtttttggtcgattcagattcttgaaccaaagagtttcatctcagagtgaagattcattatcatgtcatagaattgatctcagaacttcaacaattaagattgatgcagatgaaaatgatttaagattttgcttcagaataatctcacctgttaaggcatacacattacaggcagaatcaggggctgatcaaaaggactggatccagaaaattactggagttatcgcatcgctactaaattcaccattcccacagcagttgtcatatggtaatgtagcagcagagagtaacagatccacaagttctgttgattctttgtctattgaagataacaagagttcagagggacatgatgatatattcaaccttctgaggaatatccctggaaatgacagttgtgcagaatgtcgttcccctgatcctgattgggcatctctaaacttgggtattctgatttgcattgagtgctctggggctcataggaatcttggagtgcacatttcaaaggttcgatccttgagactagatgtgaaagtctgggagccagtaattatggatctcttccatgcactaggaaatgattacgctaattccatttgggaagccctgcttccaaaagaagatcaaggaatgaacgactcaaatggagctattctttttattgaaaagcctaaacctagtgatgctttctcaataaaggagagtatgtggacaaactgctttttgccagagatcccgatcagaataccattaatattttggaagccataaggaaaaatgatgtgagagcagcatatcgaattcttgcaatagctgaagtcagtgctaacatgacatatgatgctttgagcaaagatgtccatcatgttcagccagtgacagacaagatgttacttgatccgatttcttgtgagataattcaggactctggaaaaccagaaggctgtctacaaggatttccatggccgaacaccattgcatcattgtgtccaaaagaaaaatgatgagctcaccaagcatctgctgaagaggggtgcgagaacgacaattaaagatggcggaggtctgactgctctggagagaagaatggaacttggagcgataactgatgaagacttattcatactatttgtgaggtgatgttgcaaacttgcaatacaggcctttggcaactagctgtttgtacctgatagcattgtattgtacccacctaatttagcttctggaaagaacatgatttctacacctgaagacaaatgccttttactgtaccacgatataacttatgggactgctgcgcttggctgtgttttaaaattccactggtcgacatgaccacatcgttggtttgtacaacaattataggcaatcacagtattcgattctttgagtatggttattgaggtatgagtttctgatgtcaagcacgtaaggaaagaacacacgataatcgtgcatgcatattaccgttgggcaattttctttttttattgcaattttacaactgtactgcatatggtcgacctgtaacaattattgaatttatgggtacgtgtatcctgcaagatatgaatcaacttgtaacagcatctaagtatcgcttcaataaaaaagtgcaaatgcagcatagttttcccgtgaatttgttattcagtatactagcgtggcaaactgattaaggatgctaattcaggctctagggtacctagagatcaagcattgacatgatcggtacgtacataaggagtttgcaagccacatggtctacctaaataagc

SEQ ID NO: 30426 - DNA, 2253 bp, Zea Mays
cagccaagtccctccgtccaacttgccaagttgttcgagtaggtttaagcccagtggcggatccagagggggggcaaagtaggccatggccccccctcaattttatacacccttttatacctaatgattatttagtattaagtgtaaaaaaaaatcaaagttttagatagtataaagtcttgttctagatctctaaaactaatagctagttgctaaaattacccaagaggtttagaatggatcaactaattgttagttatacccctcaaataagtattagttgttagatgccccaacccagctaaatcagttaacaattagctctaaaggtttagaacatggcctaaaacaaccatgttatgagcctgcttgccagattctctcgatcaagtccttgcatctaccagtctgactctaatcttcccgacagcacctaaaccagtctgctcgctgcctcgtttccgccgccgacccattcccgatgtgacgccacccgacttcgcccctttctgacgcctccgtcctttgtcctgtttgacgtccatccgctcgacaagctagatctcgctcgtcgcaacgatatgacttgtcccctgcagtcggcgaacttggcgaactagaaaatcatggctctcatgtgatctttttggcccccctgaattttcgtcctgcgtccgccactgtttaagcccccacagccccacccaataatccgccacgacaataaacaaccagcaccagcagtccagcggcaacaataatcaaatcaaagatcaggaggggggagaaacggcttttctctagcaggccctccggttgtttttattatattgggtgctgttgtttgttgcaggtggtgggtggtgcagggattctttatttctggaggcaggaaggaggaagaagaaagaagaaacatcagaaccgacccgactatcagagatagagagagagaggagctctctcctcttcttttgcttttggtattgttatcttgggatctgattttgtccccatactaggagggagtgagggaaggagggaggaggctgggcttgtttctcctctcttctctcatctcagttcctcctcgcaaggctggccgtcggctcggctctgttgacagcaatccctgcactgcagtcttgccatgctccccacgaggagcgcaccatcagagtgattctgcagaaggattcattctactggcgagccgagctggtgaaggagctataataagcctagcgctcacttcagtcatcagccaagtgattgaaaaaggcaagtcgtctgaattattggttccaagggctctgtagttgcttctccacactttcctatgcttttgcattaatcttgacaactgagtactcaaagctgggatatggctacttattattcgagccctgacagtgaaagagattcacaaacaatgtactcaacagagtcaggcaatgcatcatatcccgtgccatcagccctagggaactttctttatctgaacagtgcatcttctggaccttatacagaatttaatggaattgtccagtctcaacagaatttcatggaacttactggtcatccttcagcaatttcacatgattcatcatccaacgaagctactaacattggcacttcactgacagaacagcgctcttttggtcctttgaaagatatgagaaatgagatgttgatgcatttgatggatggagcacacagcagtggcagtgacctcatccacaatgatgaccatagcactgcacagctcgagtttggcatgttaaacaaccacaattcaacaagtcttccatcagcatcaggccaagggctgtctctgagcctcaatacacatatcttggcaccttcctatccatactggtctgcaaagcaggacttattaacaccaaattcttaccagggtgatgacaacagaatgaagaatatgcagtctgaggcttcacaggcaatccgaaactctaagtatctgaaggcagcacaggagttgcttgatgagattgtcagtgtttggaagagtgttaaacagaaaacagataaaggcccttctgaagcaggaaagtcagatggaaaagagactgatggggggactaaaagtgagggagtatcttttgatccacaagagtctggtgccaatacagcagctgagctttcaactgctgagaaacaagagctccagaataagatggtgaaacttatggcaatgttggatgagagaaatactcgaggaatcccaac

SEQ ID NO: 30427 - DNA, 1790 bp, Zea Mays
gaagaactggaatggctggcgttccaggtacagcaagtgctatatttagtgctgttaaggatgttggagctaatgttatcatgatatctcaggctagcagcgaacattcagtatgctttgctgttccagaaaaggaagttgctgtagtttctgctgagttacatgataggtttcgtgaggcattagctgcagggaggctgtctaaggttgaagttattaatggttgcagcattcttgctgctgttggtctgaggatggccagcactccaggagtcagtgcaatactttttgatgcattagcaaaggcaaacattaatgttcgagcaatagctcaaggttgcagtgaatacaatattactgttgtattgaagcaacaagattgtgtaagggctctgagagctgctcactcaaggttcttcctctccaaaaccacacttgctgttgggatcattggacctggtttaattggtggagcactccttaaccagttgaagaatcagactgctgttctcaaggaaaatatgaacattgatctgcgtgtcattggaataactggctcaagtacaatgcttctgagcgacacgggaatagacttaacccagtggaaacagcttctacaaaaggaagcagaaccagctgatattggtagttttgttcatcatttatctgataatcatgtatttccgaacaaagttttggtggactgcacagcggatacaagtgtggcatcccactattacgattggttaaagaagggtattcatgtcatcacgccaaataagaaagcaaattctgggccacttgatcagtacctgaaattacggactatgcagcgtgcctcatacactcattacttttatgaagcaactgttggtgctggcctcccaatcatcagcaccttgcgaggtcttctggagacgggtgacaagatactgcgtattgagggcattttcagtggaactttgagttatatatttaacaatttcgaaggaacaagggcgtttagtgatgttgttgccgaagcaagagaggcgggatacactgaacctgacccaagggatgatctatctggaactgacgttgcccgaaaggtcgttgtcctcgcgagggaatctggtctgaggcttgaactttctgacattcctgtgaagagccttgtgccagaaacacttgcatcatgctcgtcagcagatgaattcatgcagaagctaccgtccttcgacgaggactgggccaggcaacgcagtgatgctgaggctgcaggcgaagtcctgcgttacgttggagcgttggatgcggtgaacaggagcggacaggtggagctacgcaggtacaggagggaccacccgttcgcgcagctctccggctccgacaacatcatcgccttcaccacgtcgaggtacaaggagcagccgctgatcgtgcggggtccgggtgccggcgcggaggtgacagccggtggcgtcttctgcgacattctgcggctggcgtcttacctcggtgctccttcttgagcttctactagctacaggtgccagtttcaggaagcagacggagacacactgccatgcatgatgcctcccctccgtgtttgggctatgctcacatgttgtaatgttgttctgaataagtgccaggaaataaggcctctagcgtatgtcgagagagagaggtcgttcggctttggaatagccgattaggtgttgtttttgctgcatgatgcaaatgaattatcgtaccaatgaagggatgtttgcttgtgcctactgccatgtatgctcataaaaaac

SEQ ID NO: 30428 - DNA, 3816 bp, Zea Mays
aaaaaaattggtcagaaaaaaaaagatgaagccatttgtcgattgtagctctccggcatctgtctcagaatctttgcgcccgctgccgtccgccgctcctcctcccacaccggcgacctccgcccggtgttccatcctcccgcaccgcctcccgacgtccgcgtcgcccccacgcatccttaccttttgtcgattgcgcggtaccgtctaccccactaggcaaggcggtaccctccgcccagcgtagaggcgcgcctaagcgagcgcgtaagagctcctttttgaacacccttcctactgccgacggcagcggcgcatagaagagccaatccgccggtttgatctgaagcatggacaaacaatctgatgcccaggggtcggagaaggttgctgaggagaagcaacttgatgagaaagagttagaaaggaagctgaaaaaagatcaaaaggcaaaagagaaagaagagaaaaaacttaaggcaaagcaaaaggaggcggctaggctccaggcacaagcaacctcagacggaacaaagaaggctgagagaaaacaaaggaagaaagctgtggaggatgaaaatccacaggatttcatagacccaaacactcctaatgggcggaagaaattgctcgcgcctcagatggccaaacaatacagtccaagtgcagttgagagatcatggtatgcttggtgggaatcatcaggatattttggggcagattctgcaagcacaaaaccaccatttgtcatagttctgccacctccaaatgtgactggagctcttcacatcggccatgcacttacagtggctatagaggatgctatgatacgctggcgtaggatgtcaggctacaatgctctgtgggtccctggagtggaccatgctggcattgctacacaggttgttgtagaaaagaagcttatgcgtgaaaggaagctcacaaggcatgacatagggcgtgaaaattttgtttctgaagtactcaaatggaaagatcaatatggtggtacaatattgaatcaattgcgccggcttggggcttcacttgattggtcccgtgaggcttttacaatggatgagcaaagatcaaaagctgtaactgaagcttttgtcaggttacacaaggaaagcctgatatatagagattatcgccttgtgaattgggattgcacacttcgaactgcaatttctgacattgaggttgatcatattgatcttaaagaagacactatgttaaaggtccctggttatgccaatcctgtacagtttggtgtattgatatcttttgcctatcctcttgaggaaggactcggtgagattgttgtagcaaccaccagaatagaaacaatgctgggcgatacagcaatagctgttcaccctgaggatgaaaggtataagcatctgcatggaagatatgcagtccaccccttcaatggacgaaaactcaaaataatctgtgacgcggagttagttgatcccactttcggtactggggctgtcaagattactcctgctcatgatccaaatgactttgaggttggaaagcgtcataatcttgaattcatcaacatattcacagatgatggaaaaataaatagcaatggaggtgcacaattcgatggaatgccaagattcaccgctagagttgctgttatcgaggcactgaaggaaaagcaccatggccaaggcaggccttgacgctgtaaggtcaaaaaagattgaaattatcccccagcagtatgagcaagactggtacagatggcttgaaaatatacgtgattggtgtgtctcaaggcaactttggtggggtcatcgtatacctgcatggtatgtgacactagaagatgacctggataaaaaccttggttctaacaatgaccgctggatagttgcaagaaatgaaagcgatgcaaaacttgaggcacagaaaaagtatgtaggaatgaaattacgtctagatcaagaccctgatgtactggacacatggttttcatctggtcttttccccttaacagtacttggttggccgtctgataccactgacctccgtgctttctaccctacatcggtactagaaactggacttgatattctcttcttttgggtagcaaggatggtgatgatgggaatgcaacttggtggtgacgtgccatttcagaaggtttatttacatcctatgattcgggatgcacatggccgaaagatgtcaaaatcacttggtaacgttgttgaccctcttgaggtgataaatggcatgtcactggatggtcttctgaaacgtttggaagaaggcaatctggatccaaatgaattaaacattgcaagagatgggaagacgaaggattttcctgatggcatagcagaatgtggtaccgatgcgctccgcttcgcactgatatcgtacacctcccagtctgacaggataaatcttgatatcaagagggtggttggatatagacaatggtgcaacaaattatggaatgccattcgttttgcgatgggcaaactgggtgatgattacattccgccggcaactgttgatgtgtctcttatgccaccaatatgcaagtggatactctcagtgcttaacaaggctgttggaaaaactgttacttctttagaagcatacaaattgtctgatgcaacatctgctatatactcgtggtggcagtatgagctatgcgatgtatttatagaagctatcaaaccttacttcagcgattctcaagagtttgaatcagcaagagctgcctccagagataccctgtggatttgcctggagacaggtctgcgtctgctccatccgttcatgccctatgtaacagaagagctctggcaacgtcttccacagcccaaagattctagtaggaggaaagattcgattatgatttcagagtatccatctcttgttgaggaatggagtaatggcggggttgaaaatgaaatggacattgtcttggatgctgtcaacaaaataaggtctctgaagcctccaacagattcaaatgaaagacggcctgcttttgcactttgccgaggccaagaggtcgctgctactatccaatgctatcaatctctaatcgtgtgtctttcttccatatcacatctcaagatcctgacagagagtgatgaaactccagccgattgtgcaactgctgttgtcaacaaagacttgtctgtgtaccttcagctccaaggagatttaaatgaagatgctgagcgtgaaaagctaaggaagaaaaaagatgaaattcaaaagctacaaaatgcactggcacagaaaatggacgcctctgggtatcgcgagaaggctccacagagcgtgcaggaggaggacatgagaaagctcaccgctttgttggaacaactagaggtcatcagtgaagctgagaagaaattagactcaaactgagcctgtaccgaagttggtccccacatttttcttgtttgcaaaaagctcctgtttgctcaggttttcaattgatggttcagatggaagccacacttttgcagcgtgtaagaatattcactggctgtacagaaccatatttttgggtgttcgattttttcaagttagaaacttctgatgatgcatatgggaagtctgtcagaatatgcagcagccgaaatctgttaatcaaatttattagaatggtctcaattgtctcattcctcatgctacacaatttagcttgcttattctttctacgaaaaaaactagagtcagatgacgatggtccactttatatcacaaaccaaacaccctatctcttctattaaaacctaaaacctgaagtgaattcaggcgttgtcc

SEQ ID NO: 30429 - DNA, 420 bp, Zea Mays
tttggtaccatattccaggtgggaatgtgggatgtatagtgtgcagatctgcatcgcgtgattgcaggttgcgcgcggttggtcaattgcagagggtagtgttcctaaaaaacaagcctcatacgcttggcttgcttgtttcatatgaccaagaaagaagacattccgggtgttgctatttgagaaatacataggattgcccaaaaatggtttctaggatgggttctaatttttcaaatgagaaagatatagtgatatgctatgtccggctaaatatcagtacagatgcaagtatgcaactacaagtaattgtgtcaaatttatataagtgaacatcaattctgtcgggcaccctggaacggggtgcccaaggaaagcccgggaagcttctcaagagcggtctatccgaccatgtctccc

SEQ ID NO: 30430 - DNA, 5199 bp, Zea Mays
gggagaggagagccgcccgcatccgcgcaccgcaccgcaccgcgccgcgccgttcagagagggagaggaggggacgcgaggaggaagaagaagcaggcaaacagcagcagaaggcagaagccccgtcccatccccggcagccccctccatccaagtgatttcaagtagccaccgagaagcggagaaggtgaccgcacctcacgcaatttgcccctgcccgtcgattccatcgcctcccgccgtcccttccctcctctagggttgtcttgtgggtgcccgtgcttcccaccctaggggcaggtccagggccgggccttctcttcgccccgcctccgctgctcttttctttgctgctagggttaggttagggttcgacgctgtggggaggggcatcctcctccctcgccgccgccgccgccgccaatgcctcccggcggtaggcgcggcgccaagcagcgctccaactggaccagggaaccccagctaggcgaccttgtcctcgccaagatcaagggatacccgtcctggccagctaagatcagcaagcccgaggactggaaacgtaagccaacgccaaaaaagttcttcgtctgcttctacggcaccggggagattgcctttgtacctctggcagatcttgaggaatttactgagaagaaaaagaacgatctgttagatcgagctcttaaagttcaaagaaaatatgttcaacaatttaatgttgctgtggagcagatctgcaaggcttataatgaattgccaaaaacatctgaagccgcaaatgtagcattgcctgatcagagtgaaaagactacagagcacctggtgaggtcacctgatattggtgggactccaggactgggacaaatggaagatgatccccctactgattgctcaagtacttcagggcaagggtcagggaccgaggaggatgtcaaagatggtggtcatgaaataggtgataattctttggcagttcctcaaaagaaagcatctttacaacaggatcctaagcatcccaagacaaagaagtctgctgcatcaaagtctggttttgacatgtacacagaacaggagcattcaccaacatctctgcgggcagaaaggcagattgaagaggtgaaaattgaagaagagagctgtcatctagaaggttttgttttggaacctaacttggaggtggtttgcgcccttgaagtgccaaagaattttaaatccaacaagctgttgaggaatgctgaaagtaaggaaaatgagcatgttggtgttggtagtcctactggaaggattgctgttgaggccgcatctgatgttgtattaaacatgagtgctgaagaagagagcagagaatttaagaagtcaaaaatcatgacaaaacaatcactgactactggttcagagaaaagggataataaaattgtccatggaaagcctgacaagcaattgactggaaaatcatctgcagggttttctctcaatcagaaatctctgacaggtagcgggcagcacaagatggacagtagtgctgatacacgtccggcaaagaaggcaagacttatggacagggctggtgaaacagataagacagttgccaagagtgagacgaagttaaacatcaattatgaaaatcataatgctgtgaaacatgagcaatctactgctgtggaaacatgtaaaaacacaattcttaagactggtatcggtgatgatagggcacggaagtcaggtggtgctgtatcacccatatcaaagcttcattctgagatcatggaaccagcatctggttcttctgtaactcagtctactgttgctgattctcttaaaaagggttccagcaggaaggaggatgtctcacgtgttgataggaaattggttaaacctaagagaagagcgtgtcgttttgatgatgacgaggatgaaggacagcaaacaccacttcatagaacttctgccaaatctctctctacgcatatagtcccaactgagaaaccaggtagtcggggaaattttgcttcgcatgttggcaacgcttctggaaaaaaaccaggccctgccagagaagagaaatcaagaagtgttaggatgtcacctgtgaagcatgagccagttttttcttcaccgagtcaggataaagtgcatgctagacaccagttaatggggagaaatctgatcacagggtcggttgagactcctgtcattggtaacaaaatgagcctggttgatggcaaatcctctgctcaagtaaaaatgccggcatgctctgaggtgaagaaacttcatagtacttctaaaccattgcaagtaacatctgggaaatcccattcccgaaactatcctgcttcagaaaagatcgccttggtgcccaagtcagaagaaacaaaggctaaatctaaaccagctacatctgttgagcataaggtggccaccactttgtcaactgaacggactgggaagcgggaccacctgaaagaggaaagatcaagttctgttgataaagcagcttattctgaacctaaccctgactcggccaagtcaataaaacatcttattgcagctgcccaagcaaggaggaaccttatggcttctgctcttgcaaaatttgatgggtcttcgactgataatagtgctattacctctacatcatatggtttgccaagactaagccctagtcctgtttttcgcattccatccccacctagaattgcttttcctgagagtcctggtcaacgtattctgaaaagcccaatggagcttgataatggtcatggaaagagtcccaaatctaggcaggccagcggttcacctagtggtggttctgatgcagcaattgctcgtgatgctttggagggaatgatagagactttatcaaggacaaaggatagtataggccgtgcaacacgccatgcaattgagtgctctaaatatggcattgctggagagattgtcgagcttctcatacagaaattggagaacgagcataatttgcatcgcagaattgacctcctttttcttgtggattccataacacaatgttcccattctcatagagtgggtcacttggctgcctggctttgtaggttttaagattgtggcttgagagaaagattatgccagaagacatactccgaaagtacatgggtgacattgaggtgccaaatgatgatactagcactagtttaatgttaaagcgaccatcccgttctgaacgttctgtagatgatcctattagggagatggatgacatgcttgttgatgaatatggaagcaatgcaacttttgagctttctggaattttatcatcaaaagtgtttgaagatgatgaagacttccctcaaaacaatgggtcatcatcatttgtttcacggcctgttgaaggtggtgtcatacatgaaactgaagataatattgctccagcatctgttgaggaacacattattagagtagaacatgtagctactgatgctgctatggaagatgctttagagttacttggcaacaaccaacagactcatggagctgtcattattgaacatgactctagtcaaggtccaggttcagagcaggcattgatcgcccagaatgagcttccccctctacctgatggccctccaccacttccatcagattcaccaccacctccacctcctttgcctccttcaccaccacccgctacaccgccaccaccacctccactctctccagcttcaccacttccgccaccacctcccccactaccatctggaccacctcctcagcctgcaccaccacctctgccaacccaggacccacctcttccttctattccgctgcctgtttcttcatctccgttgtcattgggttatcagcctccagcgccagagtacttcatgacgcccaatggtaatcaattggcccagatgacagtaaacacatcaattcaagctattggaaatacaacaaccttcattcctggtggaccagttaatggacaagctgcagttaattttgttacttcaatgccggcagaatttggaaatactagcgtatttatggcgcaagcttctaatggtaattaccagtttcggccaactggtgtaccttttcagcaagggaatttcagtgcctttccatctgcacaaacacctccagttcatccccattctcgtatggcacacatgaatcccatgggccaacaagctgttgcacctccacacaatccttatgctgcacagtcctttccaaacagtcagagccattatccatctgaagaacattggcggatggcatctggtaacttcagtccagatgaccagcataattggatagcaagtggcagatcattaccttgctcagaagggccatttgtgcatgatggatattcaagatcaaacattgacagatcttcaatgaatcctatgaatcatcaacatactgttctgaatcatttgccatctggagcaccactaccaggccatatttctcagatgctaccagccaggtctgatatgcacactcttaattgctggaggccctcttgatagagttgtaaactgaacttcttgtttgtgattttgacatggaaagctcagggcattggaggcaatttgaattgagttcaacaactggtggctgttagtctgagatggagatgcacttgccagggtttaacgatgagatctgtcatagtatgtggaatggacattttacaatgtaactagtcctgacaacagtatccagcagacaatctctcttagtgtgagctcatcttttcacatgacgcaaatgtcctccagttttttagatgttgcttccagtatggatcaggacagcgaactgttcctatgctatggtagtaaatatcttgtgcagatacattaattataaatagaggtctggtagtaaataccaggaactggtatcatcaaggcattttgtcacggtgcctatgctatggttcgcttttttctcttaactgttgtgctcaatttgcgaaattcatttcaaatttcagttagctaatcacatatattctcaacaaccgtattttatgtttggtgtttagactagaattgtgcttagacaacatgtacatcactgagtttagatttaagagcggaagttagttttgattctgttaggacggcgaaatatgtgctgatatttaagagctctagtttattcttgtttccaaagactgctgatagcgttggttttctaagc

SEQ ID NO: 30431 - DNA, 251 bp, Zea Mays
tagagattgagatcaagcgggagatttcgactatgaagctgatcaaacatcccaatgtggtccaattgcatgaggttatggcgagcagaacgaagatatacatggttcttgaatttgttgatggaggcgagctattcgataagatccaagagaatttgcttctggattcaaatggagctcttaaagttttagactttggcctaagtgcatttgcaccacaaacaaatgtacgatctctagtcagtagctag

SEQ ID NO: 30432 - DNA, 3243 bp, Zea Mays
gcgtgtgatggaaaaatttcagcttaaagaacttaaattgcatttcataaagggcatgctgagagttgtctcactgagtcatcaggccgcaggttcgaagcaacctctcctcatctgcaggaggaatgcttgccttggtttatcccttccctagaccttactcatgtgtgagcctctggcactgggtctgcacttttcaattgcataaaaattcctgtttgtggagaatgtgataacacactgacaattctttatattgaatcttatgttgcctttacacttgtgtcatcatgctggtgtcgttggaaactagttgtgctttcatatgatcatatcatgctgtagttgcattgatcattagcagagtgatactgacataggtgtttgcctggttgagtttctttctttcacttctgactttctgaatacatctttgtttgaccatagaaataaaaacactgaactttctgtccattagtataagttcggcagcagaaagtcttctgtctagtgtaatggctatgatatttcaggttattggattgcatggtggtgctttacttggtgtcacataccgtacatctcgtagaatcagtcctttgacagcaacagctatatcaactgttcaatcgatgcccttatcaggttttggtggaagtggatcatcttttgcatctgatgatccattttcctctaaggaagggcctccacaaaatttccaactgtacagctgggagacctatcagcctgttagtggcctacttgcacaacctgagtggactgtgtgggaccaaactgttgagtattgtgcatttgcttatcagcagtatatagtgatttcttccttgcggccccaatttaggtaccttggagatgtttcaattccctttgcaactggtgccgtttggcatcgaaggcagttatttgtgtctacaccaacaacaattgagtgtgtctttgttgatgctggagtggcagcgattgacattgaaacaaaaaggataaaacaagaaatgaaagcaagagaagctcagagtcgggcagctgaagagcatggagatttggctcttatcactgttgaagctccccaggttactgtgagtgaaaaagtatcattgaggccaccaatgttgcaggttgttcgtttagcctcctttcagtacgctccatcgataccaccatttatagtaccaaagcaatccaagttcgatggagatgattcagtgtttcagaaagaactggatgacagaaggtatgctgaagttgctgtcgctggaggaggtgtgtctgttgcagtaactcgcttccctcctgaacagaagagacctatcggacctcttgttgtggttggtgtaagagatggagttctctggcttgttgacaggtatatgtgtgcacatgccttatcactcagccatcctggtataagatgccgttgccttgcagcatatggggaccctgttagtgctgtgaaatgggcaacgagacttggcagagagcatcacgatgacctggctcagtttatgctgggtatgggctatgccactgaagctctccatttgcctggaatatctaagaggctggagttcgaccttgcaatgcagagcaatgacctgaaaagagcacttgcttgtctattaacaatgagcaatagccgagatgtgggacaagaaacagctgctgctgatgccactgacgttacccagattcttagtttggcagtagctaagcaagctaagcaggaaagtcttacagatgccgtgcagggaatagtgaaattcgtcaaggagttttttgaccttattgatgcagcagatgccactggtcaatctgacattgctcgtgaagttttaaagagattagcggctgcagcttctgtaaagggagcactccatggacaaatgctgcgaggcctggcactccgtcttggaaatcatggggagcttactagattgtcgggtctggtaagcaatttgattacagctggccatggacgcgaagcagcatttgctgccgcagttctgggagataatgccctaatggagaaagcatggcaggacacaggaatgttagctgaggctgttttacatgctcaggcccatggtcgtccatcattaaggaacttggttataacatggaacaagatgctacaaaaggaactggatcacacaccgactgtaaaaaccgatgccgccgccgcattcttggcttctctcgaggatccaaagctcacaagcttgggggaaactgagaaaaagcctcccatcgaaatacttcctcctgggatgcctcccctatctgcacctccgatcgtgattaaaaaggctggagcaaaacctggtctccctaatgcagcaaaggcgtcaaatgggcctataggtgctcctatggctcaaggtgctcccatggctcatggtactcctgggccacaaggagtccccatgaatcaagttactccatcacagggcagtcatgacgaggcaaggccatcagatgctacagtggctgatgcagctgccgcggttgcagaaggtacagcagctcccccggctgcagaaggtacatcagctcctccggctgcagaaggtacagcaactcccagcagtgaggaagctaaagcagcacctggtaatgaggaaggcacatcaaatccaatcaacgaggaagccacagcagctgcagtttcagttgctgcaggcagccctgactctgctgctgctcctgcagctgatactagctcggacgcacctgctgttaatcccacggaagataccgtctctgccccctcaacggaggcaccaccagagttgacggataagccatcttcagcagaggcatcgttgccacctccacccagtgtttctggtgtataaatatttctgattctcttttagcagtgtgccgaattttctgtattctggttcgttcgttccaccacgcgcgctggtataggtatttgttgcctgtggtatacagatttcgcagacgccaggcagtatgtgagtagctttgtacatctgctgtctgcgtctcacgagaacgtgctaccgttgtgtcactgacactgtgtggccatatcttatgttgttggtgaccacagttcaattcttgcttgatgagttgatcgagctgcaccaccaatatccctgtcttggacgaccgattcgtctcttgcggaatctaacgtaactgctgaggttcgcaaaatgtcttgttgggtcatctaacttgggaatctgtgcg

SEQ ID NO: 30433 - DNA, 233 bp, Zea Mays
gtcaaatcatgattaataagaatcaaaagatatgctcatatttagtaaataacaacaaaataggttgcttatggaacaccaaaattaaaagaagacgatgcatattagtggaatgtgaaatttagaactgacacgcaataattgatgtaacataggttgctcatttctatacaaaattaaccactgcattctgctagtttgcatagcattatgagttgtagcaatttcaaata

SEQ ID NO: 30434 - DNA, 1404 bp, Zea Mays
ggaaatctcacacctgctgcccctcccaaattcccttctccctcacgtctctttctctccccaagccgccgcctccctgccgttccgtggagcaccaggccagtgccgttccgatggtcattccaagccagtgccattctcctttggccgtccctgctccagccgtgagctcacccaggccacggcctcgtcgaaccgcacagcccctgcgctccttccccagccgcgcttagccctatcctccctgctcgatctccttcgagccgtaacggctccctggcgtgtccggctccctgcccctctccatggcgtcgcccagctctagctcgccccccctctgatctgtgcgcaggggtttcttccatggcgagctcccctgcaaacttcatctagccgccggccgagtttctttggtggtcgcttacccccagcatcggccagagcttgctgtcattccccaacaaacatgtggttgtaggtgagagatttcagaagtctgttggacgaagaaaagagaagtgaaatttgtgcagcgcccgtcaggtgttaggtttaatagatattgtgtctaccgtgtgagggaatcgtgccagcttcctttgggtttgggactgggagctccatcgctctatggtatgaaccacgtgtgtttgtgacaccaatgtgtaggatccatatactctgtcctagattaattagcagtgtgtgaatgccacagcatactctgtcctagattaattagcagtgtgtgaatgccacagcggcggtgctcgcccgtgtctcagctgccttcaatggcccccttgcccgcgcagtcgtctttggggtccatattgatggtagtccctctttctttgtgtgttcacaagatgggtcggcagttttagtgtctcacacgcagtggccacgggatttttcaagtcacttggtcgtggaagggcttcttattgcagtcatagtgttccagctctccaggaagagctacaaaccaccaaagaagccactcactgaaaaggagattgatgagctatgtgatgagtgggagccattgtggttgttgttgcatgagtaatcctacatatcatttcatatatggattaaccggatggtctcactcttgaaactgtgggagtgttggtgcaattcttatactagtttcacttaacttaatagtgccatgtgtggggacctattaatcttgaacatttactcgctagattatatgacatttaaaccatgtactcgtgattaaccagcaagggacaccttgaaccacatagaatatcatttacccttgctacccaaatgcttacatggctacatgcttcttggattgtattctctcttctctgatatcagtatgatcatcaaagcacctaaaatgtgctgctgtatgtatatagc

SEQ ID NO: 30435 - DNA, 6175 bp, Zea Mays
atggatctcgcggggatgaagcggcgggagctccaggcgctctgcaagcggcacggcctccccgccgggggcaccaacgccgacctcgtcggacgtctcgacgccgtgctttcggggcccgctgttgtggaggaggaggttgccggagtgccggcgaggaaggggtgtctgaagcaaacgggcggaggtgccaccgaggccaagaaggttacttttggggcggaggtagggaaggccaggagactgaggtctcgggtcatatggtcgccggtcgttgccaagacaagggggaagtctgctcgagccggtactgattctgctgctgaagacggtatttctgcagatgtgggcgctgatgtcccagtgaggcggtccaggaggaattcgttcaatcctgccgaggctgaggaagcaggagaggctgttgctgttgacaggaagcccaagcgcaagaatcaggagaatgacgagggcgttgctgttatcgctcaggctagagttacgagaaggtcaaatttggagtggtctgctactgtattgcctcctgctgttgagaagaagagagggaggcagaatgcagctgagtctgatgtgcagaagtccgctctggtggaagtaacagctaggactacaaggtctcgctcaatcgtacctgttgtggtgccacccactgtggttgagaacaagaggaggaagactggagatccacaaacaactgtagagttgactatgctttcagatgtgcccagaagtgattttcctgccaccaggtctttaaggaacaaaattgtccacgttaacaacagcgtcgtggacgaaactcacactaccaggcagttggaaaacaagatgcgtccgtctactcgtaggcatcaacaggttgcatcttctccggaggataaaggtcaaaaaattcctgctaccagtaagtcccctctactgaggtggtcacggagaaactattctgaggccaatagtgcaaattcagtaaacatcaaattggccaaagactcgagcacagctcagccattggcacaccataattctcattctgaagatttggagaaacaaccagcagttaaagaaccaattaaacggtcaacacgtaaatctattgctttggctgcacttgagaaagagaaggatgtaattgaaggaaagaaccctgaagcacatgttaggcgatcaacgaggaaatcagttgtgcaggttaaagataccaaaagtattgttgaagagactcaatatgctaacagtgaagatgtggcgaagcaaccagcaactaaaggacctgctagggggctgagacgtaaatctgttatcacagaattgcatgagaaagagaagagtctcattgccgaaaagaacatggaaacagatgaagcgatattaacgcggaagcctgtaatcccagttaaaaatattaaagctgttggtgaaggaattcaaattggtaagggcaaagatgtggataaacaatttgttgtgaagcaacctactaggcgatcatcgcgcaaatctgtgctgcctgatatgcttgagaataatagtggacttctagcacccaaaatgaatgctgagatgaatgttaggagatcaacacggaagtctgttcttcctgacatgcataatgagaagcaagatcaccataaaatggctagaaatgagaacttgcaaagtggtaaatatcaagatggtgagaagcaacagaaagtaaaagattctattaggcaatcaaggagatctatcgctacagtgctacttgagggacaaaataatgatgaaggaaaaaagttcaaaaatcctacgaggaggacaacacacaaatctcatgcccttaatgcagttgaagaggtcagcatggatcacattgaagttggtgaagaaggcttgaaattgaggaagcgcagtaggtttttgctggaaatatcatcttcagctaatgtttcctggaagcatcagaatgcacagatctctaatgaaaaagataacacagaaggatcgcagcaggcatcaaattgcacaacttcaaagagaaggtcttcaaagaagagacgaacaactgctccagaagaagtgatgcctttcaaggtggcaaatgatgacatagttatcatggaagaaacaaaggacacacttgaatataataatgagtctagtagtaaagttcaagaaatttgtcaggttaatgctgcaagagaagagttctcttcaggtccattgcttgtaacagtagctcctagtgacgaaatttgcacagtgcagagtgtagctgtggtgatacctgggtcagaatctggtgacgatgcaaatcaaagttctgataagagtaagcaacctcaggaacattctgtcactcaaactgttgatgaccatttatctgaaacaagaagtgggaaattagatcaatcaacatgcatcacaggattagtctctgacaattgtgttgtctcagaggacaaaacattgatgagtgaagaccgtgaagagcaaagccctgtgtccggagaacagagagttagcttggaagcaaatgccaatgagcctgaggaaaagaacctagctaacgtcacatcaactgatctccacaccaaaagtctgcagcatgatattgacagaatagctaaagagactgataaagagcatgaagaaaaatatgcagtgagccctatagctgttgaaaagagcgtcagtcgggaagccagtgcatgtgaatctgcaggaaaacccctaactgtcatcttttctaacgatctccacaccaaacatctgcaacatgattgtgatgtgctaattaaggagactggtgaagatgttttagctcaggagaattgtaatgaccagcctgttccggcccagactgacctagaaatgaagttaaacgatgaacttgctgatccggaagttttagctcaggagaattgtaatgaccagcctgttcttgctcagactgacctagaaactaagttaaacgatgaacttgctgatctggctatggaatcaggttgtagcattactgaaaggaatgaagggcttgttgctcataatcttgatcaagaaggtttccttgaagcaacaccagagtgcaaacaggaatgtggtttgcctgaggagacagtaatttcctcaaaagaaacaggatctctgctgtgtgcagatcaatcaccaattggtctggaatctttattttcgcaagaaagcatagttgaatcagtggggcattgtgcacttgcttcagcaacaactcataccgaaaatggctttgatgattcaaaagattgccataacaagtctgcacttgaaaatgttcatgtgccagaaccttgttcacacaatgatactaaaggaggcatttttaaaaatgttgattgtatgcatacatcccagcgagatgatagaatggaaggagtaccagaggctaacactgatgaagaacatgttctgtcagcctttttgctggatgcaaatcacctaaacgtagtcattaattctgaagaagtggtttgtgagggtgaagatagtaaggagcttctccattcggaagactgtaaagcttcatccgagaaaacagatgtgaatgatggcaatgtatatggtattagtgatgctgtagtgagatgtgcactgcatgctccagccgatgataattatgagatttttttgggtcccaatactgatgtaccacgtcaggtttataatgacggatgcagtgatgtcaaagaagatcgatttgcttccaaaccctggacaattgatattattgaggatgcctctgtcaaagaaagatcaaatttaaaagattggcaacttgattccaagttggagggcacagaaatagtggaatctggcctttacttcaataaggatattggtaacattttacatagtggatctattggtgaaataactccatctggttctggtttatcaaaagattcatctgtggactatagaggggaggttttagatggcttctcaatggaagcatctcttgaaaggtcttctacacgtggggaacaaaatggttgtagactagatgctattgagaatccttcaattactttagcaacttctggttataagcatgaaggtgctttatctgaggaagcagtgtacacaaagaagaattacgctggaacatgcttgtcaaatcccagggaattaatcatggagctgcaatcccatttctcaaaggaaaacataaatgaatctgatcctcatgacagccttgtattcccaactgctgaaaattcagcagatgaacagctggttaaagtacaccatggttctaatctgtctcagttaggattaactgatctgttggatggaccaattgggtgttccaataccgacgtgttgtgccagtgtgacaatcataaaaatcaatccaatgaggacaaggtagaggaagttgaggcggtgtctgctgctaaatacatagaaagtgaagttgtgctgctcccatctcaagagagatcaaatttgaataatgagcagcttaacaccaagttggaaagcccaaacattatgggatcttgccttaactgtgataacgatgtttgtaatacttcggacaatggatctgtttttgtcattggtaaaagaactccatctgcttctggcttaccagaagattatcctaaggatagtgacttgcaacaaccggttttagatagcttctcagtggtttcatcttttcaagacaatatatctgggaagaaaactgtttctggtgtagcaggcagtgagattctttctttaagtttagcaactcctgattataaacatgaagatggtttctctgaggaagcagtatgcagaacaaagaattatactggaacttcctcggtagatccgaggcatttagacatggaggggcactctatttactctgagggagatacataccaaggtccttgtcaagatctaggcagacatgaagaacaagagagctgcatgtctattcctatgcaagccaaagaaagtggaggggttttgaggtctagccacacgaaagggtcagttacagcagcccaaattgatttggcaggtgatgcccatcttattgtgagtgataatgctgctgccaagcaagtgtttagtgaggagaaagaggaaacaaaatctatctcttcttcagatattgatatccttcatgaaaaatcatactccagtggacacgatgaccatgctgcttgtgctgccgaaactcagttctaccatccacagaaagcatctatatctgatggactacatttgggtcctagttctttgcaagtagaatcactggatgctttggatagcgatatactgtatgttaacacaggagttctcgagcagcatcataaagagggttactatgaacccagtgtctaccaaatcacttcaggcatttgcacaatgtctgaagctgaaccattcgaagttttagaaactggaaaagatgtaaaaacgccatctaagctagatgagcaacttaatcctgggttggacggagatgaagctgagaaacacagcttagactgtggtacagacaccagtcctgtgatgagcaagagaaccctttcttcaccaggatcaggcatttgtcaaagcagcaggcgaagaggtatagatgaactttgcggtaagctgcagagtttcaaagtttccagcgccgtaaaaggaagctacgtagctatgggtgcacctcgtccgaagcctggggacagcacgagccgatctgcagccgcgctgctcaggaacatagagaacacaactgctgttaaagctggccgtcctcctgtcaagccaaacgccgatggtaaggactcgtctaggcgagccctgcagcccataagcggaaggcctgacagtaggtagttcggcggttccttaataagtgtgtcgtgtttgtgttcaaccctttgttgaaagccaggtccgtgtatttgtgcagcttgttgtcatgaagctgctgtgtgcgtgtcatttaacataagcgtgcgtgaagttgtgttatggaagtggctaaatatgtgttcgttaggaggtcaattggcttgaactgaccctgctgttccgtgatttctgtctaaatatacttgtgtggctgtgtcactttgattggccttatcgatcacatgcaatgggatcacatctagcgtgctctagggtcctcgtttggtaatcgctg

SEQ ID NO: 30436 - DNA, 1632 bp, Zea Mays
tgactctcaggtaaaatggttgctggttcaccgatcatggtcaaactagtatggtattataacaacgcattggggaggccagacaagaagaaatttattgcacgatcaaaagcataccatggatctacactgatatcagcgagcctaactggtcttcctgccctgcaccagaagtttgatctaccagcaccttttgttctgcacactgactgccctcactactggcgatatcatcttcctggtgagacggaagaagaatttgcgactagacttgccaccaatttagagaatcttattctcaaagaaggaccagaaacaatcgctgctttcattgctgaacctgtgatgggtgccggtggtgtcatccctcctccaaagacctattttgacaaggttcaagcagtggtcaagaagtatgacattcttttcatagcagatgaggtcatcactgcatttggaaggttgggaactatgtttggatgcgattattataacatcaagccagatctagtttccttggccaaggctctttcaaatgcctatgtacccatcggggcaactcttgttagcccagagatatcagaggtgattcactcccagagcaataagctcggctcatttgctcatgggtttacatactctggtcatccagttgcctgtgcagtggcaatagaagctttgaaactttaccggtatgctgcacttcttgtagcatgacagtatccctgctcatatgtcagtatttatctcttgttcctgattaatgctctgcggaaattggcatcagcgaaagggatattcctggtcatgtcaagcaaatcgctccaaagttccaggacggaattagggcgttggcagacagcccaatcatcggggaggtacgcatctgatctgaatttctgaatcgcgaaacctgccactcggtccaaacacgactacagtgctcccgaacttcagatacgtggcttagggatgattatgggaaccgaattcaccaacaacaaatcaccggctgatctattccctgccgaatggggggttggtgccatctttggagaggagtgccagaagcgcggcatgctggtcagggttgctggcgacgccatcatgatgtcgcccacgctgatcatgacgcccggcgaggtcgacgagctggtgagcatctacggggaagccctcagggccacggaggagagggtgtcagacctgaagatgaaatccgagaagaactaaccaaaagggcgaggacgacgacgataacgcctggcggcaacggtagcagctgatgtacaggtgaataaaatggtcgtgactgcgagatggcaataatgcgcgggaatggtcgacggtcgtctctgatcttggagtgcaaggtcaagctgctcggtcgctaaacaacggtggctgaacttttaaacgggacatagatgtttttttccctaagcaatggcagtatctcaaatgtttgctgccctgtagtttctgaacataaagggttagcagacgttataaaatttaaattttatcgtaaaacagttgttattctcattttctagtgtatcttcctctcccccctcccccaaaaaaacaattgcatgtcttgttgaacttttatgcgattgggcttaggga

SEQ ID NO: 30437 - DNA, 1812 bp, Zea Mays
taatgatcaagtggtcgtgttgtacctatcctagccgtgtttgcaggcctctcaaattgaaccgattgcttcaagggtgccatacatgattgtgttaaccatgagagggattggcctggcactggttcattctacgggaacctcgacttcggtggagaatgtggtgtccctgtccaaactgtgttctacactccaactgaaaaccgtgcaaagttctggtacgcaacagattacgacatgtttagccttctgcattgctcacatggaagaggacttgagacccgggaccgagcagtacagattcatcgagcaatgccacattggcctcatgaagtttcacaatcacagtggtttttacaaggatttcagttcatgggttgggcagaggctttaccttttgcgtcagacagtgctctcctatgcacagaactatcaaaagcaagcaaagatgctctagagtacctgaggaaggctactttgtgctctataaggattgccaggaaagtgccagatttggcagagaacttcatgggcctggatgcatcattgttaaaggagaaacaccatgggtccttatatctgcaattcagctatgcacagaactatgcaaagcaagcaaagatgctctagagtacctgaggaagccctgggcaaggattgatgcttgctagcttcaagattaggaccctaccacttgatgagaacagatagtgctatactgctatgtacatctacatttctccagttatacataatcagatcttgcttctagccaactgttgcaaatacattgatcccttaggggttgagatggaaactgccacaagggagggaggacgtgagtcagctgcacgtgccgacatacacatcacttcctgcctcgctgtccttgatcgagacaaaatcagaagagctgtatctatatgtactccataccttgacgtatgcaggggctagatccataccccggcctatctgccctgtgaggaatgtatacttctgcaagtttgaatactttgacaccttgtgaggagcactctttgaaggtggagaaggtgttgttccaagggaagccagactaccaaaatgttatggttttttagcttctcaatagccggcgacagtgcatacgacctgccccgcgctggggctgtgtctgccttctcctccttcgatgccatgacactgtaaagtgaagccttcgagctaggcgcggaggccagggagatgctatgcgcccacatctaccacgccgccttcatattgctcaagctcgcgctccgcaactcctgccccatctgccgccatgagatgcccaccgatgctgccctgcgggctgccgccagcgtcggcgttgccgaacgcgccgccggggaggaacaagcgtgggatgcgccccacgcgcgcgactttcacctgcctcccaatttgatccgtgagttcaccaggaccagaacttcttcgatgatttgttggaccatccctgctgatacaaacacaatcattttgtggcaggaaatcaccatattagagcttacaaccttcgcatcaactgaagagtttgacactcatgatccaaaggagaacactttgctactcccttacttgaggaaaaggtcaaaaatcattgagatagttgcagcgcgtgatatagtctttgctctatcacagttaggagtatgtgctgcttttagtagcgagacaaatcagagaatatgctttttgaacggaagtctagatgaagttatccgcaatttattttacaacaagaataatgattcattcaaaactgtatcagtatatggttctgaa

SEQ ID NO: 30438 - DNA, 2864 bp, Zea Mays
ggtaaaacaaatccacgtgtcactctccttatttgcttgcgatttgttttgcgccctctcttgcggactcatttattattactaacgctaaccccggcttgtagttgtgattatttttgtaaatttcagtttcgccctattcaccccccctctaggcgactatcagaaggcggcgtcgaggtggatggcacaattctctcggttgccaaggaactgggcctcaagagcgagccaagcctggcgagccgcacccctgtgctcgcggacgatgtcttacagctcgatggtgagagtctcgaggatccaggagaggacgacactgtccatccggaaccaggagaggcgaggcgtggggcggttagtgagaacatggttgtcgagtgcgtagcgctacagggtgagggggaccaaatcccaccagcgagcgtaggcagatgaggtggtgtcggggacgacaggcaccagggaccggatgttctggacaccggcggcctgggcgtggagcttggcgaccaccgaagccacatagtcagggaccctcatcggtggcgggctcgagcggaggaccaccaagaaggagctcgacctcggctagctggcgagcgagagccttcgtagaaacacgctcctactcccaagcgagagccgcaacccgctcacgtgcctgagcgatggccatggacgaatgggcagcagcgacaacaacgacgagggtggaatgcgccacggacatagtcgccggagggggagggtctgaagctgtggatccagtctcgtgaggcccgagtggtggagggaacccgagggagatcggcaccccatcaggagttgcttcaagagtgtcagtcaacgtgacggacggcgacggcagggacgacgcaggtgcccctagagcacccttagtcaaagccaaggaaacagggcccacggccaggggcacccctgacacctggccagaggcctccccacacgcccggcagccccgcaggagacccccccgcgcctggagccgcgcgcctggagccgcgcgcctgcagccgcgatggcagcggggcccgcacctacggctgtgatgggagggggccgatgggcaagggcggggccctagtcgccgtgcgtcctggcaggcgtggtggctggaaggggaaaggaggagcgcgagagaggtgggaaggaggaggggatctcgtcggccatggcaggcggcgccggccacggcagcccactgggggcggcggcgcaggggaggggagaggggagagagaaaaccctagatctataccatattggaggagaataatacaatacaaaaaaacttgacctgcggggggtaagacagcccccgggcattgtattaagaagaagaccttctcacacaggtcaagaaaacccccgaacccctgccccacccatacacagcggcatcgaagcacatgtgagaactaccacgaccagggctgagccttagacctgtgctttggcgtgggacagacgaggggatttttttaaccacagcctgaaattcgctcccacggggagtcgaacccaggacctgaggagtgctactcaggccacctaaccaactcagctagaggccctttcgcgaataatacaatacacaaacagcccatagggcatagtacataaagcccaaggggcaaaatacataaatgctaacactgtctgccttgcaaattagtatgaacacctctcaaaaagatttggcccacactctttttttgcgacaactctagtctctaccattgatgtttagttgttgctttgtaaaaaactcgtccggggagggtaagaccaccctcggggtatttcattaatagaaggccgcggcaacggtcccgaccgagaaacccccgaatcctatcctcccatcactaacgagccgattcaagctgccaactctgtaaaggaccacccagacacgagggtggcgcacagccgagtcgtagcctgaaagcggatgaggaacaacgaggtgattttttttgtgcagggccagggtttgaacccgtgacctggtgaaagggactctgctgccttcaccatgggatattaccccatctgcagctgttgctttgtagtcaatccagtaaataggctgtggccaagtacaaatagagttacatgtttatttgttgttcctaaaatgtatgatacataaactgcatttcagttgggacatataacatcaaagcaattacaatgaagtgtctgttatatagatggtgctaaagagcccacctatgttgaaaagaatttctgatccaatgatataaaatcaaaatgtggtcaagcgcatgcaagatgtaccgtgtgcagcctgacgatataaaatctggcattttattttgatttcttttttttttctaggaacagggagctccagcgcttgtggattatatagaataataaaggtggctgtccgcacagtatagcaaactgcgaagcctgcaactactgaagtttggtctgtagcaggctcagttgggaatgtgtagcagagtatggatggtcatgatccatggtgtggatgagttgcagagtactgtgctgtgctgtgtgtgtagtaggaaggaaaagcttaggtaaagctgccgcctgccgattgtgcagtcagtccagtacgttggtatgcgaccatctcaagtctgggctttgatttgaagcaatgatttttggcaatgaatgaacaagctatctactgtatatacagttatacacacaaacgatttgcactgtttttgtacagttatgtttgcaaggcccaagtctattggccggccacggcctggctgactgatgagcccaagcctggcacacggtccacggcccaaggcccgaactcc

SEQ ID NO: 30439 - DNA, 3552 bp, Zea Mays
gaaaattcctaaaatgaagactggagacccagcaggtacgcggagcgtagcaaattcttcacgacaccccgatcgagactctggagcgcagagacggcagagagcacagtagccaagcgactggagactcatcactggagactggagagcatccggagccagtgctcgcaccaccgctcccgattcccaatcgccttcccgccgccgaaggggcgccgcactgtcccccggcctcgatctctctcgggccagccgtcggccgtggccctgcgcctcctgcgttatctggctggagatccggccggagtgccattcctactctcggtcaataagtattctggaatgtttttccgagctgaaatagatagcttctggagctggatctcagtattctgttagggacatgctccaaccgagggaagctgatttgcctgcactctttcttgtcttcattgtacttcctgtggtagcttattttcttctcgggagatggcatgatgctgcaagtaagaaggcaagggtaagtgtgcttgctcagcgagctgcagaagaagcctatagagaggaaacaatggcgtgcccagacattattctgccagggtcttccttgagaactatgccctatttcagacctatgcctgcattaagacaggaataccatgaatgtgcaacttgccatgcccctgcaaagactcgttgctccagatgcaaggctgttagatattgctctgggaagtgtcaaatagtacactggaggcaaggacataaggaaacatgccaaaagtggcttggtagtggttctagcagctttggtggatctagcactgaggctactgaacagatgccgttcttgactaacttaaattcacctcttccgggtggtgacattcacttgcgtgacttgaacttcgatactttatcagaaccatcctttcccacaactgatggttataatctagatactgatccatttttggcagacagaagcaacatgaataaatcaaatcaaggtattcatatgagcgaaaatggtgctgttggtgtatcttttgaaaagaataattataatgctgatgatgaaatccactcaccggaaaatttatctagaaacaaggtgtcaaacaactattttggttcagatgcaataagtggtaatggggatgcaatttatcctgccaaaagtaatgcacagcagcctagcagctgtgctcctgacatgagaaaacagccaaaagcaagcatcacagtttatcagcctgacataggtgtctatttaacttctgacatggtcagttcttgtgaggggtcatatgcttctgccagtgagccactgcaaaggagcttgtcatctggaagaactattgggaaagcaaacgcggtgaataagaggcctccatacccatcaagtaaggtggtttcagcacaaaagccacaggatagggtgtctacatcatatcaaaatgatggccatgagaagaatccttgcaacaaaaatgaccaaagatctacccccaaatgtgaatcaagtcaatcaacaagcagcaatctacaaaagtttggagcatccaaggttgaagttttaaagaagccttcaaaatttctcaaaaccagccttgtgggattgatcaatgataataagaggaacaaggtattgttcccatatgaagatcttgtcaagttttttcagtatgaagcccggggtatttcccctagaggtcttttcaattgtggaaacagctgctatgctaatgctgttcttcaatgtctcatgtgcacaaagccactgatgatctaccttcttctgagattgcattctaaagattgttcttcaaaaaaatggtgccttatgtgtgaacttgagcaatatgcttcaactttacgtgaaagtggtgggcccttatctccaagtagaattctttctaatctgaggaatattggatgtcgcttgggtggtggaactcaggaagatgctcatgagtttttaaggcatcttgtgatgtctatgcaagcagcttgcttggatgggctgggtggtgagaagcatgttgagccaagtttgcaggaaacaacactgatacaacagatgtttggtggccgtcttaaatccaaggttaagtgcctcagatgttatcacgagtctgaacgatatgagaatataatggatcttactttggagattcacggctgggtagagtccttgcaggatgctttgacacagttcactgcccctgaagatttagatggtgataatatgtataaatgtggaagttgtgctgcctatgttaaagccaggaagcaactgagcgtgcatgaggtgccaaacatattaacagttgttcttaaaagatttcagtcaggaaaatatggcaagatcaacaaatgtgttactttccctgatatgttggacatggttccttttgtgactgggtctggtgacaatccccctctttatttcttgtatgccgtggttgtacatgtggatacagaaaatgcatcattctctgggcactatatatcatatgtcaaagatatgcagggtacatggttgagaattgatgattcagaggtccaggttgtatcagtgaatcaagttatgtcagaaggtgcatatatgcttttctacatgaggtctttcccccgaccaccaagaatatacatcgagaaggggccgactgttccatccgcgaagcgccacacatcaaagtattccaagggctctaaacacgagcgcgagcagacagagttactcctctcggcgaacgatccagcatacggtgtttatgactttagacctgatggcgagggctacacgcaagatcagcaagcagagttgagatccagggatttccatcgcgccgacgatgccttcgcagactcggtcagcgcggacttctcggaggccacgtcaagcgaatggtcgctgtttaccagctccgacgagtcctcattcaccaccgagagcacaagggactcgttcagcgttgtggactacggcgacaacgctggcctggacccaatctcctcgatatttgggccaagctatgctccggagcatcatcccggtccacctggcagtttcgccgcgtgcacgaggctctcgccttccaacccacagacaaggtgaaattttagagcgcggtggagctgctccggttgaagccatcccccgaggcccgaaccagtaaattacgccgaatccggcagtcgtatggccctgcacaccagtgctttgtgaaaagcttgcagattcatcaattgacgtgcacttgccttttatatggacgctgacgtatggaggtgcacactctccacctccgtatatctcgccacctactctgtttatattagaaggttgattgctgacacacaacacctgctcgtacttttttgtcgaaatcatgacggacaacaacgctaaacatatagtacaatcttcttgtcttgctgatctgctatgcccctttgtgaaatctgccggtgacatcagcgatggcgtcttgctgatctcgtggtatacctgatgtttcctcggtctcagcttttatcacgcag

SEQ ID NO: 30440 - DNA, 3182 bp, Zea Mays
gagccagcagagggccagggcagctagtagctgttaatcgcaattagtgcgcgctaatcaaatgctcatctgtcctcccgaccgttgctaccccatatcccccccacaccgccggctccactccactccgatcgactcgcctgagattctcgcagggactagtttgtggcggaatctcaaacccaggaacctgtgaatcctcgacacttgtgaaacatgagaaggttctttttcttcgggtcccctgctgcaaacgctggtgagggagccgggcaaccggtcaatgatagcaggactggacatagaaagacagatgagggaaaggacatctccaccgcgagattgtcgagatccagaagccgtcgtcagaagcggaataaggaggaaccggctaaccccaaacaactcaggaggtccatgtccttctcatccccggccagaagcagctgtgtggaggaacgatgctttagcttctcgggtgatgttccgtgctctttgtacgatgaatctgatgcaccccaccatgccaaagatgtcgctcccgacatgtggtctccagaagggaatccgttctctagagaatatgcaataagaaccccgaaagatcattctgccatggaaaatgattctcctcgttcaaaatactgttcttgctcagcagggcactctcctgttagctctcctgtcgctatacagtgcagatcaacaagactaggcaatttattaaacaggaacgaagtactagatcgttacattgatagagggcatggagatgcaatcgtagatgagaaacagaagcagtgcgtacctacggtttctaatttgggaaggccacctcgaccccactctacagtaccatccataccgagaccattcaaagagacaacggaaagctacccagatgtggacttaaacgacgccttcctttggcgacttgctcaagagggtataggagatacccacaagattacaactatgtgcagtgcatctagacgccacataaacatgtcagatgcttctgaaagagaaagtgcaacaactgttgaagatatttatgaagatttgcaagatgtgagacttccaaatgttatctgcccctccacttgtcctaactcagcggtagaagaaactgatgacatgttgcttcaaagagttaaggaagttgagtcaaggtttactattccttgtggagatgaatatgaatttagcatgctcaggtataaatcatcaacctcaaatgacatgtttcagttgatccagcaattgactgaagataggaaacagttagcatatgaattgtcttcagagatcaaagcacgtgttacagaaagatttgctgccaaagagcaatacaaacaattaaagaaagaattggacaacagaactagaaggctggagaaggagaagagtgaagtacaaactacactggaaggagagatggatagaaggtcagatgattggtctatcaggctatcaagatttcaatctgaagaagagagactacatgaacgggtgagagaacttgcagagcagaatgtgtcatttcagagagaagttacttctcttggagcaactaaggctgaagctttaatgaaagctgcgagtttggaaacgcaaaatagcaaactaaatgacgatctagagaaactaaaaaatgagcatgagaaactgcattattcctcaacagatttgcaggctcgctttgctgagattgtagaggaaagggaccacatccgagaatatttgaaggccaaggagggagagaacaaagcattgcacaaagtaattgcaagactacaaacaacatgtaatgagcaggaaagaacaatcacaggcatgagacaaggatgcatagacgaattaggtaggaaatttgttgagtacagcaccaatgataaaacgagaaaattacaaatggaacttattagactgactggggtggagcaaaagttgagaggtgaaattcgatcttgtaatcttgaagtaaaatctctcagacaagagaacattgcactcttaaatcgtttacaaggtgctggaaatggagcaagcttctcctcgattcgacttgatcaggagcttcaagctagggtggacaacctgcaaatgcaaggcttgtcactacttgataagattagccaactttgtaccaaattgctggatctgatgaaacataagagacatgaaaatgaatatttgtgtggcaatgatgtgtcaacattcagtgattacatatttgagtaccagagcatcaaaggaggaattgaaggtctgaagctaagtttgaaagcaataaattctatactagctgaaaagcaaaatgctaaagaaaaatctggtgaaattgtagctgaaggtagtccttccaaagatcaaacggatgattttggactcaagctgaaagaagaggctatgctgaatagagtactgaaggaggcagtcttgtcaaaagaagttgccattgaacaattgcaatctgatctggcatcttcacttcgcatccaagacgttatgagaaacgagatccagagggttcaggatgagctttcttgcataacccacaaagctaagcagttggagcttcaggtatccaagaaggatgagtcaatcgatgagatccaacaggatttccaggaatctgcaaaggagctggctgctcttcgtggaacactgaaaacagtgacggaggagagggacctgtcgtggcaggaggcgaagcagctgagacgaaacatcagcatcatgcaggacgaggttgtatcgctgaagaagaagatcgaagccctggacgaagacatacttgtgaaggaggggcagatcacaatattgcaggacagcatcgacaagccgttcgacatcatctgcagcccaagatcgatgagggagttcgatatggcgtgaagacggctgctgttttgtagcgtatgcatgaaggattttttgcatcaagggcaagatgcatggagtataatgtgttggaagttgacagtagacccaacaacacattgcattctggtcaattgtttctgtctggtgggacagcacaagcgaagacagatgtattagcactttgtggatctcaagtaaaagaggcctgctgttggaaggtcaggaagaaggtggagattttgagtcagaccatcaacgcgtatgtgttttagcgatattcagtttttgttctg

SEQ ID NO: 30441 - DNA, 654 bp, Zea Mays
gttactcgtgagacggcggcagctgtttgttgcgatttctgacttgtagcaaacaatgtgatcattgaggaggtgaacaagggcctgaacccaggaatggtggttctgcttgtggttgcaagcttcctgctgctcttctttgtggggaactatgcgatgtatgtgtatgcgcagaagacgctcccgccaaagaagaagaagccggtgtcgaagaagaagctgaagagggaaaagctgaagcagggggtctctgcgccgggagagtaaacggccatgctgccgatcctcccgtccagagctcctattcacatgattattaaagaaaaaaatttatatatatataccagctggagccgtagtgttggagtaactttgttctgtagatgctctgtctttaatggtacatctgtattggagactttaatggcctgagccgagctagtatgcttcctgtttcgtacaagttcttgaaatgctggtgatggcgcatggctctagagaaaaactcaagggagctgagccagcgaaacatgatctacctctacctctagagttaccaactatatgcagttttaagagctgcagtagtattatttttggagtaactcttatgttactttgaaatccttaaaaaacaaacaatttagacatgga

SEQ ID NO: 30442 - DNA, 2718 bp, Zea Mays
cctatatacaaaaagatcaccactactgtactacggcaccccttcctcccccgctcccccacctccgctcccgaaaccctcgccgccgccgccgccgccgccgacgccgaaatcctcgtcgcggcggcgatcactgctcccctctatgatagcggcgcgtgagggcggcggagcgcggcctgtcgctccccggtccgcgtgcccggggcggctctgagagcccagagctcgtctcggttccctgccaagcgcagccgagcaccgcgccggcgccgcgtggcagttcaggccgtagtctgggcgctgttctgctctgggtctactggagtgcgtttgggattttttcggttcctactacattcgggggcgctgggatggattctgttccagggaaggagaacaacggcattgcccctaacctcaatggggtcgtgtctccagcgaagcagcagctggaggggaaggaagcgatgcggtatgcaaacatcctccggtcgcgcaataagtttgctgacgcgatcaacctgtacaccattgttctcgagaaggatggcaccaatgtggaggcccttatcgggaaagggatttgcctccaggcgcagaacctaccaagacaggccattgagtgctttacagaagctgtcaaaatcgagccaggaaatgcgtctgctcttacacattgtgggatgatttacaaagatgagggtcacttggttgaagcagctgaggcatatcaaaaagctaggatggctgatccttcctacaaacctgcttcggaatttcttgctattgtgttgactgatcttggaactagcttgaagcttgcgggtaatacagaggaggggattcaaaaatattgtgaagctctggaagtagacaaccactatgcgccggcttactacaaccttggagttgtttattcggagatgatgcaatttgatatggctcttagttgttacgagaaagctgcactggagagaccattgtatgctgaggcctattgcaacatgggagttatctataagaatcggggagatctagatgcagcaattatctgctacgagaggtgcttgaccatttctcccaactttgagattgctaagaataatatggcaatagcactaactgacttgggaacaaaggtaaaaattgaaggtgacatcaatagaggtgtagcatattacaagaaagctctatactacaattggcactatgctgatgccatgtataatcttggcgttgcatatggtgaaatgttgaattttgagatggcaattgtcttttacgagcttgcgctgcacttcaatcctcgctgtgcggaagcatgcaacaatttaggagtcatatacaaagacagggataaccttgacaaagctgttgaatgttatcaaatggcactgtcaattaagccacttttcgctcagtcgctaaataaccttggagttgtctatactgttcaaggtaagatggattctgctgctagcatgattgagaaggctatacatgcaaatcccacatatgctgaagcatataataatctaggtgttctttacagagacgctggtagtattactttagcaattcatgcttacgagagatgccttcagatcgatcctgattcacgaaatgctggccagaaccgtttgcttgcaatgaactatattgacgagggctcagatgacaagctttatgaagctcacagggagtggggaaaacgctttatgaaattgtatccacaatatacaagttgggataactcaaaagttgctgaccgcccattgatcatcggttatttgtctcctgattactttactcattccgtgtcctacttcattgaagctccccttacacaccatgattccacagtttgcaaggtggttgtctactccggtgttgtgaaggcagatgccaagacacttagattcaaggataaggtgttgaaaaagggtgggttgtggagagatatatatggtattgatgaaaagagggttgctagcttggtaagggaggataaagtggacatacttgtggaacttactggtcacacagcaaataataagttagggacaatggcatgccgacctgctcctattcaggttacctggattggctaccccaacacaacaggtttgccaacaatagactaccgaatctcagactcattgactgatccacctatgacaaagcaaaagcatgttgaggagttggtgcgccttcctgaaagctttctttgttatactccttccccagaagctggtcctgtttgtccaacaccagcaatttcaaatggtttcgtcacttttgggagctttaacaatctagcaaagattacaccgaaagtgttgcaagtttgggccagaatattatgttcagtccctaactccaggcttgtggttaagtgcaagccattctgctgtgagaacataaggcagaaatttttggccacactggaggagttgggtttggagtcattacgggttgatctgttgccactcatccatctgaatcatgatcacatgcaggcgtattctttgatggacatcagcctggatacatttccctatgctggtactacgactacatgtgaatctttatacatgggggttccatgtgttacaatggctggtgctgttcatgctcataacgttggtgtcagcttgctcagcaaagtcgggttggggaggctggttgccaaaactgaggatgagtatggagcaa

SEQ ID NO: 30443 - DNA, 3850 bp, Zea Mays
agccggccccactccgcagcctctctgctgctggtgggccagcgttacggcgcgcaaacctccgcctctcccctcccctgtcccctccaatcctccattctccggccaccctcgcttctccgtccctcggcaatccgcttgtcccccgttgcccgctccgttcagaagcgcctcgccgctgaccggtcgtgacccgcctcgcacctccgccttctccgtccctcgcggccgcggctgccgccgaatggaagccgcctcatgctgccgcgtcttctccacgcagcggtgccgcttcccgctccgcaggctgtcggcgccgccgtggccgcagccgttctgcaccgagtccagcggcggcctcgtcaccccgtcggcctccaagcggaggtccaggggccccgtcatggccgcgaagaaggccgcggagggcgaaaaacaagaagatggaaaatacaagcacactgtggatctcccgaaaacaacatttgggctgagagcgaattctgtacagcgggagccagagctccaaaaattatgggacgataatcaggttctgaaaagggtttctgaaaggaacactgggactgcttttgttctccacgatggccctccctatgctaatggtgatcttcacatgggccatgcgctcaataaaatcctcaaggattttataaatcgctacaagctgcttcagaatcataaagtgtcctttgttcctggttgggattgccacggccttccaatagaactaaaagttttgaagtcaatggataaggaaactttgagtgctcttacacccataaaattaagacaaaaagctgcaaaatttgctaaagcaacagtcgatgcacaaatgaaatctttcaagcggtatggtgtatgggccgattgggacaacccttacctaactctgtcaccggaatacgaagctgctcagttggaagtgtttgggcaaatggttatgaaaggatatatctatagaggacgaaagcctgtccattggagtccatcatcacgtacggctttggcagaagctgaactggagtattccgaaaatcacatttccagaagcatatatgccgcattcaagattactaatccatctaaatctgggatgctagacgatttttttccaaatgtatctttggtcatatggaccaccactccatggacaattccggctaatgctgctgttgctgtgaacccaaagcttatttatgcagtagctgaggtacagtctgtatttgaaagtgagtcaacatccggtggtaaacaaagaaaagttggaaatatattgagttctgagaaaggaaaactgttcgttattgtggcttctgatcttatcacaactcttgagtccaaatggggtgtgaagcttgtagtacacaaatcatttcccggatctgccttggagcactgcaggtatgcccatcctgtgaatagcaacgaatgttccgtcattctaggaggagattacattacaactgaatcgggcactggccttgttcatactgcccctggccatggccaggaagactacataacaggtttgaagtatgggcttcctatcatttctcctgtggacgatgaagggaacttcacggctgaagctggacagttcggtggtttgtctgtcctgggggctggcaatgctgcagttgtgaagtatctggatgaacagtattcactcattttagaggaaccatacaaacacaagtacccctatgactggagatctaaagaaccaactatattccgagcaactgagcagtggtttgcatctgtggatggttttcgtgatgctgcaatggatgcaatcagacgagtaacttgggttccttctcaggcacaaaacaggattgttgccatgacctctagccgttctgattggtgtatttcacggcagagaacttggggtgtccctattccagttttttaccatgtggactcacaggaacctcttataactgaagaaacgattgaacacatcaaggctattgtgttgaagaaaggtagcgatgcatggtggtatatgacaactgaggaacttcttccagatagatatcgggacaaagcatctgaatatcgcaagggaactgatacaatggatgtttggtttgactctggctcttcatgggcagctgttttagcaaaaagggacggtcttaattttcctgcggatatttatcttgaaggttcagatcaacatcgtggatggttccagagctcattgttgactagcattgctacaacagggaaggctccctactccagtgttattacacatggatttgtactggatgaaaagggtttcaaaatgagtaaatcaattggtaatgtagtggacccagagaaaatcattgttggtggcaaaaaccatagggaagaacctggctatggagcagatgttctccgtctatgggtttctagtgttgattacactacagatgtgttgattggcccacaaatcttgcgccagatgtctgacatgtatagaaaactacgaggcacgatgcgatttcttttgtcgaatctccatgattggaagccggataattctgtgccgtacaatgatctgccaaaaatcgacaagtatgcacttttccatttggagactgtcatgacttccatgaaggatagttatgaaagttatcaattctataaagtataccagatccttcaaagatttgctactgttggtttgtccaatttctatttggatgttgcaaaggatcgcctttatgttggaggccgagtcagcttcacaaggaaaagttgtcagactgtgctcatggcacatctgctctaccttgttagggccatttccccgattatgcctcacctagctgaggatgtctggcagaacctaccctttcaatacaccttgcaggatggatcccttgcaaactttgtttttgatctgaaatggccagaaaagaatgaagaatggctctcggccccgaaggatgatgttgatttcctgggtgttatcctggagttgaggtcagaggtcaacaaaattttggagaatgctcgcactggaaagttgattggttctagcttagatgcaaaggtttatctccataccgaaagttcagatacggtattaaagctaaaggagctatcttctgcatccaatgatgcagacgctctgcatcgcctgtttatcacatctcaggtcgatattcttccaatcctaaatgaagagattacatcatctgtaccatacacaggaaagttcagtaacccacgcactggagtcatatggattggtgtgactcgtgcggatggtgcaaaatgtgagaggtgttggaattacacacaggacgttggatctttccatgaccatcctactctctgcgttcggtgctatggtgtcattgagttgcagacacaacctgcggccgcagctgtcagttgaaaggagtgatgttaacgtatcctatcgaaccatctaattttgaggatcattggtggaattcattcttttggagagctttcacgctaccatgtggcggtagcctgggactccagcttgaatcaagttttgcatgcagcaagctgtactttagattcttcatacataggtcacgagagttgtttggagcttgggtcatcgcttactttcccatactactggggggcttatttggaacagttttttacacaaaactcctgacctgtaaatcaattttggaaaaccgtatccggtggtcgatccatgtattaatagagtaataatgttactatgttcatccaaatctcaaagacgtgatggttgtgttgaaaaaacagcttgaatcacttgcttatgctcaactgttttttcttcatgtacatagacaaactg

SEQ ID NO: 30444 - DNA, 3587 bp, Zea Mays
cggaacgccaaaggaggcgggaagcggcaaaacccagcaggccagcaccagcaccagcaccagcaccgtgccgcccctgggccggccagccgccagcgcgacatcgagcgagcaatggaggtcggcggcgacctgcagtccctcctagaggcgatcaaatcctccgaggtgcttgaagatagaattgggctcatcaaccgactcgagagttcctttgagtattctgcggatgatctgagaccagtacttgacagtcttaatgtatcttgggatgattctggatgttcaggtctgtcgcactgcatgctacacaagtcaattttgcaggttgctctaaaatgttcatatatagaaacaactggttgtctaggccaatttcttgcacttggtgcaaaggcgagctcatggtgtcgaaagcatatcgtatgttccatcgaatctgttgatgattctgaagatgtccaacaggaagaacactccaaaatactcccagagttctttggttctagataattttgatggccttaaatatatcaatcaagattcttccttctgcggcaaaatgtgttactgtagatatggtgcataatattggtgattttatctcagagttgctaagtcttatggaaagctcaatagttgacaatgacaagaaaattcatggagctgctctggatatcactaaggctgcacctgtttttctagatgaaacaactaagctgtgccgggcatactctgaggccacaaaagtagacaactgcacaatgagtataactgatgaagatgctactgtgaaacacaacaaacaaggtcttgctagtgatgtcatcaggattacatcatccactattcagactatgtgtagattgggaacctatgcagcatccagtggtggaagccaggtgattttactgaatgtatcatggaagggtgtagtctcattactccaaagcggtaaagggatgattgaaggaaaagtaaatgtcagagaaataattgtaacccttctatctctgtccatagaatctctaagagttgctgctgaaacatggtgtgcaccgttactagaaacccttggtgctactgaagccagaagggcgttcctaccaatcaagtttttcttaataaatgctgtaaggatttgttcaacatatccatctgaagcaatgattatatacaagaacataatcaattgtgcagtagtgatcacatcctcaagcattctatttagcaagaagccacagttgaaggcagcaaatgagacccttgttgaattgttggagcctactttatttgttttactagatacacttatgaaatcatctgacttaacaccagaatccaaatgccagcttgcacatcatttttttgaaaacgaagaagataagagtccagatcttatgggacaagctaatcagagagagataaatttggcctcactggattgcattttctctatggattcagatgtggatcatagaaatagagcacttttacctgctgagttgcttgtgtttttgcactttctcaatgcttcatcatggttgacagaaatggtggtcatcacattatctaaaaagctacagactcttcttaatatattgacatcagaagacatctactcctatgtccttggcttccaaatccctgccttaaatggcgcagaccagtctcctgcagttgtttggcaacctgtgtatacttctatcatacaagcattgaaggcttttatgatttctactgttgcttcaagtgctgcttggaacgagttagaggctttcttacttgaaaatattttccatccccatttcctttgcttggaaattattacagagctgtggtgtttcttcattcgttatgctgaaactgagacttcaattaatctagttaatcaagtctcccttctactaaagactgttgcatcaccagaggatgttctttcacctctcagtgctttgcggaaagttgcacgatcattgtgcatcatcttgagctatgcatcttctgcaactgttgatcaaatatatacttgtgtgctgaatggtgaaaactcttccaagtcttcaatcttacacttagcattgctgatggaaggatttcctttggattcattgtctgatggtacaaaggaacttgctatgaagaaaatgtttacctcttttgctggctatctggagagctactccaagaaccaccgagtaatcaatgtgccaacttgtaaattgggtgttgtaggacttcctatacatgctctagcctctgcattgcagcataggtaagtctgttctctaattaccagtattgttcactctgatgatgatgatggctgtcttatacacagtactttttttggcagtgtaataaatgttgatagtattgtagatgagaatagcatcactgctatgtttaagttcaccatctctctcataaagatgtttagaattgcgccagatagtagtaaggataaccttgccaagcacattagttccatgttggttattatctcaaacacgaggcatctttgtgcattcagtgagatggagaagttgactctgcagttgcgcacgctgttcgtttccacttctgataaatcaaatgctgtgctgtctcagtgcaaaccgtcaatggcttcctttatgtcaactctcggtcacttgaacgttaccgaagacgatgctaacgaactttgttctgcaatatgggatctgtatcatctcctgctgaaggaacggcactgggcgctcattcacctcgcaatggattcctttggctacttcgccgcccgcacatcctttacgcagctctggagatttgttcccagagatgctgccctttcgtacaatgcaagcacagggacgagcatagatgaaaacggattcatgctggagttgagggcttatcttcagaaagaggtcgccttgcacaccgataaatggtctgaagagcagattcggctcctggtttctgaggggagagcgctgaagaagctggttgaagcttgttgtgaaattccggttgttgctgagcctgagaaggcgccggttgcgaaggatgccagcacgaagaagaggaagatgccagatgggatctgtgaaggcatggcgatgctgcagaacggtctcaaggtcatgcgaggcgcctttggtgaaggggacttcgctgatctgaaggataggtttgctgcacacttgtctcgcctcgaggatgcagtttcccagtttgctagtttatccgacgaaatttgatatagtgcactgtatgtcgcgctgttacctttaactgcaaaagagcattcattctagtacagttcacgatcatagcacagctgatctctctcgtggcaagcaagctccagagtcatcgggttgacagatcgttcaacatggccagcacaacttcaaggtttgcaggtcatctccgcgccggcgcttgcgtggcgacggcccttgtggcttgttggcttgtggggcgaaaatgcaagaaaatggatgtgaattatcttttgtataataaccacacgacatcatgtactgctttaatttaacaattggtagtacaccctgcagacgaggcgaatacaatttttg

SEQ ID NO: 30445 - DNA, 1619 bp, Zea Mays
gagggagagaagagagcgcgcgcgcgagctgagggaatggatgtggagatgagctgcgcggcgccggaggcggcggccgtccccgtcgactggcgcggccgcccgtgccggccgcggcggcacggcggcatgcgcgccgccgtcttcgtcctaggcgtccaggcgttcgagatcatggcgatagcggcggtggggaacaacctcatcacctacgtgttcggggagatgcacttcccgctgtcgcaggcggccaacgtggtgaccaacttcgtcggcaccatcttcctcctcgccctcctcggcggcttcctctccgactcctacctcggctgcttctggaccatgctcatcttcggcttcgtcgagctctcggttttcgtcgctgccttcaccaaaaggaagcaagtctgcccttccagctccaattctgtcaacgccggggcttgcgagccggcgcgcctcgccggcaacttccgccacaacaacaaattcaggttcctggacaaggcatgcgtcccggcagcgccgcaggggccgaacacgaagcccggagaagcgcgtggcggctgtgcacggtggccgaggtgcagcaggcaaagacgctcctcgccgtgacgcccatcttcgcgtgcaccatcgtcttcaacaccgtgctcgcgcagctgcagacgttctcggtgcagcagggcagcgccatggacacggcgctcccgccgggctcgggctcgttccgcatcccgcccgcgtcgctgcaggccatcccgtacgccctgctgctggcgctcgtcccggcctacgagctcctcctcgtcccgctcatgaagcgcctcacgggcacccggtccgggatcaccccgctccagcgcatcggcgtcggcctcgccaccctcgcgttctcgatggtcgcggcggccgacgtcgagcgcaggcgccgggacgccgccgcggagggccgccagatgtccgtcctgtggatcgtgccgcagttcctcgtcttcggcgtgtcggagatgttcaccgccgtggggctcatcgagttcttctacaagcaggcgtgcgccggcatgcaggccttcctcacggcgctcacgtactgttcctacgcgttcgggttctacctcagctcggtgctcgtctcgctggtcaacagggtcacggcgaggcacggtggcgctgggtggctcggagacaacaacctcaacaaggataggctggacctcttctactggatgctcgccgtgctcagcgtgctcaacttctgctgctacctgctctgtgccaggtggtacaatgctggcgcacagggttccgatgcagctgcctctggtctggtggcatctgaggttgatgatcgcaaggagatcatctgaacaactcaggaagagattgaaactgtatatgtctaattccatctatagactatagctgtatgtatacatgcatgcatgagaaatagtgaccagaaaatgagcactaggataaaattaagacctctcatttggatcaataggatgtatagtgttttaggcaacttttttaacggagaaaacctctttctattacgaattaagtagaggttcaacataatctccacgtcgattctcacgtcacgagacgag

SEQ ID NO: 30446 - DNA, 2919 bp, Zea Mays
agagagggagggagtagaaaactcttgcaaagaaacctgcaactctgcaagcaaccccacaaggcagccgttctccactctccatctcgaggatcaaaagttcaaaacaacagagaccgaaactcgccatccaccagacagaaaaagcttccagctcccctcgccgaaactcgccgccgtctcctcgccttctgcctcgccaccggtcccgtcgcggtttcacacgcatccgtcgctaggttgccggctgcccccggtcgtccctccttcgccgtcgagctggaggacacgcgtagcaacgccgggttcttctgcggcgagctgtggtgtggcctcatggagcccaagggcgagttggctcagaagcgtatccttccttctcgtttcgctcacccgtacgctattgaagaagcaatcaacagcttggaaattgatgctagcacgaaggcaagcaatgtcaacttgcctgctaagaaagacgcaagttcttcagatgcagtatcttgcatttcctccggcgatgcagctagtactgccaaggaaagtgaaatgaaccgagaaacttcttttggggaccaagggatgtattactatgggtattattatcctggttcatacggaggatgggatgagaatggctactttgttggatataatggcgtagaggtgcacccagcagtggttcaaactgacaatggttcatatctgtgtcatcttccgggatatgaaaatggatatgcttcttatagtcaggttgttcctggaggcattgctagtgtggatggtcaatatgtcagcaaagaaccatattattccactgcacttccaattcaggatcctaggacacctggcatttttgctcagccaattgcttacagaactgaactagcatctgcatactcatgggacccttctttcgttcttctggatggggttcagggacatccagttggtgtgcatcaaacaaattatgctgcaagaccaaaatattcttttaataagcatgttattccttcttcgaaagccacccgcagtgcaaaatccgcagcagatactgtcaaaggctcatcatcagctctagaaactgtaacaaatgctgtcaatagcagcccaccatcaaagagtgcaaataagacacctggtgcttccataacaaaaggatatcttccatatagcaagtctgtgatgcacactaataaccaagaaaaaaacagtgtttatcaaagcaaaggcatcaatgtgaaagaaagtggcagaagctggaacagccgagagaagcttgggagaagtaagctaaatggacagggtgattctgaatctaatgagaacaaccataccgataacctgaaacatagtttgagccatcggtctgatgttgttggattgtcaagtgcaggggatgccaatgctagcataccttcacctgttgcaataagcaaaaatgcatgcaatctttcagatttcgttacaaagtatgaacaagctctattctttgtaattaagtcctacagtgaagatgatattcacaagagtgttaagtacaatgtctgggcaagtactcctaatggaaataaaaggcttgacaatgcctatagggttgcacaggaaaggatagcagaaaaaggaaccaaatgtcctgttttccttttcttctcagttaatgcaagtggtcagttctgtggcgtggctgagatggttggtccagtagatttcaacaggaacatgaacttctggcaacaggacaagtggaatggtttcttctcggtaaaatggcacattatcaaggatgttcccaatccacaatttcgccatataattttggagaataatgagaataaacctgtgacaaacagcagggacacacaagaggtcaatttttcacaaggtacagagatgttgaacattttcaagaacttcacatgtaaaacatcaatactggatgactttgacttctatgaaaatcggcagaaagtaatgcaggacagaagaggcaagctgcttactacatcgtttgatcacccattgccaaaagctgaaaaatctccagaaattaaaagccaaacacaattgataagtggcccagaagttggtagagccaagagtgatgaggggcagggcaacaatgttgggatggtacttgatacaaccaagaaaaatgaggagcagagcagcaatgttccagaaatactcgatgcagcctgtagtaacaaggagcaacccaacaaaattgcaatagaaggatgatgcctcggctagttggtctgggaaaacgagatagcctctggaactgacttcaacctgaaatgataagtttgatgtgtgcaatatcaagaaaccaccattggtcatgggttctcttccattatctcatggaagcggggaaagggaaaaaatgaagcaaaggagctgtcttcccacgagaattgttcgatgactgggaaaaaaggttctaggactcatttaggttgaggaccctagtgctaaggcattagagcgccctccatgtctattttttccccatcttggagggtcctttcttttgtcgtgttgtgtctttttttctcttctttttttctattatactgcggctgatgtccaaagaagccagtctgccttatgggtgggtgtgctttaagggaatgtttgttgctttgtgggttgtcctctaggatgtggtatgttttgtttgttttctttaatctgtgcacttgttctagagactgacatagaagaaaagagaaaaaaagattgtgagggattaggaattaattacagtaacattatcttatgtctctgtttcttccattatcaagaaaagggaacaaaaaggattttaaaagctgttgatgtgtacttcgccgataccatttgtcttgcagcctgctacgagccttccgttttcgcttggttctttccggc

SEQ ID NO: 30447 - DNA, 3923 bp, Zea Mays
tcatccttttcacttggggactgccctcttgcttctccctttccttcacttcacctcgaaatccaaggaaagccaaccaacaaacacagtgagtggagcacgagcgcgctgagtggagcaagagagttggagcttggagcccctccagtgctaagctagggttccatccccaccagcgccgcccgctccctttctccgtccgcatccggctgccatggtgaggaagaaaaggactggccctggagagagttctggggagacttctggagcgcctggtcagggctcctcacagcgtcctcaggcaacacaacagggtgcccgaggtggaggacaacaccaggtgcgtggtggatatccgggccatggagtgccgccttcagagcacccaggtggtgggccgcctgagtatcaaccacgtggctatcagggacgtggcgttccacctttacttcctggtggtgggccgcctgagcctcaaccgcgtggctaccagggacatggtggataccagggccgtggcgggccaccttcacagcatcctggtggtgggccatcacctgggtctcagcctcgtggctaccagggacgtggtggtctgcgtcccagagggggagtgccgcagccataccgtggcgggcatgtgggaggtagtgttggaccaattgttccttcaggtccgtctagaccagttcccgagctgcaccaagccccagatgtccaacatcaagcccctgtggtggcagcaccatcaccaccgggagctggctcgtcctcgcagcctgggatggccgaggtgagcactggacaagtccagcaacttgtgattcatgaccaaagttcagccagccaagttagtcaggtagcaccagcatcaagcaaagctgttagattcccattgcgccctggcaagggtacgcatgggtccaggtgcatcgtgaaggcaaatcatttctttgctgagctgcctgataaagacctccaccaatacgatgtatcaataacacctgtggttccttcacgtggtgtcaatcgtgctgtcatgaaagagcttgtaaaccttcatagacactcccatttggatgggcgtctgcctgcatatgatggaaggaagagtctttatacagctggagcattgccatttacttcgaagacattcgaaattactctgcaagatgaagaaaacagtcttggtggaggacaaagacaccaaaggggccagagggtctttcaggtggtgatcaaatttgctgctcgcgctgatctccaccatttggctatgtttctagctgggaggcaaccagatgctcctcaagaggctattcaagtacttgacattgtactacgtgaatttcctactgccaggtattgtcctgttggtagatcattttattctcccaatttagggagacgccagcaacttggtgaaggtttggaaacttggcgtggtttctatcaaagcataaggcccacacagatgggtctttctctgaatattgatatgtcctctactgcatttattgagcccctccctgtgattgattttgttgctcagcttcttgacagagatatctcagttagaccattgtctgattctgatcgtgtgaagattaaaaaagccctacgaggtgtgaaagtcgaggtcacacaccgtggaaacatgcgtaggaagtatcggatatctggcctcacttcacaagcaacaagggagttatcattccctattgatgatcgtggtactgttaagactgtggtgcaatacttcctggagacttatggctttaatattcagcacaccactttaccttgtttgcaagtgggcaatcagcaaagaataaattatctgcctatggaggtctgtaagatagttgagggacagcgttactcaaaacgactcaatgagaaacagatcactgctctactgaaggtgacttgccagcgtccccaagagcgtgagaaagccatcttgcagactgtgcatcacaatgcctactccgaggatccttatgcccaggaatttggtataaagattgatgagcgtcttgcatccgttgaagctcgtgttctgcctcctccaaggctgaaataccatgatagtggcagagagagggatgtattgccaagagttgggcagtggaatatgatgaataagaaaatggtcaatggtggtagagttagcagctgggcatgcattaacttctcacgaaatgtgcaagatggtgctgctaggagtttctgtcatgatctcgctttgatgtgccaagtatcaggaatggattttgcacttgaacctgtgctgccccctgtctatgcgaggcctgaacatgttgaaagagcactaaagagactttatcaagatgccatgagcatactcaggcctcagggccgagagcttgacttgctgatggggatcttaaaaggatatgtgagactgatcttggattggtctcccaatgctgtctgactaaacatgttttcaaggcgaacaagcatcagtatcttgcaaatgttgccctgaaaataaatgttaaggttgggggaaggaatactgtacttgttgatgctttggcaaggagaatcccccttgtcagtgacgtagctactattatctttggtgctgatgtgacccatccccatcctggggaagattctagtccttccattgcagctgtggttgcttctcaagactggcctgaggttacgaagtatgcaggattagtgagtgctcaaacccatcgccaagaattgatacaggatcttttcaacgtacggcaagatccccaaaggggggctgtctctggtggcatgattagggaacttctcatttctttctggagggcgactggacaaaaacccaagaggatcatattctacagggatggtgtcagtgagggacagttctaccaagttctgttgtacgaacttgatgccattagaaaggcctgtgcatcattggagtctgattaccagcctccagttacctttgtcgtggtccagaagcgtcatcacaccaggttgtttgttaataatcacaatgatcagcgtgctgccgatagaagtggcaacatactgccgggcactgtggtggactcgaagatttgccatccaaccgagtttgatttctacctgtgcagccatgctggcattcagggaacaagccgtcctgcccattatcatgttctgtgggatgagaacaaatttacggctgatgggttgcaaactctcaccaacaacttgtgttacacgtatgccaggtgcacacgctcagtatcaatcgttcctcctgcatactatgctcatctggcagccttccgagctcggttttacatggagccagatacaagtgacagcggatctgtggcgagcggtgctacgacaagccgtggccctccaccaggggcgcgcaacaccagggctggtgctgcgaatgttgctgtgaggccattacctgctctcaaggaaaacgtgaagcgcgtcatgttctactgctaagattgacgctgcgctgatgctgtgagcaagcaattatcgttatggtggtgatgctaggacaccgttatgcaccggtaactttaataccttttgtactgtaactacttgtatggcattggaaactgtttgcgatatactcctattaagatgggcttgtcgtggattagattgcactattggaagccatcaatccagttctcatctgaaaattatgtaggtacgtacggtattacaacctctctctatctccctcccaatacagtacagaaaggacgcaattcttgatttcagatagacagtatctgttaggcaggtacttgttgcttgactgttcttcatatagatcgttggtaaagtatcggttacaatcctgagtatgtcacggagaatcaaggagatgtaggtcattaaatcaacgagattgctactggaaa

SEQ ID NO: 30448 - DNA, 2398 bp, Zea Mays
ccttcgccagttcaccccccacagaccacaactgtcgcgtcgccggctcgccgctcgccctatcccccaccgccaccggccacgcttccgtactgagccgctgagggggccagtcaggcgcgccgaccgccgaaactgccatgaagctgacctgcttgtccgccgccgccggcggcggcggcggctaccactcgccagcgagccatctcctggagctggagggggtccgcttcctcctcgactgccccatcgacctctccgctctcgcggccttcgcgccggtgcccctcgccggtgacgcaggaggtctcatccgcgcggtgccgcgctactggttgccagcggccgtgaaagaaggcggcgtggacgccgtgctcgtgtcttccgctacggggatgctcggactccccttcctcaccgggctccccggattcaccaacacgaaggtatatgtgacagaggtagcagcaaggatcggaaagccaatgatggaggagctggtggagatgcatcgtgagtttgtgaggtccgctatggaatcacaatcctgctgggtcctggcttgcacatctgtggcttctcttccagtcttcccgcagggcaatctatatgtctgaaagcttgagataaatccaggaaacgttgaagaatgcatgcacaaagtacagtctgttaaatatggagaggaggtttgcttcaatggcatatttatgctgaaagcttctagttcaggccttgaacttggcaattctacctggacaatacaaagtccaagagctagcattacctacctaccaagttcagtatttgtgtcggctcatgcattagattttgattacagctctctgaaggaaaatgatgtgattttgttttcggatttctcatccttgaatgacacggacgaggataatgagaaactgaatgagcattcaatggatgaaacggactcttctctatgtcgctactcagtgtttagggatgacggcgctgatgcagatgaaagggtgccattcgtgtgcaacaatgatgatatcacagaggagattgagagaatcagctttatatgctcatgtatttttggtgcagtaaaatctggaggctctgttctaataccaattggccgccttggtgttattcttttacttttggagcttatatcagaaatgctacattcttccagcctgaaggtgcccatatttgtgatttctgaaacagcagaagaaatatttgcttttaccaataccttgcctgaatggctatgcaagtcacgtcaagaaaagttattcgctggtgaagcattgtttggccatgtcgagcttttgaaggagggcaaattatttttgttcccgcatctacattcaaagggtttgctggcagcatggaaggagccttgtattgtgctatgtccacactggagccttagactcggcccagctgttcatttgcttcgtcgctggcatgcagacaaacggtgccttcttgttgtggagcaaggaaatggtgctgagttgagtcttaagcctttcatgcccttggcaattcaagtccttgagtgttctttcctttcgggcgtaagggcggggaaaattgatccattactgggagtgctcaaaccgaagtttgttatgcttccagaaggtcttaagtcgcggtgttcaataaagggggtgccatggtcattcttgtattactccaagggcaagaccatcgagctctcaaatttacgtgaagatattgaggtgcatcttgcaactgatgttgccttccgattgcagcctagacaactgaacgaaaccactgcagtggcgagattgagaacaaagctgcttgtaagcaatggacggtaccagctggcctctgcagaaaagcaaccagatcaatcaaagcgtcacttgctacactgtagcactattgaccctggtcgcttgctgtcagctttgcgagagaaggggatggtatgttcatttgctgcagatgatagccccactgctagtgaatcctcagttctggtcactagtcctggagatgctttggtgaggataacgcccgacacgactgttatatactgcgacgacgagagaacatccaatcaaatttatgatgcgcttagcagtgtttgtaaagggatctgactgcatcatgtgtaattgttgttcgttatggggtgtttggtttttagggactaatttttagtactccattttaatctataaattgctaaatgcggaaaataaaacttttatttttcgtacttggtaatttatgaactaaaataaaataggggactaaaaattagcctctagaaaccaaacattcccgaagttgtgcgtgtgcgttaaattgtgaattgccatgtggtggtttagtggttgaaaaaaggttaagttttttcttccag

SEQ ID NO: 30449 - DNA, 5723 bp, Zea Mays
atcttcgacaggggtggtccatgcgtttgagctaaacgatacaggactggctgtagcggactcctgcagcttgagccgaaaaaatggtgtctgccggctaaatccactgtcctcttgcaaatcccatctccctctcgccgccgccgctgcctccgctccgctcccctccccgtcctactcccgctcccactgtcccacccaccacccgaaccttaaacccccacgaacttcgcccaaaccctaaacctcgtcgagccgcagccccgccatgccgaaggtctttggcaccggcgtcttcgagttccggcacccccgagcggccgagtacccactacccgcggacgccgcccccgctacggctgcggcgcccgacaaagttcccgcatccaccggcggcggctccatcacgctcctcgacatccagcgggaccgcctcacccgcgtcgccaccgagcattggggcacggccgccgctgcggcggccttcgacgcggaccttgtcaggaagatctatggcactgagctccgcgtcgaggggaggggccggaaaactgtgccgctgcagcgtgttatgatcctcgaggtcagccagtaccttgagaactacctgtggccgcacttcgacccggttgacgcttccttcgagcacgtaatgtccatcatcctcatggtcaacgagaagtttcgggagaatgtggcggcttggacatgtttccatgaccggaaggatgcattcaaggggttcctgtggcgggttctcaagctcaaggaagaggaaagggctcttaatatggcagagaaaacaaattacctcctgtttatgataaattcatttcagagtttggaggacgagcttgtccgggaaacaatacttcagttagtaagcctaaagctgtggaataccctttcgtttggacgacttcagtggaccaaaatcagaagaagagaggcaaaggaagcgaaaaaggctgaccaacctatcaacccttctgaaatgctcgagaataagttccttaggaatttaattgaagaattcgtggagattctcaattcaaaggtcatactatccaatcaagatggtgctgaagaatctgtattgaatgagtctttcagtgggcaaattgacgattcttgcgttctatattgtgagagatttatggaatttttgattgacatgttaagccagcttcctactagacgatttttgaggcccctggttgctgatgttgctgttgttgccaagtgccacttaagtgcactctacactcatgaaaagggacggctttttgcacagttggtcgacttgctgcagttttatgaaggttttgagattaatgatcactctgggacacagctcggtgatgatgatgtcctgcaggcgcattattcccgtttccaagcttttcagttgctagcatttaaacaagtgcctaagctgcgagattttgccttgtccagtattggttcactccataagcgagctgacttaacaaaaaagttgcttgtcttgtcagatgtggagctgcaagatctggtttgtaacaagcttaagttaatctcagagaaagatccatgcagtgaaagacgcgattttcttattgaagtcctagttgctttttttgagaagcggcaatcccaaaaagatgcagtaaatgcacttcctttgtatccaaatgagcagatcatgtgggatgaaagccttgttcctagcattaattactctggagaaggctgtcttgccctcccaaaactcaatctccaattcctgacgcttcatgattatttgttaagaaatttcaatctgtttcgtcttgaatcaacctatgaaattcgtgaagacattcaggaagctgttcctcatctacatgcttatatcaataatgagggagagacagccttccgtggatggtcaagaatggctgttccgatcaagggatttaagattacagaagtgaagcagccaaacattggagaagttaagccttctgctgtaactgctgatgttactttcagcatatcaagctacaggtatcagataaaatctgaatgggatgctctgaaggagcatgatgttctatttttgctgtcaatccgcccttcatttgaacctcttagccctgaagaggctgaaaaatcaactgtgccagaaaggttaggattgcaatatgtacgtggatgtgaggttattgaaattcgtgatgaggaaggagcactcatgaatgatttcacaggaaggataaaacgagaagagtggaaaccacccaaaggtgaaattcgtactgtccgagttgccttagatacagcgcagtaccacattgatgttaccgagacagcagagaagggcacagaaaatgtgtatggaacatttaatattctaatgagaaggaaacccaaggagaataatttcaaagcaatcctggaatctatacgtgatctaatgaatgaaacatgtgtagttccagaatggttgcataacatattcttgggttatggaaatccttcggccgcacagtggatgaatatgcctgatcttctggaagttatagatttcaaggacacttttcttgatgccaaccatgttcagcaaagttttccagattaccaggttacatttatcaattctgatggtacaaaaaacctgcatccaagtcccccttttaaaatcaggctatccaagaaaatgagggaaagcagtcatgctttacctggcaacatgaactccaatttgactgttaagagcagaaataatatggctgatggggagcctcagaaagagaaactaattgttgaaacttacattccagctgatcctgggccgtatcctcaagataaacctaaacagaactcagtgaggttcacaccaactcagatcggtgctataatatctggtattcaacctgggttgacgatggttgttggtcctcctggtacgggaaaaacagatactgctgtgcagatattaaatgttctatatcacaactgtccttcacaaagaacactgattataacccactccaatcaggctttgaatgatttatttgagaagataatgcagagggatgtgcctgctaggtaccttctccgccttggtcagggtgagcaagaattggccactgatcttgattttagtcgtcaaggtcgtgtcaacgctatgctggtccggcggctagagctgctcggtgaagtttctaaattggcgagatctcttcgtcttccagaagatgtgggctacacatgtgaaactgctgcatatttttggctattacatgtttatgcccgttgggaacaattcttagctgcctgtgctcaaaatcaagacaaaccctcttttgtcaaagaccgcttccccttttcagagttcttttcagatactccgcagcctatttttaccggcgagtcatttgagatggatatgcatgcagcgaaaggttgtttcaaacatctttctacaatattccaagagttggaggagtgtagggcttttgagctacttaagtcaacagtggagcgagcaaactatctaatgactaaacaggccaagatagttgctatgacttgtactcatgcagcattgaagaggagggactttcttcaattaggtttcaaatttgacaatttgctgatggaagaaagtgcacaaatattggagatagaaacttttataccgatgctgctgcagcggcaggaagatggccatgctcgtcttaaacgttgcattttaattggtgaccaccatcagttaccccctgttgttaagaacatggcttttcagaagtatagccacatggaccagagtctctttacaaggtttgttcgacttggtgtcccttatattgagctcaatgcccagggtcgtgcaagacctagtattgctgaactttataactggagatacagggagctgggagatctgccttatgtccgtgagcaagcaatcttccataaagctaacgccggattctcttttgagtatcagttagttgatgttcctgattataagggaaaaggtgagtcagcgccttctccttggttttaccagaatgaaggggaggctgagtatattgttagtgtgtatatctatatgcgcctgattggctaccctgccaataagatttcaatattgaccacctacaatggtcagaagcttcttattcgtgatgttatcaacaaaagatgcaaaccatggaatattgagccccctaacaaggttaccactgtggacaagttccagggccagcaaaatgatttcattttactttctcttgtccgtacccgttttgtgggtcatcttcgtgatgtcagaagacttattgtagctatgtcccgtgctcgtctgggcttgtacgtgttctgccgtcgttcactgtttgaacaatgttacaaattgcaaccaacattccagctgctcctccaaagatctgataagcttgccttgaatcttgaggagtgcactccttttaccgagcgacctttggaggaaactggaaacatccattacattactggtattgaagacattaattcatctagtaaagttcaggctggaacatcttcgtcaagtgcaatacatgcagtattatgctcctccggcaaatgaactgcctcaagcagcaccagaaaatattgctgatgcaatcccttctgaaaatggcaatgctggaagggctctgaatgatggaaacgaggacatgacccgggaagaaaatggtggtgcaactgacacagtgatcagtaataggatagaggaagacagcgttgaggcaaaggatgacatgacacaggaaggggacaagggtgaagtgagtggcaagggtcacatggctacagaggataggaaaggggaagcacaaggtggcgcagatggcaagctggaggaagcaaatgtgatgtcggcggacaagatgatggaggaagcaaatgcgacgtcggcagacaagatggaggaagcaaatgccacgtcggcggataagatggaagaagcagatgccacgtcgtcggacaagatggaagaagcagatgccacattgccggacaagatggaagaagcagatgccacattgccggacaagatggaagaagcagatgccacattgccggacaagatggaggaagcaaatgccatgtcgccggacaggatggaggagaaaaattctgatccgaaggacaagatggatgaggagtgacgtggtggtgtaaccagttttgaaatagcggtagacttgttctgtcagccgcatatcttgatttggaacatcatgtattcacctgtgttaccgcagatgaagactgatacgtgctccccaagaggtgtagccttgtgggcagaatcaagatcgacatatgatgaccatgttcctgcggttaatggtggtgaaggctgttttccctaccatcttggccaggctatgctggaaaatgttccttctcttccagccaagggtatccatgtttccgcatgtgtttaatcgtgtaaactgtagaggattttttgggtagttttttctgaaacacccgttccatctatcgttgtctccgtaacataacacagctggaacgttgcttttgtatacttgactgactactataattttggcacaagcattagatttttgcagatttgataggccttatcggccattcaaaattttgatttgacagaccaactcacccagcctataaaagagaagcaaatgggagtaagaaataaatgtatgacactggca

SEQ ID NO: 30450 - DNA, 3336 bp, Zea Mays
cagtctagcttatttgctcagattatataatctaaccccttggattatgataatccataagcaagtgaggaggtgcttatttcagattatttttttctcacttcctcactaccctttcaagtttcctagaaattacccaccattgccattataatctaccgaatcgtttttgcgcctatcggatcggagaagcccgccgcccaacagaaacacgccagataatctgggtaaacaaacaggactactcagattatataatccaaattatataatccagattatataatcatccaaaaataatccagattatataatctattggggtaaacaaacaggcctttagttgtctctcgtatttggaatcgtttcaatgctcagggttatacatgacttaagtggtctaagctcctcaagttgagtccgacttcacatgagagcgaatttcagtctgttgaagcgcggggcagggttcagcagttttctcgttcgccgagcaccagatccacgctcctccatgccagatctgtggctatcagggatctggtacccccagcccttcctgggccccgctgtcctcgatgtggcccacggtggtggtgctgtgctgctgcttccgtgtgcgcgttcgcgggctccttgacgtgggctgctctcgtgtctggtgggcactgggcggcggctgcactgtcactagcgcttcggcaggcacgcggccatgcggctcctccctttgggggctggttctttgtggtgcagtggctcccaatcaggttcccgcgtctgccgcgcagctgtgggacacctccacattggctggtggctgcggccgctgttcctggcccacagtcgctgctttggtttgcggatctgaggctggtgttcggctcctgaatggctatgggtggcttgggcgggcctgtctagctgctgctggcgacgatggcatccttgacattatgttcctcccctcgggggcagatgtgcagatgccttaccgcctagatcacatccttgtggcagatggtttgccgccgtggttgtttggggctcgccttcggcaaatactttgccaccaatgcttgtggatgctcgtgtcatctccggtttgctgagagaaccgaaatggggtcacttgaaggagttgcataaagctatcaagctttgtgaaccagcattggttgcaggagacccaattgtaacttcacttggcaatgctcagcaggcatctgtttttagatcaagcaccgatgcctgtgtggccttccttgagaacaaggataaagtatcttatgctagggtatcattcaatggaatgcattatgatctacctccctggtccataagtattctcccagactgcaaaacaacagtctacaacaccgccagcgtgagattgggcacctgattctttttgttcattctacaacttccttttgttcttattttaattgggttgctttcttaaattgtatggcttccctaatattgagttcatacaacatttccttggtgctattgtactgtataattcttggcaaaaaactttttatactgatatgtttatacaggttggaagtcagatttcacaaatgaaaatggaatgggctggaggattcacatggcaatcatacaatgaggatataaactccttgggtgacgaatcatttgcaacagttggattactggaacagataaatgtgacaagggataacacagactacttatggtatacaacatagtgagtactccaagtccctaactcctcaaaaaatctaataataacttttacattttgaagatgctaaaggttttactttcagcgttgatattgctcaggatgagcagtttctcagcaatgggaagaatcctatgctaactgttatgtcagctggtcatgctttgcatattttcgttaatggacaactaacagggactgtgtatggaagcgtagaagatccaaaattgacatatagtggaaatgtgaaactttggtcaggcagtaacactatttcatgcttaagtatagcagttggtctcccggtcctgtgacactggatggcctaaatgagggaagaagagatctcacatggcagaaatggacctataaggttggtctgaaaggtgaggctttgagtcttcattcacttagtggcagctcttcagtagagtggggagaacctgttcagaagcagcctctgtcatggtacaaggctttcttcaatgcacctgatggtgatgagccattagctttggatatgagtagcatgggtaaaggtcaaatctggataaatggacaaggtattggaaggtactggcctggctacaaagcttctggaacctgtgggatctgtgattaccgtggagagtatgatgaaaagaagtgccaaaccaactgtggtgactcttctcagagatggtaccatgttcctcgttcatggcttaatccgacggggaaccttttggtgatatttgaggagtggggcggtgatcctaccggaatttcgatggtgaaaagaatagcagggagtatctgcgctgatgtctccgaatggcagccatcgatggcaaactggcgaacaaaaggctatgagaaagccaaggtccacctccagtgtgatcatggacggaaaatgactcacataaaatttgccagctttggcacaccacagggctcctgcgggagctactctgaaggcggttgccatgcacacaagtcatacgacatattttggaagagctgcattggtcaagagcgctgtggggtaagcgtggttccagatgcatttggtggagatccatgccctgggactatgaaaagagccgttgttgaggctatatgcggctgagtcatatgatccatataacgtactggtttctacaataatgttaccctatatcaagctggcaagaggtgaaagtggcggcaactgcgacacacggattgccagggtttacaggaattagttgtatgttagatttaagcatcgtatgtgtatgtaacttaggtcacatgagacttgcatggaagaagtggttaggaccctagctgtgagaaactaagtcttgtagctctctacacagtagaattggtctggcaggtgagggtgcagatgagactctgctttattacctgagtccatgtgcgcggtggctcttgggttggagattgccaaaaggccagcaattggctttgcattatctggtcattcatttttttggtcattggagggtgcaatgtaaatgttcagggtcaatcatttatgaatttttctagctagtaatgaaacagtaaagaaaatgttggttcagattataaaacaccagttatcttccatt

SEQ ID NO: 30451 - DNA, 1300 bp, Zea Mays
aaccgcagaggccaacagcacaacgagcgcaccactccccaagaaatggagctgacccaactcctcctcctcaccggcaccgcctcccgagctcctgctccgcgcgcgtagccgcgccgcagttcccagtaataacacgcccgcaagctccgcagtccgctccctgcgcgagggtgttgtttgagccatgaagatggcgacgatgactgcttacaagtatcaagctcaggcgttgatgagggactacttgctagctgatctactcgttccgtacacctctgtgctctttggcattgtcctctgcaaggtggcttatgatttcactcgaatactgagctccttttatttcaaggggtatactttattgacaaaaatacagcgcatcgaatggaacaataggggtatgtccagcgcacatgcaatttttatcacggctgtatcattatatattgtcacgtcgactgatcttttctccgattgtgtcaaggggcctattacattccgtaattcgataatatccacttctgcattgggggtttctgttggctacttcatcactgatcttgaaatgatcttctggctgtatccttcccttggtggaatggaatatgtcctccaccatactctttctctggttgcaatagcttacacaatgttgtctggggaagggcagttttacacatacatggttctcatttcagagacaaccacccctgaaatcaacttgcgatggtttcttgacactgctggactgaagaaatcaagtgcttacttggttaatggaattctgatgtttgttgcatggctggtggcaaggatatttttgttcatgtatgtattttaccacatttatttgcattacagtcagataatgcagatgcatgcctttgggtactacctgacgtttgttgtgccatcggtgctctttgtaatgaacacaatgtggttcatgaagatcttaaaaggcgtgatgaaaacactggcaaaatggtcatgatggatgatgccaagaggatcccagaactatcaacaggatttggtctttctggcatcattgatctgtaaagttatggatatcagggtaactagagaaagttaatatgtaaagtattagcaaacaagctagattaggtgaaattgccctattttcagcagtgctggaagttcataaccagtttggtttgtaccggagatccagcacgctgttctgcttacccccaatgccatgtgtatatctggagcattttgcttaccccaatgccatgtgtatatttggagcattttaatggatggtttgttc

SEQ ID NO: 30452 - DNA, 3295 bp, Zea Mays
gctccagcgagtaccgacgcctcccacagctggagaccgtactttactggcactggcagtaatcttcccacccgcctcggcgcctcctccctctctcccaacatcgcccgctctctcctcgctgttctccgctgtcatctcccccggagaagcgtggctcctgtagccggcctcctacctgcccctcctccgcgcgccgagcaccagacgacgcgacacggccgagcacggtcgctgcttccgcggcggcgccgctccactctcgtgctgcagctagcggaacagagatccgtggggacatgaacagggtttctcctctctgttggtatgaactaaattgatcgatggtcctattgaatatagagctactattatatggcatattctgtcatgcaaatgatggtggttgtaagttgtgattgaggaactccattgtttgagaaatggatgaaacaccaactagttctgggcaatctgaagatagttcatgtgaacctaattggtggccaccagacttattagagaagatagagtctgcttccatatcaaggaaacatgatgttttgggtaatctaaggtcctcatcctggaaggcatcacaattactgtggtcaacaggatcttattcagggttaatccctaatggtttctattcaatcatcccggataaaaagttgaaggagactttcccaacaattccatcggtagatgacctgcaaactcttgaagcagatgggcttaaggctgacataattattgtagacactgagagggataagaaggttttcatgttgaagcagcttagtgctgcacttgtgaaagggttaagctctagcccagcattagtgataaagaaaatagcaggtttggtttttgactgcttcaagcgacaaaatcctgacgccagtccagcaaaaggctcgattgaagatactcatttctttggatataaaggaccacaacttctagggcagataagacatggatcatgccgacctcgagctattctatttaaagttcttgcagatgctgttggccttgagagtaaacttgtagttggtctacctgatgacggtgccgttggatttgtggactcctacaaacatatgtctgtggtagtttcgctaaactctatggaactgctagtggatcttatgcgatttccaggccagttgattccattttcagctaaggctatctttatatcgcatatatctgctgcgggtgaaagtgactcagctgaaaatgactcctgtgattctccccttgagcccaacagccctctgtatggattgtctgataaagttgaaactgaaggaattgaatcttcatcaaatctatctggacgatcactgcgtaatatgatgttgagatcaaggacattttctgaggggaaattaagcacgtcatgtagtgaaccgaatatagcgaatgccttttggaggcacagtcaaaggagaggagttgccgaggaaccccgtggtgctagttccagtcctgagcatccattaatgagagcaaggggaagatctatacttggtggtgagaagcaatcatttcaagaatacacagaatctggagctgcttcaagatggtcttgggggcacttcaacctctaatgctcgaagaataaggcgtagaagcattagcatcacccctgagattggagatgacattgtgagggcagttcgggctatgaacgaaacactaaagcaaaatcgccttcaaagggatcatgtcgaaggttcatgctcatatgttacggaagaccaaagcaacgccaatgactgcccaaataaagatgatgcatctcggataattggtgctactgacagtgactcaagaaaccgaactggtcctactcaaaaggccatgtcattgccttcttcgcctcatgaatataggggtcaagatacccaaaaaggtgatgattttataagtaaagagaagatggcattggcatggaacaaagttttccagagctccccatttcttaacaagcccttgctgccgtttgaggaatggaacatagatttctctgagataacaattggcacgcgggttggaataggattcttcggagaagttttccgtggtatatggaatggaaccgatgttgccatcaaagtatttctagaacaggacttgacaactgaaaacatggaagatttttgcaacgagatatacatcctgagccggttgcgacatccaaacgttatattgtttcttggtgcatgcattacacctccacacttgtcaatggttactgaatatatggaaatgggatcactgtattatctcatccatatgagtggtcagaaaaagaaacttagttggcgtaggaggttgaaaattattcgtgatatatgcagggggttgatgtgcatacaccgcatgaagatagttcacagggatctcaaaagtgcaaactgcctggtgaacaaacattggactgttaagatatgtgactttggtctatctcgagtgatgattgatagtcctatgactgataattcctctgctggcaccccggaatggatggcccctgagcttatacggaatgaaccttttacagagaaatgtgatatattcagccttggtgttatcatgtgggagctgtgcacattgagtcgcccatgggaaggcatctccccagttcaagtggtgtacgcagttgctaatgaaggttcgcggcttgagattcctgaaggacctctcggcaggttgattgcagattgctgggcagagcctgagaatcggccgagctgccaggagatcctaacccgtttgctggactgcgaatacactgtcagctgaaatggaagctgctcgctcgtccactcaattcctgcacaggtggaaacatttcttgtataaaacctgtaaaaaaggctgccgattctgcggacttgaggtcacatatcgaagcgctgtgtttttttttaaacaatggcgaccctttctcaaaaaaaatgtaaaaatgattccctggttatagaagaacatgtctgattcgatagacgtgccttgcatcgcagggcaagctggttgttgtaccttattctagataagtagcacgcccgcgaatgctgttcggctttcaaatagctgcagctgcaaatttttacctgttgctacagtatttcctttctatataaccaggcggcagcagcagccgaatgttgccagtacgttggagatggcataagcaactccatgttgtgaactgttccctcgcgaccataaagaacatgccatcctagatttggaataaaaatattgtcaaaatttgtat

SEQ ID NO: 30453 - DNA, 4403 bp, Zea Mays
tggattcagagtccaatgtcctaaccgctagaccatggaaccacttgtgagaagggagtctacatttaattttaaaactgttacactacctgtgtctactggatggagggttccattgcccatcatccaccagcgaagaaacatagggaaaagggaaaaaagatggtcgtgctgccgcgccattatagccccggaatccgcggcgcgcccccgccttccgtcctctctcccgccacaaatcgccgggcgcccgcgccgccccagcctcccttctccctccctccctcatcccctccgtgtcccggagcccagggagcggaggcgggcgggccggcgggcggccatggacgtggactgcgtctcgctgcccgacgccccggcgggcgacgtggatggcggcgccgcccggccgtggcccaaggccgtgaccaacggcggcgtccacgagctgctggagtgccccgtgtgcaccaactccatgttcccgccgatccaccaggcaagagctgggcgacatcaggtgtctggcgctggagaaagtcgccgagtcgctggagctcccctgcaggtactactcgctggggtgcccggagatcatgccttactacagcaagataaagcacgaggcgcagtgcggcctgagaccgtacaactgcccctacgccggctccgagtgcggcgcggccggcgacatcccttccctcgtctcccacctgagggacgaccacaaggtggacatgcacagcggctgcaccttcaaccacagatacgtgaaatccaacccgcgggaggtggagaacgccacctggatgctgacggtgttccactgcttcggccactacttctgcctgcacttcgaggcgttccagctcgggatggcgcccgtgtacatggccttcctccgcttcatgggggacgagaacgaggccaagaactacagctacagcctcgaggtcggcgccaacgggaggaagatggtgtgggagggcaccccaaggagcgtccgcgacagccaccgcaaggtgagggacagccacgacggcctcatcatccagaggaacatggcgctcttcttctccggcggggaccggaaggagctcaagctcaggatcaccggacggatctggaaagagcagcagacaccagacggcgcatgtactccaaatctgtgcagctaattaagcaatcttcaaacaaacaacaccttgcctgtccttctttctctttctaattaatcgtggtggtggtggtggtgctcaaagggatttatttatttattactaattattaggaggatgtaggatgctcgtgtaaatgaaactgtgtatattatatggatggcatggcatccctggccttaaatcatgtcacagcacagtactgtactgtacctacgggtggccggctgatcaaaagatctttgcttgctgacaaagctgtgtctgcatcttcatgactccatgtttgcattctattcctcccacacaacagtcaccagtgggcgtgccacgtggccgctatcccatccaatggttccacacctcctctttcccaataatcccaggcgccgcgaggcaaacaatctcctcttctctccccagattcactcaccgtccgtccgtccagggagccatggcagcagcagcagcagcctgcatctgtctgcagctctctctcccaagcaaccattcttcctctgcatgtcctccagcatacaggaagcgtgtcgcgctagccccagggagaggaaaccgtcttctctgcactgcatctggcgcctcttcttcttcttctgtggtggtgaccaaggagcaggaggaaggatctcctgagcccgaaatctttagctacaaagacgaccccaacttcaggggctgcaagggctgcggcagggacgagcttcagaggggctgcaatggacaaggccggatccagggcggcatagccgccgtcccgggcttcggctggtggcccatcaaggcgtaccggccgtgccccggcttcgtcgcgtccggcggccgctaccggcgccagggccaaagcatggacgacgttgcatccggcagggggaaaaagaaaccctctcccgccaaaaaacaagcttaacccctctagctagtttatgttcatcaggtgaattcagaatctacccaagatgggagggaactgggggaagctcaagttattcaggaacagcagttttttttgggtccacaacgccaatgtatatgcactagtttggagtactgtttgcagaaacaacaattgtatcagtagcttggaacatctgactgtaccctaattgtattattgtcttcatcaagtggcgaatgcaggatcttgcactggatcttgccggacaccgacttggggatggcgtccacgaagcgcagcagccggagcttcttgtacgacgcaacgcgccccgccacgtacgccatcatgtccgcctcgctctccggcgcgccacgtcgccgcaccacgcacgacgccgggacctcgccggcctcctcgtccggcagcctgcgcccgcatacatgcatgatgacccgcaggaacacacacgcacaatctccaactgcatgccgcggtccgctcggtcgcttacccgaagacggcggcgtcctcgacggacgggtgagacagcaggatggcctccagctcggcaggggcgacttggaagcccttgtacttgatgagctccttgatgcggtccacgatgaacacgtcgccgtcgtcgtcgatgtacccgacgtcgcccgtgtggagccaccccgcggcgtcgatggtgcgctccgtctcctccttcttcctgtagtagccctgcatcacggcctggctccgcacgcagatctcccccggcgtgttcttgggcagcgaccgccccgtgtcggggtccacgaacttcacctccaggttgggcaggatgaagccgaccgacttcttcttggcgacctgcaccgccgaccccacgtcctcgccgccgccgctggcgtgcgtcagcgtgatgcagctgtgctccgtgagcccgtacgcctcctccacctgcacgcccgggaacttgcgctcgaacgccgccaggaggtccggcgcgagcggcgcggcggccgtcatgacggacctgagggccaggccggacaggtcgaactcgtcggccacggggctcttcaccatggccagcatgaccggcggcacgacgggcgcgaacatgacgcggtgcgtcagcagcgcgcccaggaacgcgcgcaggtcgaagcggtccatcaccaccaccgtgcccttgtgccgcagcgtggcgcagcagatgccggtgatgccgtagatgtggaagaagggcatcaggcccagggtgaccacctgcccgaccagctcctgcccgacggcgaacatggaggagcagaggctggacaccaggttccggtggctcagcatcacgcccttggacacccccgtcgtaccagacgagtaggggagcgcgcacaggtcggactgctgcgccggctcaagcgccaccaccggcgcgcccgcgcggtccgccatggcgaggagctcgtcccagcctatggcgccgggaagccgcgccacgtccccgatgccgatcaccggcacgccagcgtccttcaccttgtcgtaggccaccgcgtcggcgaccacgagcctggcctcggagtcctccacctgcttcttgatctcggcggcgacggcgcgcgggttcacgccggagaagaccgctccggcggacatgatcccgaggctcaccacggggtacaccgccaggttcgggagcgcgaccaccacgacgtggcccctgcggacgccgatggaccgcagcgccctggcgaaccgcgccacgagcgccgtcttgtccgcgtaggcctcggcgtccgccagcacgaactccggcacggtgacgtcgtctggtacggccacgggcgggaaccggctccggaagatgtgctcctcctcagactcatgcaaatgcacggcggcgatggccgcgtcgcccatcctcagctgctgctggtggtggtggttgtgggtatggagctgaaggaagggcgctgcgttggcatttgaagagacgaccggaggtcttggcattgggccacgcgaggaaggtgaaggcatgttggtggtggcgacacaattcttgcgtggtgtcaagaaaggtggtgtgcaggtgaggatcggttgtgtcatggcctttgacctcgtagaacttggctgggtcatgctcatgtcctttgagctcacagagcttagagccaccggtcaacagtgacacgcgtgaaagcagcgttgtcgtgttcatcatagttcgcaatagagttcagatgatataatagttggttaagtgcatgcacaaattcttcaaatgaaagaaatatcaattcgcccccata

SEQ ID NO: 30454 - DNA, 2378 bp, Zea Mays
gagcatgttgccattggtgccacagtttattttggatgacatgattgaatctgaacttggaggttcttgcaatatagtttgcacacagccccggcggatagcggctatttctgtggccgaaagagtatctgatgaaaggtgtgaaccatcacctggatcgaatgattcactggtcggataccaagttcgtctcgacagtgcacggaatgagaggacaaagcttttgttctgtactactggtatccttctcagaaagttatctggaaacagagacttaagtgatgttacccatgttgttgtggatgaagtacatgaacgtacaattttgagtgacttcctgcttattgttcttaagaatcttgttgagaaacgctccaatcaacaaggaaggaagttgaaagtgattctcatgtctgcaacggttgattcaagcctatttgcacgatattttggagaatgccccgtgatcagtgttgaaggaagaacacatccagtgtcaactcattttcttgaggatgtttatgagaaaatggagtactgtcttgcattggattctcctgcatcaggagcttactttgcgcagcatggggaaaagtggaagcatgctagcagctcagtgaacaaccgacgaggaaaaaagaaccttgtcttatcctcatggggtgatgagtcaacgctttccgaaggctatgttaaccctcactatatttctgattactataggtcatataatgagagaaccaaccaaaatctaaaacgcttgaatgaagatgtcatcgattttgatctattggaagacttgatatgctatattgatgagaactgtcctcagggtgctattcttgtttttcttcctggagttgcagagattgacttgttgattgatagattatctgctttagttagatttggaggggcatcatctgattggatccttcctttacattcactgcttggaccctctgatcaaaggaaagtgttccagtctccaccagataacttccgcaaggttattattgccacagacatagcagagaccagcattacaattgatgatgtagtatatgtagttgatactggaaagcacaaggagaaccgttataatccacacaagaaaatgtcaagcatagtagaagattggatttctcgtgcaaatgcaaaacagagacggggtagggctggtcgtgtgaagcctggtttatgtttctgtctgtatacaaggcatcggtttgaaaacgtcatgcgtccatttcaggtgcctgagatgttacggatgcctttgactgagctgtgcctgcaaataaaatcacttcatcttgatgacatcaaatccttcctgctaaaggcagtagagccccctaatgaagaagctatttcctctgcagttgacttgttatacaaggttggagcttttgaaggacatgaagagttgtcacctcttgggtatcatctggcgaaactgcctgttgatgttttgattggaaagatgatgctttatggtgctatctttggttgtttatcaccaattctgtccgttgctgctttcctgagttataaatctccatttctctctccaaaagatgagaagcaaaatgtggagaaagcaaaagccacattattgaatgagaaccttgatggatctagttctgtaacagataataaacaatccgatcacctgctaatggtaattgcatacgacaaatggtcccgcatactgctacaggtttctaataagctggtttttttaatttcagaatggtgataaatctgctcgtcagttttgccattcattctacttgaatagtactgtgatgcacatgatcagggacatgcgtcttcagtttggtaccttgttagcagacattggacttatagatcttcctaaagatactctgaggcacaaggtgggcagtagaaaaaataatctcgagagctggttttctaatatgtctcttccattcaatgcctatgctcgctgcacctcggttattaagtcggtgatgtgtgcaggtctataccctaatgtggcagcatctctagagggtgttgatcctggagctctaggtggaagaaagccatctgatgttctgttcagtaaggaccgtcctcgatggtatgatggaaggcgagaagttcatatacatccatcatctgttaatcacagcttgaaagctgttcaatatccatttttggtgtttcttgaaaaggttgagacaaccaaggtgttcttacgtgatactagcgtcgtttccccctactcacttcttttgtttggtggttccatggtaatccaacatcagtgtttgtccatgactccatgtgacttttctggtgacagtagagggtggtggaaacccttcaatgtgaaccttttttag

SEQ ID NO: 30455 - DNA, 2192 bp, Zea Mays
accctataagaaagttgttccacattatatggtcttcacttattttacaaacaccataacacaaaaccttatagagtagccacaaataggcttcaaaactgctatcaaaacactgaaactcagtttcagttactgttttcaatctgaaaattcagaagtaaagcagcaccacttggaaccactcttttttctaggttccaaatgtttttagggtcaagtttcttaataaagtttatactcctctagttcctctacaagtttgatatagtgaccattaaccaaaacctcttaaattccaaactacaatagcccaaagtttgctccaattgctgaaattcagaatctgaatttcactaagtctgaaatccacaatttttgacagctttatttggaccagttttactcaaagttccatatagttttagagctatatgacttaaccaaacttaaactcctcatgtagctctataactttgttataatgatcatcttcaaaatggttctagatcagaagttacaagagtccaaagttgtctagtttatattattttcagcaattctaaaatgaacccaaaactgaatttttgtacttaactccaaattcttccacacaacttaggaatctccaaataagaaacatatccacttttccaagctccacaactttgatatatggacttttgtcaaattatttccagattttagaattcctcttttgggctagttttaggatttcaaatgagtttcatttgtatttcagcttcttccaaggattcatccctttgatccatccatcagaaacaaggttactctctagtctaagatccaatctttgatacacatagctcatatccaaaatgttctggtttagaatttcctttacttaaccatctattccaagcaaagctcaagttaaggtttggagttattccagcttcttaagcgcttcttccacttgaccatcattccaaaacaagtctactctaggctataagacttacctttaacatttaagactccaagtcaacttgttacttgcttaagagatgacctacccctgtttagcttaagccaagtccttagactaaactctaaacccaacacacaacatcacacttttgaaaaagtttaacctagtgaatgcattctaggtgtaacaagcacattaatgcagatgcttatgatgacatgtcagagttttagtttacgtaacaccagaggtgttacagccttcccccctaaaaagaaatctcgtcccgagatttaaaactctaggctagataatggaaaaggaaatgcgtcactggcttatttccccattactcctacaaagcaggggtgtgcccctattggttcataccaaagacaaactacacaaatcctaggacttacgagaacctaggaactcaggaaaatgtttttctaaatactcctctggttcccatatggtttatcttccgggtgttggttccactgtagcttacaaaacttgataaattttcttcgagtgacccgatcctttagatccaacacctttatgtgatattccaagtaggttaaatctggtccaaggttaacatctgcaatctcaataacatgcttgaggactcgaaaacatttctttaactaggacacgtagaacatgttgtgcactgttgacaaattctttggcaactgtaccttataaactacaggtccacgaaatgaactgagtctcaaggcttcacgaataggaaaaggtagtatagaaaagcaaagatagatagcatgaataagatggatgaaacatgtactaagctactacatagggggtttaacttaaaattgtatgtcatgatgcatgctcgtcctattcgtcctcataattcttgccaacatatagtggctatcacgttctatgacggtggcatacctactcactccgtcattgaacactagtcgtactttcctagggtttagttagtgtacctgcagaaagttgcattatagttgtggattagtggttagcatcctaaactaagccaccttatagtccttaacttagggcttaacagaggatgtcgctagcattatagtttttcaaaactgtttttcaaagccaaacaatgtgtttagttgaaaataggtttttcaaaaccaaaacttttgttttaaaaatacgtatgtgaccgtatatacttaatccagctccg

SEQ ID NO: 30456 - DNA, 248 bp, Zea Mays
ctgattgtcactgcaggggatgaggcaggcgtacgatatatatacatataatcatttgtcttcatttatgtgatacttgtgctgtctcaaggaatctgtatggcgcccgatagggcgctactgattctagtaagaacttaagaagccatggatgggaacggcaactgggacacgatgaaaggcaataagttagccgccgaggtcgccgtcgcgcgtgaggtcaggtcggcaacgtgttgcggtgtatg

SEQ ID NO: 30457 - DNA, 3185 bp, Zea Mays
gcgcattcctctctgcctcgcacagtttggtttgtttcgctaaggggaggagagagaaacaaagggagataacccatggaggggaggagctccaattcccttctccgcatgcgcgagcgatctctcgtctcttccccgggtgttctgaatcttgcacttggtaaattgatgatagctttgctggaacaatggctgagagcaagcggtttgatacgaagagcacaggttgtcttgaaggcctcttcaacttccttgccctcaaccaacggttgcaaatgccgaagacgattgcctatcgaaggcacagcgaaggaagtgacaatacactcagaatgaaagtcccaaagcccaaaacttgcagtgaaaaagatgaaaacatcccgaaggaaactagcagtgaccctcaaattgataaggccaacatgttcgtatggaggacactcatgttcaagagaaaaacactcgggaaagacaaaaagaagagcagctcaccggccagctccccatcctcatcacgtctgctgcgctccagatcaatccatcactcgaaatgctttgattatgaggttcctgatgagttagctgcacattatcatgcaatgaacaactcgggctccattgaaatgggttcttgtcacagtgaaccgacaccattgccacatgagtgtccacaacatcccactgtccaagagccttgcagggcttgtggcagcatggatggcaaaggtagcatagatatggaggcacccagtgagacagcacctgggaatctcactgatgagagtgaggctctcgctacacaaaaaactcgtgatgctgcaacacatccttcgaaggagttcttggattttcttgaattatttaatgcacatagggagctatttttgaagattcttcatgacccttcattactaggaacacctgaacaacaagggcaagaagcttcatccagtggttctgtaccattgaacaaattggaatcatttccaagaccaggagggtcatcagggaaacgtaaccctatatttgatcggagtgacagtgagaaaaacatgccagaaatccaaaggtcaccatcaagacctacctctgacccggaagctgcaaaggtcatcagtacaagaatgcctactggtgttgacagctccgcagtttctcttgcagaatcaaggagcctgaagaaagctggaacagcttcaaaccgttttaaagctatccgtagaaagataaaagatgtcgtaagggagaaccggaaagagcttgctcggattaccaaggatggggttttccacaaactgccatatggccaaaaaatgactgggttgaccaggagctcctccatggagaagtttgtccaggaggagaaacaaatccgaaggacatattctattgcagaatcagtagacaagtattcaacactttatgagtcaatctctagggactcaagaatttctctagaaagattaaacataacaatggaaggcggtgcaaacttaaatgataagaagacgccaacgagcctcaaaagaataacctctcttccagagatgcggttgtgttcatctcaactagaggtcctgcctgaagtttcagcttctcggattgggtccaagatttggaatgtggaatctgaccgcttttcttcacgtggaactgatgccttcagtatctgtgcggaaggaaattcctatcctgatgatgtcacggaaaaatcagaaaatattcacattgaattaaattgtggaggcttcttggaagaagatttccgcagcatccttcgaactccatcttctcttggccggtctttctcccaccgccgcattaatagtttaccttccttcgatcggtcattctttcaagaccgtactggtagtttcacggagtgttctatagcagattcagagccacagttcgaaaacttgcagcttgaggacgaggactggttagtcaagccaccactgtccgcaggagcatatgctgccaatttcaatgatgaagaatggctggtcacaccactgaagcgctcccgtgtcatgaatggtattgaccatgaggatgaagagtggttagttaaggcgacgaaactgtctggtgccaaggatgctgatcttgaagctgaagagtggttagtcaagtcagggcagcctaacgatgctttggattcggacttccgcttcatacacgaattttctgaacaaggtgctgcagaacccttgcacatctatgtcagtgacaagaacgaggctgatttccagtatgtcaaggacatcctcaagaaatcagggttcagctgcggcgatgtcgactggtacgcgtccaatcagccagtgagccctgtggtctttgacgaggcagaatgctcgtgtcaggaggtcagcatggcaagcgatgaacctcacagcatcgtcaggcgcatgctcctgtttgatctcatcaacgaggtcctgctggacatctatgactcctcactcgtcatcggcccatggcactcacgcttcgacctgcgaaccagacccattcccatggggtaccatgtccttgaggaggtgtgggcgaaggtgagctgctacctgagcctgcattggaaggaaggccagacggtggaggacattgtggcacatgaccttatgagaaaggacggctggatgaacctggtatatgacgcggagtgcaccgcgttggacatggaggatctgatggtggaggaccttcttgatgacgttgtcattcagatagtgttagaatccattgatgaatgactatccggagcctctttttttaaccagcggcttgagcttcgcagtaatctgttcataaggctgaacagtgaagtgatatccgaaggaatgtactagatagatggatcgcttgtctgtctcgcattgtgcaacagtaactgtgtagatcattttaaaagattggcgattctatgaattgtcaaatgtggcagatgttggccatgcatacaaagttggaaacagaaggtaaacaatagataagaaatagcgaaacagatagcattatatacctgttaaattcaaccaaactgtcgtgagtttttattagtcaatactggtatatctaggttgtgtctcccctacaaatcctggtgttttgtactctattcatgagtctgtggaaggcacaattctgagtgtgaaaaacactactctgttatatatgtg

SEQ ID NO: 30458 - DNA, 3271 bp, Zea Mays
cgctggctgcccggctgccccctcacctcgcgtgctcgattcccatctcccccctccctgcgcacagccgcacaccagtaccaccaacaccattcaacagacgccgccgccgccgccgccgcccctcatccctgtcccgtcccgtcccgcgcgcggccgccgcatccgtccgggcctcctcgtctccccagccccgctgccgccgggttcatcagcagaagctgcttgctccgccgccgccgccctcttcctcctctactggcgtgcccatgaagccattggggtcgtcaggagggcgttcgtgagcggcatgcgccccgacagcttcaaggcggtgcaggtgctcacagcgtgcgcccgcgtcgcggatctagagaccggggaggccgtgtggagggcggcacaacaggaggagggggtcacggagagcgtgttcgtggcgaccacggcgttggacctgtacgtcaagtgcggggagatggagaaggctagggcagtgtttgacgagatgaagaacaaggatgcggtggcctggagcgcgatagtcagagggtacgcctccaacgaacatcctcgggaggctctagaccttttcttcgcgatggaggtggagggagcgaagccggattgttacacggcggtcggggcgctctcagcgtgcacgaggttaggtgcattggatttgggatgacaggcggttgaaatagtgcactaggatgaggtccttgacaacccagtcctgggcactgcactgatcaatatgtatgctaagtgttggagcacaagagaggcatggatggtgttccagcagatgttggagagggacatcattgtttggaatgcgatgatcatggggcttggcatgattggccacgagaagattgcatttgtgcttgttggccagatgaagaactcgggtgtgaagctgaatgataataccttcattggattgctctgcagctgcacacatactagccttgtgaatgatgggcggcggtattttcataacatgactcatgtatacagtataagccctaggattgagcattatggttgtatggttgacctgttgagtcgtgcgggattgctggaggaggctcatcagctgattggtgacatgccaatgctggcaaatgccgttgtatggggagcacgcctcggtggttgcaagatccatcggaatgctgaccttgctgaatatgtgctgaagcagctcacccgactggagccatggaattctgggaactatgtcatgctttctaacatttactcgaacagtggaagatgggaagatgctgcaaagcttaggttggaaatgaaggcaaaggggattgagaaggtcgctgcctctagctgggttgagcttgatgataaggtccacaagttctatgttggggacgattcacatcctctttcagataagatctatgcaaagcttgatgaattgggccacggcataccttgtagattgagcccatagcagcccatatatgaagaaaaaacaaaagaaaaagagcccaacacgtaacaagcaacatctcgcattgattttgaagcgtgagaatctggtctgcttattctgttcgctgtgtttctttcgtccactcagctttccgcagccgccgttttacgttagccaattctgctgtcagcttgccgctgtccgctcgtcctttgagctttggttgtgtctcccaaatatcttgcctttttgttgcattggactcttctgtggttagaatggcagcacccaagcccatttctcgtcttatttctcacgtcattcttgatttggatggcaccctcttaaacacagattctgttgtaagtaaggtagtaaaaccatttattctaaagaatggaaaaacgtgggatagcaagaaagctcacaagctagttgggaagacaccttatgaagctgcagctgttgttttagaagactatggactcccttactctacagaagagttcctctcgatgattactccgatgttcagtgagcagtggtgcaacttaaaaccacttccaggagctaatcgactgataaaacatttaaagactaacggggtgcctactgctttggcttcaaactcaccaagatgtaacatagaagccaaaattttcttccaacaagggtggaaagagtctttctctgcaattgttggtggagatgaagtagagaaggggaagccatccccgaatatatttttggaagctgcaaagagaatgaactgtgctccttcaaattgcttagtaatagaggattccttgccaggtgttacaggtggaaaagctgcagaaatgcatgtcatagctgtaccttcaatacccaaaaagactgctgagttcagttctgctgatgaggtgatcaattccctccttgatgtgaggcctgaaaagtgggggttgccaccatttaatgattggattgaaggtaccttaccaatagaaccatggtttattggtgggcctgtgatcaaaggatttggccgtggttctaaagtactaggaataccaacagcaaatttacccgcggagaatttttccgacgtagtgtcagaacatacatcaggggtatactttggctgggcaggactttcaacgcgtggtatatataagatggttatgagcattggctggaacccatatttcgacaataccgagaagacagtagaaccttggctgcttcataatttcggcgaggacttctatggcgaggaggtgcgccttgccatcgttggctacataagacctgaggccaactttccttcgctcgagagcttgatagagagaattcacgaggatggaagagtagcagagaaggcactagacctgccaatgtatgccaagtacaaagactcgccttatctgagaaacccttcgaagcacgggagtagtactaccggtgggacccagtctgagatggattccaagtgacaacccccctacagggccactagataatatgttacttattttctctatggtaaatgcgtcggtgttgatgcagaaacaattggactctctgtgagctaactcgcttcttaattttcggaagtagatagtattcctcgaagtggtgtttttactttgtaatatagaaaaaaataaagtggggttgttgaaacttgagagtcaaattccgagacgttatgcacgttttgatttctgaattaatcgattggtatcacttgtactgtttttatacgatgatgcttgaaccattcatttgtcattttaatttgatatacttgaagtcaacaatatgctt

SEQ ID NO: 30459 - DNA, 3272 bp, Zea Mays
ctacgtacaagtcgaccgagtgaggaagttgaactaattgccgagcgaagaagcaaaaatcatatcaatagccatagaagcacatcattagtcttgcgcttttcactagtttggattcggacttcctgagctccgccgattccttcctcctccacctcctctcctcccccagccgccgccgctgctcatcttatctttatctcatccccatcgcccgcccttgctccgcccccgggaatcgtcgatggcggcgtcggcgttgtggcagccgcaggagcaggggctccgcgagatctgcgcccacctggaggcgcatatctcacccaactctgaccaggcccgcatctggcagcagctccagcagtacagccagttccccgacttcaacaattacctactcttcatcctggcccgcggagaggggaaatctattgaagttagacaggcagctggtctattactgaaaaacaatctgcgaacgacttacatttccatgcaatcttcatcccagcattatgttaagtctgagctgttaccatgtataggggcaaccaatagggcaattagatccacagttggaacagtgatcagtgtgcttttccaaattgtacgagttgctggatggattgagttgtttcaggcactccataagtgtttggagagtaatgacctggatcacatggaaggtgctatggatgcgatatacaagatctgtgaggatgtccctgaagagcttgatgttgatgttcctggtttgtctgaacgaccgatcaacgtgtttatgccaagaatactgcagtttttccagtcaccacatgcaagtttgagaaaactatcattgggtatcataaaccagtacatagtagtgatgccatcggcactctacatgtctatggatcagtatattcagggattattcaaccttgcaaaggactcttcagcagatgttcggaaactggtttgttcagcctgggttcagctcattgaagttcgcccatcaattttggagccacatcttaaaaatgttactgaattgattctgcaagctaataaagattcagatgatgaagttgctctggaagcttgtgagttctggtctgcatactgtgatgtgagcatgcctcctgaaggtttacaggagttcttgccgcacttaatcccgactttgttgtcgaacatggtatatgctgacggcgatgagtcccttgatgatgctgaggaagatgaatcctttccagacagggaccaggatttgaagccccgcttccatgattctcgattgcatggatcggaaactggagatgacgatgatgatgctgatgctgtaaatgtctggaacctgcggaagtgtagtgctgctgggttggatgttctctctaatgtgtttggtgacagcatccttccaactttaatgccattgattgagcaaaacttggctcgaacagatgatgattcttggaaggagagggaaactgctgttttatgtctaggcgctatagcagaggggtgcattagtggtctatacccacaccttcctcagattgttgcctttctaatcccacttcttgatgataaatttcctcttatacggagtattacgtgttggacgctctctcgatacagcaaattcattgttcagagccttgatcatccaaatggacgcggacaatttgataagattcttatgggagtgctcagaaggatattggatactaacaaaagagtgcaagaggctgcttgttcggcgtttgcaatccttgaagaggaagcttctgaagaattagtaccccatttggaagtaattttgcagcacctcatgtgtgcctatagaaaataccagagacgaaatctccggatactctatgacgccctcggtaccctggctgatgctgttggagcagaattaaatcaggcaaaatatctagacatatttatgccgcctttaatcacaaagtggcagcaactttccaattatgacaaagatctatttccactccttgaatgctttacatctatcgcacaggcattgggaccaggatttgctcagtttgcggaaccagtgtttcaaaggtgcattaatcttatccattcgcaacagttgtcaaagattgatcctactgcagctggtgcggtgtatgatagagaattcattgtttgttcgttggacctactatcaggacttgcagaaggtcttggcgctggtattgaaagtcttgttgcacagagcaatttgagagatctacttttgcaatgctgcatggatgaagcagctgatgttcgacaaagtgcccttgcacttcttggagacctttctagggtttgcccaatacatttgcatccacgccttcaagaatttcttactgttgcagcgaagcaactgaaccctcaatctgtgaaggatgcggtatcagtagctaacaatgcttgttgggctattggagaattagcaatcaagattggcaaagaaatagcgcctgtggtgatcaccgttgtttcgtgcttggttcccattctaaaatccccagagggttcgaacaagtcacttgttgaaaacagcgcgatcactcttgggaggcttagctgggtgtgtccagacatcgtggcccctcatatggagcatttcatgcaagcatggtgcaaggcgttgtgcatgatcagagatgattttgagaaagaggactcgtttcatggattgtgtgcaatggtggcagcaaaccctacaggaggcgccggttcattagcttacatctgccaggcctgtgcgagttggactgagataaaaagtgaaggtcttcacaatgaggtgtgccagattctgaatggctacaagcagctgcttggaaacggtgggtgggaacaatgcatggccaccctgcaaccggatgttgtgcagaaattagctagatacggagtatgatggcagtggtcgtgtggtttcatcatctttttacgctggagacagagatcaggatggttggttgggtcacttgctcgtccctcccgcctcccagtcccaggcaaggcgacattgatgaaagaaaggtttttgtagcgtgtaattcttttcttcctcttcctcttagcaggtgagtccaaaattacattaccaattcatttttgcccaataataaaagatgaagatccatgggatttgtttatcccccactcccttgtttctgttactaaccatcttcggcagcctattcatacccttgtttgtagtacaatctacaatacaaaacggtgacatttttagagaccatagatatggg

SEQ ID NO: 30460 - DNA, 2104 bp, Zea Mays
accccgttccctcatgtgcttttgtctttgccgtccccgttcccgttcccccataaactccacaccccccgcattactgcgctcccatctccgcatccgcttgctgctgccgcccctgctccggctgggacgagcgagcctcctctccctccttgtcgcgtcccacataactgtgcctcctcgccgctgcgccccacctctgctcaggcccacactgccctgatcccgccggagtgcccgcacgcgcgcccttgcctgggccggccgccggcgaggggtctgggcggtcggtcgacgtgaccccccccgcaggcgcgctgtctcttcgtcgccctgctcttttcgaccggcctcgcctcgctgtccgcgagtggcgccgtgtcggcggcacacgccggcggcggtgcgggaacaaggcgagggcggcgcgccttgtcgccgtgcggactgagcatgacttgagccttgagatttaggatgtgtacagaggggctgtattcttgtgtataggttctctttctatcggtcaactgttgctgattcggacggaatgttggaggatcaatcttgcctgatatcaaggtcgctgccgggttcctgtgagcaggaatccagactagcttacatgacttaccacctacttgagatcacgaggagtaagcgcccgcctgggaccctgtcgattgagcacgacgtcgtggcagcattgactaaaaggacaaagtcctctgagcaccaaaacagcgaggcgctggattgtcaaggaagtaatggtcagggcgactcagattcaagcaccctgataagttccattggccgggacaactcgatcaactgtcttgctcgttgttctcgttctgactatggttctatcgcatcactgaaccggagcttccgatcgcttgtgcgcagtggcgaactgtacaaggagcgtcggcagcaggggatttcagaacactgggtctacttctcttgcaacgtgcaggagtgggaggcgtatgacccctaccgttcacggtggatgacgctcccaaggatgccccgcaacgaatgtttcatgcactctgacaaggagtcgcttgccgtgggcaccgagcttctggtgtttggaaaggagatcctctcgcatattatcctgagctatagcatcctgacacattcatggtcgcggggcgttgaaatgaacgcccctagatgtttgtttggatcagctagttttggagagaaagcaattatagccggaggcatggatgctgatggaagggtgcttcgctccgtcgagctgtataactcggaaaccaagaggtggacaacacttccaagcatgaataaggctaggcggaagtgctctggtgtcttcatggatggcaagttctatgtgatcggtggaatggccagtaacacagaagtgcttacttgtggagaagagtacgacctagatagaggtacctggcgggtgatagagaacatgtccgaggggctcaatggtgcaagcggcgctcctccactcgtcgccgttgtcgaaaacgagctatatgcagcgcagtacgccggaaagctagtgaggaagtacaataaaagggacaactcgtggacgacgctgggggagttaccggagcggccagaagccgtggatggctggggcattgcgttccggggctgcggagagcggctgttggtcatcggtggaccgagagtgctgggcggcgggatgatcgagctccattcctggattccaagcgaggggccactgcagtggaacatgatcggaagcaagccctcggattttactcaaggttcgtccaatagagctagtcggttccgtgtactcgttaatagctagctacccattggttcctgtgctcagcacattctatttgcagtccatctgtacctttggtccatatgatatactctgttgaaatgagtttttttctgagatggacgcgtacaggtgataaattgtaattggggggtgggtaaccgtgcatctatatgatttgtttgtatcatgttctgaaccgtgtctcaacgctgtaattctattgtgcaaatgtctcttttccaagaactgcatgaaaaaaaaaagaaaagaaagtgccca

SEQ ID NO: 30461 - DNA, 1199 bp, Zea Mays
gtcaccgtcgcttgggctcgtgtcgtcaaggcctccttccctgtccgcgacctggcttctcaactgaccgtgcggatcgcgcgtccgccaacaaactccagctggagattgtggaccgacgtccctgggccataaaaactatgcacaagaccttctatcctctcccttcgtcgttcctcaaccgttaatttctagagagagatagggcatcgttgtgccagggactcggcggcggctccgcctggggctctcggctacctgctcttggctacctgccctgccctggtggtgcgatcgagcgaagtcgcagcggcgctgggtaccagtacggtgcatccgcggacgttgaggaccgacaggatctcgtgaattcctcatcggagttcttccctcgtcgcgagtcgaccctcatcgtggacagctcgctcgcgcgcccgatcctcggtaatttcacctcctccgtgttcgccgttgccattactttgtgtagcagggattaattgaggatctggttcacgttgtgctcggtctggtgactccggcgagtgcgccgccgggtggggattcccttcgccgtagctgtgcggtgaggatggaagaagaacggcatgagtcgttgattctgtttttagtgatcgagattatgttataggggcggctcgttggccattggatcggctgttaatggatgcgatcaagtttggtctgaaccggttcggaaatagttctgaccattgatctcgatacggagggctaagatcaggttaggtcttcattgaatttaggccgttgagatcaaaacggatggtcggatcggttgtttgcgtattctctcccacacattaaatcagagccgttgatcctgtcgtgtgtggctgtgatggcataggagtattctagtttggcgatctaattgtggcagtccattattgatcggacggccgaaaagcaacgataccccttcggcctgggcgttttgcgtaagagaccccgagaaataactgaatcaacccgcagtccactaggattgttcactgagtctaggataacttaccaggaggcccctgtcttctctagaaattgaggcgcagtccagggagttaagaaatcaggaaaattaatttagaaatggatttttaatatgaaaataatggctagaatttgtttaattcatagaaatttcatattaagtccaaatt

SEQ ID NO: 30462 - DNA, 1836 bp, Zea Mays
gggagaggtctaagatttctatgagtacactaaacaagaacattgtatccagtcagccgccccttgtttcatcatctgctgatttgactattccaaagacaactgctacaccgttgttactagcttcacctcatcagtctactagtgtgtcaacgagtttgcatactggatttctgcgttctcgaagtacctcaggattgcctaggcaaccttcatatactactggatttgggattgctttaaatatagagacacttgttgccgtcacggaacaaagagatacaccaattgagacacctccacctgaagttcaggacaagattctttttatgatcaacaatatatccatctccaatatggaagttaaggcaaaggaatttaacgaggtcatacaggaacagtattatccttggtttgcacaatacatggtcatgaaaagggcaagcattgaaccaaatttccatgatctgtatctgaagttctttgataaagtaaactcaaaatccttgaacaaggaaatactgaaagccacatatgagaattgcaaggtcttgttaagatcagaccttatcaaatctagttccgaggagcgctccttgctaaaaaaacctaggcagttggttgggaaagttcaccattggtgtacaattcacttcaatgttaataatcagatgacaaacactgtgacaaacatgaaccggtatattctttcattatcagatgacaaacaattggtccccgggcttatttctctaatagaacagggaactgatgttctgcgtgtgaaggcccttttgtttgttgctctgctttgcaagaatagtcgaaggtggcttcctcatttcttttgcaatgcaaaattaatatcagctgttgatagactgggaaaggagaaggagggttttattcatcattgtacagaagcatttgtgcagttggttgcttccttggtccctggtattcttgacactgtctccagcgatatacagcaggttatggttggcaaacgtcatggacctgttactgctttagctgggcgagctcatccaaagagcacaattcatctgttccctgttattcttcatcttctaggaagtgcatccttcaagcatagagttgtgacaggccatgtattgcttcagttggcaaatcttattaagattttggaggcaccatttcaggtgctatttaagaaccttactgttgacataaaggatgtgaaaccaacttccctgctcaaagatcgtctgcgtgaagtcgagggaaatccagatttttcaaataaagatgttactgcatctcaaacccctgtggttgcagaagtcccttcagggaccatcccttcactaactcatatggaacaacaacctgagatcaatatcacatcccgagctatgagccttccaaatatacttaatcagtatgctgctcctgtccgtctacctacaaacaacacggtagaagatgacaaagttgctctgatgatgcctgagcaagtgccctcgttgacccaggtttcgccagcacaaacacaatcaacatcaccatctccattttcggttaaccagcttatggcggctattccacgtgaagagatacgtttcaaaataaatccaaagctcggctcccttggtccacaactgcaatatagcaaaattatggatttggctttggataaggaaaacatagaatagaattcaaatttggtggtcgcaaaagtgtggagactttaattcataatataaagttaggcttaacattagtgcaaacagttgtattttagtttagatttagagtacacttatgtatgcgttgtttgacaatgcttatgatata

SEQ ID NO: 30463 - DNA, 1279 bp, Zea Mays
cttcaagcatttagcttagctgtggggtagtgccgagaattgtcttggaagcacttcctgctgttttactattcgaaaagaagcaaaaggcaaaagctattgatataatagtgagtgaatgcaggtaaattcatgcacagtctcattccagataaacatatgctttatgatggcctgacttctgtctgccagttaatagggataagggctatgacggtattgtgctcgagtcctggtcaagatgggctatttatggcgtgctggatgatcaagagctacgttacatggcacttgaatttgttaagcagctgggagaggctttgcattcagtcaattccaaatcaagtagccaccatttggaactaatttatgttattccggctccaagaatgcaaaagctcaataatcaggactttggacccaaagatctcatgcatctggctgacactgtagatggtttttctcttatgacatacgacttctcaggacctcagaatcctggtcccagtgcacctctgaagtggatacatcattctctagcagcacttctttcagcaaaaggttcctctcatagcaattcacattcacggatgatattccttggcatcaacttttatgggaatgattttctactgtctggaggtagtggtggcggtgctatcaccggaagagattttgttcatttacttgagaagtacaagccatctttgcagtgggatggaaaaagtttggagcacttctttatctattcagatgaaggcgtgaagcatgctgtattttatccaacgctgatgtcactctctgtacgtctggatgaagcccgaaattggggaacaggcctttcaatttgggagatcggacaaggtttagactacttctttgatattttataggaatgtctcaatatgtcttttggtactgtgtggagttgtgtccactaatctagtatgtgaattacgcattttggtactgtatgcaccgtgggcattgttcttttcagcattgtaatatcagctggcaacagctcacattaaccgtgagaaactgcttcactgaatatttctgccggctgggtacacactagtgtagtaagaggcatctgtattcatctttgcttatggcatatgtgctgttatacatcttctaaaacgtactggtattttctggtgttttgtacatttccttactgtgcttttgcaaaagaacggagataatatgttatactttgccacattatttaaatgaccgtacctgagacaagctctacaataatctaact

SEQ ID NO: 30464 - DNA, 2391 bp, Zea Mays
atcataattgaatccaattatccagtgtttggttgagagatgttgctaacatttggtatcagactactcgcatcctggaagattgcacgcatggaggcggcaatgcagcagattctcgacgcgatggcgtacatggagctccgcttgacagatgcgctggttggccgtggtggcgacagggtggaggacacggtctcagggctgcaatcctccaactccgccacctcctccgtcgccacgccgatgtacgacgacgtgttcgactcttcggtggccccgatgtacccaggcgatctgcacgccaccgccatcctcgacgtgctgtcccgcgtgcacacgctggacaagtgcatgacctcgcaggacaagctcgtcatcgacctcgatccagacgacatggagacaccattatcggagtcggcccttcccgtcgttcccagtgccaatgaaatggagacgcccaccacctgttcgactccggtcctcaccgagcacgcgccggccgaggccgcacacaactgcacactgcgggtgccccgtggagagccgcttccgcgcctgcttcacgcgttcctagcgcacgattggctcgaccactccgccgacacagacgactccgtgctaacatccatgtctgggtgcaccaagctcgtcgagctgcaaccgaggggcgtcaacctcagaggctgcattccggatgctctgttcgatgtcgagcttgagacgctcaacgtgccgtcgcacgcgctctcgggcatacttcccttgggctccaccaagctggcggagatgctacaatcgctcgacctctccgtccaccagctcacctatggcatcctcaccgagatgtcgctcttcttcaagctgcgtgtggatctgtattgcgccatacctgtcgacctctgcgagtctgttacccaaggggttgttccagcaggagaagacgaggatgaccccaagcaactctggcaccacctgcacgctcgctggccaagcgaccaacagaaacagcacctgcgctcacagacacaacacacacagaggcatcacagagcaacgacagccgaagaaagaaccaactatctctctggcctcattccaaagctcgtcaagcccaattcggtagccatggtgactattgcaagcaagcctacatcagattcaattgctgctcaagtggtgttcgatgaaatgcagcaagggtttcgaacatggatccaacgacaaccagatacatggtgccagagttgttgcccttcttcattgattgatgctctgcttggtgggtgttctagcgttggtgctcattgtgtgtgttacctgcttaaggtatatgctcttgctactaaacttcctgattggattgggcgcacacagtcacaaaaactaagaagctacagaggcaatatccctgggttaagaccaattccatggccatccttcattttactaagcagagagaataagcttaccaagtcatcagtcatggtcactgctagtgcgattcaggcttttgtgaatctggtcctcacttcttgtgatgctggttattccattgtcatgtttacaccaaattatttcatcacctacatgtcgttccagatgacaggtgctaccgacatattagttggtggttgcgattccaggacacttcattatgatgttgattggttggagaaggttctgaaagataaggagcatgtccctaaacttgttactgttttgaattcgaggaacccctctagagcttttattcccaggcctatgcttgagagaatttcagatctgtgcaaaagtgtaggacaacataccggtctgtgtttccatcatcggataacgcctgccgtgctgctcgctttcatattagttgaatttcctacaatgaggtatttttgtaggtcaactaagcttgcatgggcagtattaccttatcattattacaacagtctgttggttggtgtggagttcctgaaacacatgatacttggattgatgtacaacaaagagctctatggccaccacggatccaccagtcattgtctacactatcagcggcttgggggcaagccgcatttcaagcggtggggaatgtcagtacactgccatgtggtgtcatgtgggcccttggaaggtggcatggggtattctctgctataaaatggagaagctgcgcaggcgataggcatcaatgaaatattcagaagacatccattccatattgtgcttctacctcttcagtctcttcctcctatcttctagagttctacttctccgtatagatccttagctcgttgcaactttcctttcctatcgtcatgtactcagatcataattgaatccaattatccagtgtttggttgagaggtgttgctaacaattttcgttgactgc

SEQ ID NO: 30465 - DNA, 1203 bp, Zea Mays
tcttttaccaaattggccctctgatatcctcctattctcgcaggcctccacgcgaccacgccgcggttttgcacttctcgccttctctaatctctttgcctccctccaccaccagtccaccaccactgctacccaaccctcgcttccccaaaccctagccaagggacacggtggccggcgatggacggcgacggaggaggcgctggtgcgctgcaccaccacacgcgctcacccgaggacgtcttccgcgatttccgcgcgcgccgagccggcatcgtcaaggcgctcaccacggatgtggagaagttctatcagcagtgcgatccagagaaagagaacttgtgcctttatggtttgccaaatgagacttgggaggtcactcttccagctgaggaagtacctcctgagcttccagaaccagcactggggataaactttgcccgtgatggaatggtcgaaaaagactggttgtctctagttgcagttcatagtgatgcatggctcctgtctgttgcattctattttggagctcgttttggatttgacaaagatgccaggagaaggctcttcaccatgattaacaacctgcccactgtttatgaagttgtgacgggggttgctaagaagcaatcgaaagcccccaacggcagcagcaaaagcagcaaacctaactctaaacccacccaaaagaagaggaggacagcggccgggaggacgcagaggaggaccaggcgtacctgtgtgggtcctgtggggagagctatgcgaacggggagttctggatctgctgcgatgtgtgcgagaagtggttccatggcaagtgtgtccgcatcacccctgccaaggcggagcacatcaagcagtacaagtgtcccagctgcagcaccaagcggagccgagaatgacggcaccctgggaacaggacctgctcccagttaacggaagcattttagaatcattaggagctatgaagcggtgtcattagaaccgcttcacctgtttagcgtaccggtgcgcgtgccggctgttgtatcttctctcgacgtgtgttgtaaactgggcagggacatggtagctagtggtgatgtgttgtgttagcaggctgactgctgtcatcgtagtgacggatgaactgctggcgtttggaaactcgtgttcggtaattaagtgctgcttagtgtgataatttcctccggtttatca

SEQ ID NO: 30466 - DNA, 1443 bp, Zea Mays
aacttctgatccaggtgtacgagtctttggagcaccggttggccgtggcagaggcagcacagaggcttaggctcccactgctctctcaggacggggaggtccatgagcaggagatcgaaaagctgagcacctattcaagaagttcattcgatagcaccctcacaagcgcgacacccagctcaagttcaatctcgacgagttacaacaattatagcagcagcgctagtgcggtgactgttgctgctccacattggagtggtagttctgatgcagttgaacctggagttggtggtgttcctgaccgttttcttgggatcacttctgattatctctaccaagtgcaacaagagcagccagccatgtctgacatggttgattatcagagaactttggctagggagattgaagcccggttagaagccaagtgtgatgctttggctgatctatttgctatggatgaaagggattcgtcatccctcagtcaaatttcaagtgctaggcttccagaaagggtaaaattaatcatcgaagagatagagaaggaagaggcacatctcctggaggaccttgcttcaatggacagaaaatttgctgaacattataatgtcttggagcaaattcttgctgtgcttatacagtttgttaaagacaagaaattggagcatcagcaccaatttgatgatctgaagaagacctggcttatcaaaaggtgtcggacaatgaatgctaaactaagctatctggagcatcatctattgcgtgacacttacaccaaggacacagtaccagcactgcacaggatcaggaagtatcttgtagaggccacaaaagaagcatccaattcttataatgaagcggtttcgcggttgcgtgagtaccagggtgtagatccacggttcgatgtgattgcgaggcagtaccacgagattgtaaagaaactggagggcatgcagtggacaattcaccaggtggagatggacctgaaacctcaccatgaccacgcagctgtttaagtccacatctgttggaggccatgtttattacctgaatgcagcgggtgcgagttaggggggttgcagtggatttgatttgagtcagagggtttctgtttgtgcatgtttttttttgtgtatatccatgttggataatagcaccatcaatgcttgcttagttatacggtcatgtattcggtttgtttgatgacgagaaacactagaagagagcgagacatggaaaacaccagaacaattatcattgtactacgcatccactgccatgtcatacaaaacaaggcaagtctagatgacttttattaggaatcctaatggctataatggaacgtagtagccgagaagaaggcttcgtccggaggcatctgttttgccaggaagtgattacctgctcaagtgtcattatatttctattataacatttctaaactag

SEQ ID NO: 30467 - DNA, 2773 bp, Zea Mays
caccaccccggcccagagcactgcactgcttctccctctctgttttacggaggacgaggaggaacaggaagcagcagggtgcaacaatggtgaagttctccaagcggttcgagggccagctggtgcccgaatggaaggacgccttcgtggactactggcagctcaagaaggacgtcaagaagctgcaggccgcggcaggagaggctgccgtggcggcgccggcgagggctccggctcactgggcgatgaggctgcccttcttccacccccttgggcagccgcctgccgccattcaggtgcacaggaagctggccacagacaggagcgtcgacggcgcggtggccggggaggtgtacgatacggcggtggcggatggcgccgggttcgcggacgccgaggcggccaaggccttcttccagaggctggaccagcagctcaacaaggtgaaccggttctacgagagggaggagcgggagttcctggagcgcggcgagtcgctccggcggcagctgcagatcctcctcgagctcaaggctgccgtcacccagcagcagcaggcacggcgcggggggagcgctgccgacacggatgacccctccgtttcttggtccattcagctcgttacaggaggccaatctctcagggtaattgcagagaaagaagaagagtgtgaagaaaagctcaacggcggcgatgctaccgccaagataagcagtggtgaaggacccgtgtctcaaggtctcagtgaatctgggagactttgcaagccgaatgaagaaatgacgaggacactctccggccagggcaggagtgtgaggatcaacatcccggtcaccacgccttccaggactgtcaccgccatacgcgaactgctgttcggggacatgccgagccagtccaagaagactggcgcgcatggtaccgacggcagtgagaagctgagcatcaacaagaggaaggtgcaccaggcggagaagatgatcagaggtgctctggttgagctgtacaaaggactgggctacctcaagacgtaccggagcttgaacatgatggcctttgtgaagatcctcaagaaatttgacaaggttacaggaaaggaagtgcagcaaatttacctcaaagcagtggagagctcctactacaacagctctgacaaggcagtcaggctaatggacgatgtggaggagctgttcttgagacatttcacagaaggtgacagacggaaagcaatggtgtatctgaagccaaatcagcgggaagagtcacactgtactacgtttttcattggagtatccactggcggcttcatagcattgttcataggttactgtatcatggcacgcgttgctggaatgtacactcagcagtcaaacaaggtgtacatgtcaacttcttatcctgttcttagcatgttcagcctcttcttcctgcatctcttcatctatgggtgtaacatcttcatgtggagaaagacacgcataaaccacacattcatatttgaattcacgcctactaaagagctcaagtaccgagacgtgttcttgatatgcactgcttccatgacaattgttgttggtgcaatgtttgcgcacctggcaataattgttaaaggaaattcatcaggcgttgtccaagcgataccagggtccttacttctggtgttcttgttcatattagtctgccctttcaacatcgtctaccaatcaagccgttaccaattccttagagttatcagaaacatcattctgacacccttttataaggttgtcatggttgatttctttatggctgatcagctctgcagccaggtaccactgctcaggagcctggagtatttggcatgttactacataacaggcagctacatgacacaagactatggatactgcacaagagttaaaaactttagagaccttgcttatgcagtatccttcctgccttattactggagagccatgcagtgcgcacggagatggtttgatgaaggggatataaaccatattgtcaaccttgggaagtatgtgtcagccatgcttgctgcaggaacaaaggtggcatatgagaataacaatagtactgggtggatgtcacttgttatcattgtatcaagtattgcaactatctatcaactgtactgggactttgtcaaggactggggtcttctacagttcaactccaagaatgcctggcttcgtaatgatttgatacttaaacaaaaatacatttatttcgtatccatgggcctgaaccttgtcttgaggcttgcttggcttcagactgtcatccaccctaatattggaagcctggattctagagtaactctgttctttttagcagcacttgaagtgatacgacgaggtcactggaacttctacaggctggagaatgaacacctaaacaatgcaggcaagttcagagcggtgaaggttgttccacttccttttcaagaagtggaagaggaataacaaaacagggccaccactggagcatgttgtaggttttaagaatacaaacagttcgtatgtaacacaccaactaatgctagaaagcatgcactacattaccataataagattcatttttgtatgagcaataaaaaccattccacgctgttagtatggacaagttgtatggagcaattggcatttacatagaatgtatgtcaagggctgagtatccccggacagcagggcctcgactacgcagttcgtagtcgcgacccgtcttctccggcgaggttttacccctcagccgcaggctttgttggtgagtg

SEQ ID NO: 30468 - DNA, 2614 bp, Zea Mays
  misc_feature (2613)..(2614): n is a, c, g, or t
catacgcacaaccgctctctctccctctcgaagcgacgcagaaccgctcgccagtgtcgcagtcgcctcctgtccctctcctctctctttgccgctgccctcctctaagcatctccctctcctactccctcctctcaaagcacttgttggccccccaccgccgcatctgcatcccataatcgcctacgccatcgccgccgccttcgggtccttctcgctcagcctcgactgctcgctcatcttcaccgaggcgctcctcacccccgccatcccctccgtgtcggcgtgcgccggcggcatcttgcccagtctcagccgatttatccttcggtctgttagggccttatcaaaccgccgccacggcgaactcgcgccgctgccatgttcgcctcgcgcacccaccatctcctcaacaacgttcaaaccgccaaccacgacatcctcctccacaacccgacctctcacgcatcccaacttggtgcggcgtaaacgcgcagcagcacttcgcctcggtcgaccacggcctgcccccaggcgttgacatccagatccatctcgctccgatctacattcgagaagtttgtctctggcatcgattccccaatccgaatcattgccgacgtcttctttgggtggacggtcgaagtcacgcgcacgcacatcccacacttgttcctccccggcggtgcattcagcaacaccgtcttcttctccgtgtcggagcacctcgggccataggggcagacccgtgaacgacattcttttggcgtgtcacgacctcctgtcgcaagctcgatgctctccccatcgacacgtgagccccttggagggagccccgacctagattttactgagagtttctcctcatcaacctagatctcagtttctctggactttactgagcactcaacattgtgttttttggttgctggtaaattgctcatttactgctatagttgattagtaaatataccggtattagtatttatatagttactggttacttgtaatacaaacatttttcattgaagcgcgtatatggtttgtaaaataccagaacaagtattggacaatgctaatggagttacaactccaaggacaggaaggtatagtgcagatggagcaggtggtgatgcttctgtagagcttacacggccgtgcaggcacgcagctgccgcgcttggtgatttgatatttgtgtatgacggtttacgtggaggtgccgatccatagatttagcttgaagagaaaatagcagcagaagaaaaagttggcgctcgacaattttttcgaaatcatcttaaaaggctgaccatcaaataaaaaccaggctaaaaacacaaaatgtaatatatatggcctaattttttccttcaatcaccacatgcctatttttttcttcaatttttcttcataagaataagtcaaggaattccatccttgtgtttgcatggacctagaaaatgcagatttaagaatgatgcgagtgatggaggcctatcaggtcaaggaatttcatcctgatgtttgcaaggacccagaaattgcagatttaagaatgagcgagcgatggaggtctatcagggagtgttcttcgttgctatccattgtgaaacatgtcctacagtatcccttgccaaccagctcctgtatctgttgcctgctcgattcgttgaagcacagagtatggagaaaacacaacatatatcgcatggattatgatttgttagtgcatgtgttacatattgacttatcgttttgagttgtcaataggtccaaggtactaaattgttgatgcacggatttctaattttatcaatttgttttgtgggctgcgatttattttaagtcgctctaagatctcaattattcctcttttttgttattttttatgccttagctgtaatgtttgttttgaatatttattattggaaaatttgatattttataggtgagacattaattaagccattttcataaaagaacactcctgtggtgacaattagacaagaatactaataatcagattaacatacttaaccttgactgcacatatagagactacagtgttgtgttgtgttggttcactgtaccacaaacaatattgaagaggactgatgaagagcgcaaagtttatagcatagtcgaagattttgaattgcaattcaaggagaaagaggattgctaaaggatgaccttcaaaacaaaaaaaagctcattaaagaacatgggcattatgaaagcacaataggatccaaagaggtaggtccctttttgtcacttatttaatattcctgaataacctgtgttcggtctgaaagagcacataattgcactcctatttttaatccttacatgattactgcataactgtttatcagtttgtggtctacaggtatcaggctcgctcgcaccacagatatctttgagttattttttactgcattgcgactaattttaggcctccaatttgacaaacagaattaagtagcttatgtatcccttgtttcttgtttcctcagtatatatacacactttccaatatgacgcaggtagcattgttgtagaattgcggttcacggaaacacaaggctagcgcttttgtgcaacaann

SEQ ID NO: 30469 - DNA, 1674 bp, Zea Mays
cttttcatttcatatgtcagatgacattagctgagcagctaaccaaatttttttttctgttttcttttatggctgtctcttcatagaattccgacttgtgagttagactgaatttgggcttctattggaaataatgacacagtgtgccaacttatttcgattggaaaaatataatatcttcctcgtttagtcaatcttctacaattttgtaatctatggctaaagtaaatttgattctttacagacatgccttcccattgcattatcagtgggggattgtaaagttagaatttggttcttgattaacaacttgtatagctgctattaattaccagctttttcctactgaactttcatggatcaagaccagaaacttctgattatcctcagtcaagtgagaggccactgactgccacaagcagtttcagttctgcatccccattttcggaatcaagccaactagcttcgtctagtaaacaagcggccccatatctacctcgcaaccatatgggcaggcggtctttcatgtctaaaccagtgtacccacttgtcttccggaaccctgtgtccgaatcagaagcgtgcaggatgcttgaggttagtaatgccgggcgagcgacaccaagtgatgacagccaggcttctcctctgtggcgtcgcagcttggcgagcccagagctcaagttccataacgcactgaacgaacttgggaagatggaggtttcacctgaacggaacacgagctcaagaagggaagggttcagatggagcaatgccagcagttatgattttggatacgatggagatgccattgacatgtcagatcatatcagtatcgagtcccagagatcacccacaagctcagtgaggttcctgaaatgtgggctctgcgagagattcctgtgccagaaatcaccctggacctcgaaccggattgttcgaaacgccgatatgccagtagcagcggttcttcattgccgacatgtcttccatgcggattgcttggaggagggcactcccaagacagaagtccatgaaccaccctgtccgctgtgcacggcacccactgacgacgaagcacatgtgtcattctcggaacctctgcatgttgccctccgatctgctcgcaggaacctttcgctgggcagtggcgctggagggagtaacagcagtggcgcgaggcctccttgcagtgaccgtggcctgaagaggaaccattctgctatcgtgccgagacgcggcggcggcggctcgttgttccgcaaccgcttcaagaggcagttccccttcaaggctaggatcgggaaggagctctttggcggcagggttttcagcaaggtcgggtcgtcttcaggtcaacaggatgaccatcgacagcaagcgccgaagcgtgatcggctcatgaagtagctagagaacttagtggcacggagtatatgttgtgtgccctcctgatattctatccgtgccatcagttatcatgtctagtgtaacctataacagcatgcgaaacttggcatccatgcgcagtagtcgtccaagacgggggctctgtatatggaggctgcctgcattgcatgtagcacccaccgttggctaactatgaggtgtattttggatccttgcagtaagaatctcagaatctatgccctatgattactatgttctgcttga

SEQ ID NO: 30470 - DNA, 422 bp, Zea Mays
agatgttttccaggcaaaccccaattttgttgaagatgagaaggcatatgagaatctaaagagaagcatcctgggagcagagtcttctgaagatgaagaaggatcagatgctgcttctgatgatgatgatgatgatgatgatgaatctgatgaagaggatgaggaacaaatggagataagggatagaacagagacaaatcttgtgaatcttagaagaacaatatatttgactattatgtctagtgttgattttgaagaagctggacacaagcttatgaaaattaagcttgagcctggtcaagagaagagcagaaaattagatttgaaaatgctgagggtacatgtactgtaaaatatactccttccgtcccacaaagattgtcgctctacaagcctgaggtggaactagcaagaagtggaaa

SEQ ID NO: 30471 - DNA, 2087 bp, Zea Mays
tgtccgtccccgaaaagctcatcgtgcttataaatacaggacccacccgtatcgtcgtccgcttccgaatttccgatcgagctccagcccccaccggataccaccgcctccaccaaccgattccgttccgtccccccggccccgacctcgtcaccaccggtcacgctcgagcgggaggcttctctcgccacccaccagcggattcctacagctcccgcgccgatcgcgtcgcggacccgtccggagggagaggtgatgataaaggatatttgctgaccaaacttgcagtatttctccttaaggaaatagaaattggcgtcatgtcatatagaaatatgctctggacacatcagtccgttaatcctgaatgggagcaaggacatgtccaagtccaaccaagaagttcctattatgcaggcacttgttacatcgagatttgtcctcccaactagtatgtacaacccttgcatgccagcagcagctgtcaacatatatattcctcagactcaaagctttggactgggcaatgtgctaccaccatctttacatagtcaagtttccacaggaactattgatgagaataacagcagtttcaattttggtgatagtgccattggatccatgaaaaggaaaaccgcagtagttgccggaaaccatcacattcttcatggatttgctggctcaagttcatctgttcatgtccctcagaatcctgtgtatgggccatggaatgcttcatctcaatcaaattgtttacccagttctgcagcttcaaacctaccagaataccacaatagtaatgggtggccgttcttagaagaatcttctgcaaatgcttcaaacagtttcacttcagtggatgcttgtccagagttggtacctcatggtaacaatttatatccagcttgtcacataatacagtgcaatacatgggttccacagactgcaagtcatggagtaccacagtggggatatggtaatgtcatggtcaatcctccaggaaccgtagacatgccgaatggaaatattcaggattatcaagctgggcattcttctattcatgggccactacctcatttctgccagattcctttgcgtagtatgcaagtacctcaaatacaagtaccccatcaacagttcatcggtaacaatgtggtgcatggtttaaatccttcagccgcaggccttccgttagatccaagaatgctggctttcccattcaatgatgagcacacttttgggcatcaagtgcatccacctctgataaaccaagccaacaatggggctttaagaattctgccatatcagaatgctacagtgatggatcattcaaggatttatgaagcaggacatgttattgatgaacatagagatatgcgtttagatgtggataacatgacttatgaggagcttgtagcattgcaagagcagataggtgatgtcaatactggtttgacagaaagctatatccaagaaaacttgaggtccacttttcatgttccaggagcagctagcatttctgatcagttctgtgagctttcgttagagaacgatgcttgcataatatgccaggaggagtatgaagctagagaacttataggagcccttgaatgtggtcacaagtaccatgaggattgcataaagcaatggttgatggtgaaaaacgtgtgccccatctgcaagacaacagctttgtcatcagatagaaggaatggatgatcttcgccagtaacattattggttatttaccgcgtggcaagttagcgcgattttgtatatagacagggttgcctttatttgccgtcccccttcgctgtggacataaactgtacagatattattttgtaggatattttagacgttaaatggcaccatggtgtgtaaggctcccatggttgccttggtagatcctcccttcctttacattgtatttatctttactcttcaaaaaagaagcccgaaaacatgtatattttggaagtgaaagaaccgattttttttcttcaattctggagcttttttgctagagctgcatgagatttgccgctgaaatagggacttggttatgtttttttttcgctttctac

SEQ ID NO: 30472 - DNA, 1912 bp, Zea Mays
gacaaggctaagactgctaaagaggaggccagagagttgctcttgaaggaggaagcatctgtgcgtatgaaggttgggcaagtgcagaaggatctctccttaatgttggatgctcttggcaagttggctattgctaatcctatatttactcatggtcaactgccgtcactggtaaactatgttgaacctttgctaagttctccaatagtaagcgatgctgcattttgtacaatgttgaggctagcacgttgcacagcccctcctctttgcaattgggcgctcgacattgctgctgcgattcgtgtgatatctgttggtgattttgaaatggttttggatcttacacctgtgatcatggaagatgatagtaagaagccatcatctggcatctttgaacaaatagtaaatgggctgactattgcgtgcaaagcgggtcctcttccagcagattcatttactttcgtctttccggttctttatcatgtgctaagcactgttcctgcctatcaaccttcagttgggcctatgctgaatgagctatgcctaggtctaagaggccatgagttagcacaggctcttgtcggtgtatatgcaaaagaactgcatgttaggcttgcctgcttaactgctataaaatgtgttcctgtgcactctgtgcaacgagatttgcaggtgtcaacaagcctctggattgctgctcatgatccggagaaggtggttgctgaattagcagaggaattatgggaccgctttggttttgatgccatcactgattactctggtattttcaatgcactttcccataaaaattacaatgttcgtgctgcatctgctgaggctctggctgcggcattggatgaaaatcaagacaaaatgcaagatgcactttctacccttttctctctgtacattcgtgatattggcactagtgttgaatttggagatgcacactggctcggaaggcagggtattgcattagcactccactctatcgctgacgttttggcctctaaagatcttcctgttgtcatgacatttctcatctcacgcgccctggctgatccaaacgtcgatgttcgtggtagaatgattaatgctggcatccttattattgacaggcatggaaaggaaaatgttcctttgctatttcctatttttgagagctacttgaataaaagggcatcagatgagaaaacatatgatcttgtgagggaaggtgttgttatttttactggtgctctggcgaaacatctatcaaaggatgatcccaaagttcacagtgtcattgaaaagttgttagatgtccttaacaccccatcagaggcagttcaacgtgctgtctcagattgtttgtccccacttatggtatccaaacaggaagagggtcaggctcttgtttctagactcttggatcggatgatgaaatgtgaaaagtatggtgagcgacgaggtgcagcctttggccttgctggtgtggttaaaggatttggaatttcttccttgaaaaaatatggcatcgctgtgacattgcagaaaaatttggaagacagaatgtctgcaaaatctcgtgaaggagctttacttggatttgagtgcctgtgtgagaagcttggcaaactatttgagccgtatgtcattcaaatgcttccgttcctacttgtgtgtttctctgatcaagtcctagcagtgcgcgaagctgctgagtgtgctgctcgggcaatgatgtctcagctcactggtcctggtgtgaagcttgttcttccgtcacttcttaaggtatcaatatatcttatttgatgctatcaaatcataacatttattgtgtccaaatgttctggagaatacaagtgtccagttcatctagttatatattgaaatctgacaaccacttaacttctgctgaatatttagg

SEQ ID NO: 30473 - DNA, 1092 bp, Zea Mays
ggctttcttttgaaagaaatctagaactgcctgaagaaggtgtagaatgcctaaaaagtgatgtcactgaagataatcatcataacatcaatttgggaagacctgtcactatttttagattatccgaagaagacatgcctcaggaccctggaaaaaccgatgaagcatcatcttatgaaaatatgggagaagagcttggtgacttaacaccacaggcagaggagtatattattcagatgcaatctcatttgaatgccatgaaaaaggagttacatgatctcaggagaaagaattctgccttacagatgcagcagtttgttggggaggaaaaaaacgacttgctggactatttgaggtcattaacaccagagaaggttgctgaactatcagaatcgacgtctcccggtgtgcaagaaactattcattctgtggttcatggtttgcttgctactctttcccccaagaacttgtggagaatgcttccctcccatttcagcccctaatatctgttccccgtgattatcttgcacgtttgctgttctggtgcatgctgctgggtcactacattcggggtctggagtaccggttagagcttgctcggcttctgcgaatatccagcgtgggttctttctctggtggagatgatcatgttgtttgagggtaccacgtctactgatattcctcaccgggaagaatggaaaggaaagccctggtcaagaaatgggccatatggcagagctgcagaggtgtccgttacactgctgagctatatagttgtagttcctgtatattcagaaaacagtcactcggttgtaaagctagtgttacatatgcacgtgaaccattttctttttcttcctttgatgttgtgccgtataaaaagaatttggtggttcgttggtgtttatctcgtggtagcataataggcatccttgtattctagttgtatgtttctggtggttgtgactgctgtccagtgtccatttagcttttttgtctattcttgattcgagtaaagcttaacttctcattttggaggtcgcaagctcatactttcattgaattatgggtccttttgattgggctttggat

SEQ ID NO: 30474 - DNA, 2694 bp, Zea Mays
gccatcgcgcgctcgcctccctccccgcgcccgcagtccccgccgcaatccccgcgtccgcgcccgcagtccccgccgccgagcagtcccgccgcgccccctctccctgcaaaccccgccacgacgcagcaactgatccaccatcgacgcgcgcgccgcgcgccccgacgcggaacgctggatcccgcgcagcagaaggcggccaaccagtcgccgtcgcccccggcccccaccccgcctgctgcagcaagcggcgtccgctaccgcatgccctcgtccccggacctcctcctccccgccgacgctaccaagatgcgccgctactccgcgctgcccaacggcggccgccaggagacgttggccgaccgcgtgcaccgctaccagggcgtcatgctcgtcatcctcgcctcgctcgcgctcgtctctctcgtcctcctcctcatgccacgctcacccgctggcaccatgggcggcgcccggggcagacaggtacgcactcccccgcccggtgacccgttgccggacttggagtcacgctgcctagactcgcccgctgggtggattcgtcgcgttggaggtcggattgtgaccacgccgtccagttaggatgtcgtcgtctccagatccaggggatggggttgctcggcatggcggccaagggcccctcgcccacgcgtcgcctcctatcgcagccgcacttggccatctcctcgctggtggcctccgtggctctgatccactgcttcctcaacacccggagatggttgacgtcgccttcgccgtctcctcgccagtggcctccaccagccccgcagtccaagacaaagccgcgacatgagtcaacccaagtccggtcgcacctacaccgatgaccgtacccaacgtattcaatctctctattcggcaacaccttaaaaagtggattgcaggcttagataatttttggaacacaacattgctccaaaaaagtttttctgaagaaaagaagaagttgagctttaagaggaacgtggtgtcattgtcatctgagctcaagggtgtgaggagcaagcttgcttcctaggagcagttgtttgtaagggaatctcaaactagaaagcttgcggagacaaaaacaaggagcatggaagaggaagtaatcaagctgcagaaatgcttataggacaaggatgaacaactgcattcattcacaagtagcacagaacagtaccatcatgagttggatgatcttagaacacatctgtcatttactcaagctacaggagaagcaggaacccaactgaaccttcaacttgcttgttctgggagatctgtgagcaagcgagttgtcctataacagttggctcctcacaatgggtattcgacatgagccccatccctgccacagacttgggaaaggcacagtgatttttatggtgacatgaagacattcctcttcaaattatatctttaagcaaccaattttcgccctactggtgcaaacaagaatttgcaatggataggttactggctgcacttgtttgtgaatacttggagtgaccacaactaagtcacacaatgaaactttactttccagagtgtaacctgccggacttctaatagaatgaactgaaagacttctctaacaaaagtggagctgaggggagcaagagtgctaaaagtggtccaatgtttttagatgttctcgaatgttatctgaaatatgaggtttatctcttgcttgatcaacaatagaagcaaaaaatcatccttttgtttatttatgtttcccaatataaaggaaaaaggggaaatattttggtgcagtgtgcccaattcttttgtccctagaaaactgtgtagccgcctataacaggcgctatagtcagttttagctattttagacaccactactatttgtacacacatttctattatcctattttagcctgctatatccatgtatgagccttatgggaactctgcaactactatggatcctcttatacattatgttcgacatgcagacaaggtattatattgagttggaccaataatccttcatatttattgatgtgaattatgttgtactggtgtcctgtccttttgtttgtgctttataatttgtaattcctagctgctgatatggtatgatggatgggaggtggctgaaatcgttcggataagtgtcaatttgttgttttctatttttatgaatggttttctatttcagctgatgaaccttttatagttcttttattatatactgccactgattgctaatagggtgcatgtctcctatttctaggtatggtgcataaaaaagtaggaaccacaatgagattgtgatgctgcacatggcacatcaaggtgcgcaagatatgtaccatagaaattatcgtaaagtgcacacagctgtatgtatagatgtttagaagtgaccgaagttaggcttgctcaaccggggcaatgatttacttagcctgctgaaatgtactataggtagcattcaagtttgtgaccatcatgcaagtacatgtgggtttgttgaaattgtgtggtcatcggagatgtagcaaaatgttccctatcgagagctcgtgtactatatttgttttatgaacttaattttgttgatgtaggactattacaaagttctagagacaacttaatttttattacaacataatatgtggtcatacatatgttaatgtt

SEQ ID NO: 30475 - DNA, 3006 bp, Zea Mays
ctagcaggtacgtaggctgccctcgcagcaccacgcacaggcgcactagctctctctcttagcgagcggcaaaccactcttcttcctcctccatatccatctccacctatataagccgcgcgccaggcagggttgcttccgccaccactcctacataccggtccctgtccctgtcgacccctcgaggcggatcccacgatggtgaagttctcgcgggagtacgaggccagcatcatccccgagtggaaggccgccttcgtcgactacaagggcctcaagaagctcgtcaagaggatcaagatcgcccgccgcgaccgcgctgcccgtagtaccagcaacgaccacgacgacgccaccaccaccacctatggcttctccgtcctcgaccccgtccgcgccctcgcctcccacttcaacaacgccacgcccccggcctcgccagagcaagagtttgtggagagggcggacgaggagctggagaaggtgaacaagttctacgcggcgcaggaggcggacatgctggcgcgcggcgacgcgctcatcgagcagctccgcatcctggcggacgtcaagcggatcctcgccgaccacgcggcggcgtcgtcccggcgcggccgcgcgcggctcgcccggaccggcgggaactcgtcgccgccgtccgtggacggctccaacagcggccggcacctcctctcttctcccttcgtggcctcgtcgccgcagtccatgtcagacgggagcgtgcagctgcagcaggcgcgcgtggcggagggcgcggctgtggcggaggaggtgatggcggcgctggagcgcaacggcgtgagcttcgtgggcggcgggctgggcaaggccaagaaggacggcagcgggaagcagctcatgggggcgcgccgcgctgctgcagctgccggccacggtgcgcatcgacatcccgcccaccagccccggccgggccgcgctcaaggtgtgggaggagctcgtcaacgtgctccgcaaggacggcgccgaccccgccgccgccttcgtccaccgcaagaaggtccagcacgccgagaagagcatccgcgacgccttcctcgccctctaccgcggcctcgacctcctcaagaagttcagctccctcaacgtgaaggctttcaccaaaatactgaagaaattcgtcaaggtgtcggagcagcatcggaaaggagacctgttttcagagaaggtgaagaggtcgccgttcagcagctctgacaaggtgcttcagctggcggacgaggtggagtgcatcttcttgaggcatttcgcgggcaacgacaggaaggtggccatgaagtacctcaagccgcagcagcccaggaacacccacatggtcaccttcctcgtaggcctgttcacaggcacatttgtgtccctgttcatcatatactcggtcctagcccatgtcgccggcattttctcttcgaccggaaacacagcctacatggagatcgtttaccatgtcctcagcatgtttgcgctcatcagcctgcacgtcttcctgtacgggtgcaacctctccatgtggaagggcaccaggatcaaccacaacttcatcttcgacttctccagcaccgccctgacgcaccgggacgccttcctcatgtcggcgtccatcatgtgcaccgtcgtcgcggcgctggtcgtcaacctgttcctcaggaacgccggggcgacctacgccaacgcgctgcccggggcacttctgctgctgtcagcaggggttctgttctgcccattcaacattttctaccgctccacgcgcttctgcttcatgcgcgtcatgcgcaacatcgtgctgtcgccattctacaaggttctgatggcggatttcttcatggctgaccagctaaccagccagatcccactgctaagacacctcgagttcacggggtgctacttcatggctgaaacattcagaactcacgcgtatggaagctgtaccagcagctcccaatacaagaacctggcatacgtgctctcttttcctgccatactactggcgagcgatgcagtgtctgagaaggtacctggaagaaggccacgacatgaaccagcttgctaacgccggcaagtacgtatcagcgatggtggcagctgcggttaggttcaagtacgccgcgacgcctacgccgttctggatgtggatggtcattgcatcatctaccggcgccaccatctaccagctctactgggatttcgtcatggactggggcttcctgaacccaaaatccaagaacttttggctccgggatcagctcatcctcaagaacaagtcgatctactatgcttccatgatgctcaacctcgtgctgcgcctagcctgggccgagagcgtgatgaaactccgtctcggtatggtggagtctcgcctgctggatttctcgctcgcttcgctggaaatcatccgacgagggcactggaacttctacaggctggagaatgagcacttgaacaacgctggaaagttcagagcagtgaagactgtcccattaccgttccgtgagcttgaaactgactgatgaagacggagctccatgttgaacagcaggaatttagggggaagaattccaggaatggatacactgtcccctgcaagaactggtgtttaagtggtaataaaacgaatcggagagcgtaactgcacaagaccgagacgctgcagattttaggatggaataagctcaggcgggtgcgccagggtataacatgaggcgttctggtcaggagagatgatgtgcatttaactagctagtggtcgattgagaattgttgcatgtcaatcgactaacaagatcttaattttgtcgatcgtttaagttgtgaaaatgtatctgggaattggtgactgaaaaaaattgcatggaacgaaacatatggtcgttaactaatttatcattccaggggtaagaactagataacatctgctagcaagtactacagtgaaagcaagatgcttgacacggcagatggcatcacatgtga

SEQ ID NO: 30476 - DNA, 1458 bp, Zea Mays
ccagcttgcactattattgtgaaaatccattaactttagtcattgaaatggttagactatcaccacgtaggtgatattagtggcattaagtgattaatctgtggcaaatcctattatcaactattttcttggctaatcattacaatatataatgaagaatactatggcttgaagggatatttatacaattggctatgtatacggtctgcccaggcgcccaacaatgaatgatgtggtgaaggaacttgagatcatcagatagaatgaaggggcacaattgttaaactcagcgtctttatcagttgaacaatttggaaacaaaaagagaagagatccttatgcatttgtctatggatgatggaagcaacaacaacacttttgactacaacagtgggagttcaattaagttgttcacccaactttgcagataaaatcttgagcaaaatgggagaaggtttgggttttctgcaatctgtcgtctcctcttctgctgggtatctccattattattctaatgaagagggctacgagttggattttcgtaggtacatttgagcgtgttttggaatgctgggatcgtgaaacacgtgaatatgttgccataaaagttgtacacagtatccacaagtactgtgatgctgcaatgattgagatagatgtgctcaatcgccttgtagaaaatgaaaaatatagatttctgctacacttggggaatcaaagaaaagtgaaagtgccatgtcaaagttgatgaccagaagcttgctattggaaccctctctattgaaaaatacccctagatagaaattgatttggttttcaataaagagtgtgagctgtcacacacatcgaaaactacacgtgtatttttctttggttacaaggttgagcaaccaatcgaggaagatgaataatggatcttgattctgaagatgaagagaaggagctaaacattccagtaatcaaggaaaatggcaaaggtgatgggaaggaggaccagagaagtgaagagaaggcagttgctgcagcttcaaaatcaagtcttgggcttgaaaaaaagcaaggatgagtatgagtctgatgattctaatgagggtgagtgattatctcctgaagaaggcaatgttgtgatttgaagggtatggtgcagaaaagttttgtctgcatgtcatgacagtttcatacaatgcacgggcgaacgcaccgggagcctaccacctcccgtgctcaccattgctgtgtttgatacctgactactactgctgttactttgaatctccggggtgctcatggagtcatggtgcatatgctcatgtttgcagggtgtcagtttttttcatcgtctacttctagagataacaactttagcatgttggttaaagattcttggtgtgctaagcttttcttttttgcttcatttgaaactcaactatatatatggtgccctactttacattttgc

SEQ ID NO: 30477 - DNA, 3689 bp, Zea Mays
cagaaggccaccaagttgatgatcacaagctttgtccacggttcagacggcctgggaaaccaggatttccctccatcagctaccaagcctgtagatcaatcggctgctgccttcctggttgagcaaccaaatctataccctggacaagttaccattgtcgccctcagtccactaaccaaccttgctctgacagtcgagcttgaccctttgttctcgaagaatatatggcagattatttttcttggcggtgtgtattcaattaatggtaatgtgaactatgcagctgaggcaaatgtagatattgtgttcacccgcggtgctgatattttggctatggtactaattgtaacacatcaagtagttttaacccgtaattctgccatatttaagggtcacattatttctgctcaggatgtatgcttcatatactgagataatgcttcttttataacctacttctcattagtcaatggcaatctctactactctataagggtccagtgtgggcgtccacactggtaccgtgcccccgcccccaaaattctcgccccgcctcgctctccgtcgcgccattccagggaccctccatcgccgcccccgccatcatcgcgtcagcgcccgcgctccgtcgatggaaggcgccattccagggacccaccccaaccctgcgatcctcacccttccaaggatgccccgcacccatctcgtccaatccctcctcccgcctcacccgctcacaaggtcgacgacgacgaatctaaggacgccaacgccacccctctctgagctccctatggccactgcgggtgagtgcctctgggtagccggtcacccctctcttgcagcctccgagcttcggcgaacgcagaactggcagggcgcgacggccgacgcaatgtacgtgggtagccggcgtccaatgtcggccgccgctggcgagcgcccccggcgcggctgcccaaccaagctctgtccagatctgaccgtctagggcgaggtgaccccctcctggcggcgagcgagacagcccccactccaccccacctcgcaacagccaccgatcagtggagcgcactcaaaactgttggatttattttggaacttaggtgaaggaggaatgggtggagggacgagcaagatggcaacgttctattgaaacaaactgcctcgattattaggctatcattactaaacaaactacctttatcgtcaacctactaacttccatattcttcacattcagctttgcaaaatttacttgactggattttttagcttaacatataactcagggagacatgcgattttgggacgatcaaactgttggtaagtaaatacttgttggcctgttgctcttcttttagctatagctgaccataatttttcttggttgaggaaactgtagttagtgatagctcaatattttgtgtgtagaaacctgtataaagtattggacatgtatttcatagtttttgtaacttataaggctatgtaagtcacagattaactcttcaaagaattatacaacaaagaaattagcgctcagaaatgggatctttgcatttttagtcttgctcattttttattattcatgtatgactcatggttttctagagaaaaatattggaccgttacaataatgctaatatggtgttaatctaggattgctcattttgagtattcttgtacgactcatggttttctagagaaaagatcttggactgtagcactacctccacttgtgagatctggacttctgtagttatatgccatagcaacactgaaagtgacaatgtttgaatggtatagttcttttccttggtcggtgatatatattcacttgatggtatagctctgccaaaagcacaacagctcgtgcttgatccacaaaaaataggatgctcatgtgattgtattttgattttttagttttatttttgttgcatgtataatccaatcgccgagatcgacctctaccgtctcgagccataggacctcccctccctcttcaacatccgcagtcacaacgccaaggggtagttcttcgcccgtgcggtcgaggcggtcccagcaacaggaccaaccacgcacacgccgatggggtactggagatccggacggagtagcattcttgctggcccagggtcagcccacttcttgcgcaagtttgttgttgggaaccaatggaatccgactattcatttttcttgcggatggtcgtgtcggtggggtcaagaaaattctctggaatttggcactgataagatagaaatgcatgttggggctgtacaggccaacgatcgagctcttgtagtcgatgatcttattgccacccgtgtgcagctgtcaaacttatcggagatggacgatgaagcgttggatcaaggagatggaggttggatcaaggagatggaggaggtggccgccacggccaccacttccaggtcgattatgccctttagggccatccagaagggcaagccgttgtcggtgtccttggcatcgagaagaagtccacccctaagctctagaactccaggtgctcgccgtggccacaagcgtgtagtcccccgacgcagagaagaggaagggcatgtggcgtagttagagggatctgaaccctagcggtcgtccgcccgtccagatctgtgacccgcccttctcgacgcttcggtgacatgagtgcctggaaatctagggaggcgaaaaggtcagagttcagtcatgtcatgcttgatttgagttctgtgccagatcaaagcaagtagtagtacgtgagaagttaaccatgaacagacaccctttttctctttgtgtatcacagattttgaaacttgctgagagggaaaaacaaatttatggggaaaaaatgtgacactgaaagccatttgcttccagcagcttaagaattgttgcggtagatgcaactgaagagggtcttcaagtaagtaaatcaactactacaatggctcactaaaaatggtcgacaggacagtttcggaaccttattgttgttcttcagagagaacatcgacaaaggaacttgaagctccgtaggcgaaaggatctctagaaacgactaactaaattctcctaggtactactctagggaggatgctgaagatgctgtcaaatacattagtggaacaatgcttgacgatcgtccaatccgtgttgatttcgatcggggctttgaagaaggcagacagtggggccgtggacgaagtggtgtacaagctttacaaaccatgatatgtccgtgcgttgtagtagtaagaaagaactaatgttcacagttaaaaagtgtggaatgagaaccgacattaaaataggagaatatatataatgtgggtttcatacatatgttctatgtttcacatctaccaccgaaggccaagtacattttgatatactagcctaaaatgttctgctgatctgatatactagcctaaaatgttccgttgatctgattttttgctacaccctgctgccctctacatttggattgtctgtattttgattttttagttttatttttgttgcatgtataatccaatatgtgattgtatcttttgattcctggaaggatagagtttgcactagaagaggatgctcatgttgttggtgactgtgtaaaagtacctttctgtaattatcattgtctattgtttataaggattaatgttaaa

SEQ ID NO: 30478 - DNA, 1674 bp, Zea Mays
tggcagtcccgctgtcctccaaacgtcgcctatcttcccgcgcccgctcgtgtatccgtctctaagccaactccagcaacaccgtcaccgtgtgtgtttagactgatacattgtttgtagagagaattttgaaatagaaagtttgataaagagtgaaatagagagtcgctggagataatagtcgcccgcaacccatttgaaaatcacgccgtgttggcgtgtaatcggcgattcggcggccgccgggcggtggcgatggaggtgggtgacctgcacaaggtgtgggaggtccgtgcgctcaagatcaagcccgacgcgaccgccgcgcgggcaaccctcgaccgcgttgccaggcaggtccagcccatcatgcgccgccacaaatggcgcgtcaaggtcctctccgagttttcgccgcggaacccgaggctgctggggctcaatgtcggcgcgggcgtcgaagtcaagctgcggctacggcgcgccggccgcgaccatgacttcatcccgtacgaggaggtgctcgataccatgctacacgagctctgccacaacgagcgcgggccccacgatgcgcagttttacaagctctgggacgagctccgcaaggaatgcgaagaacttgtttcaaagggtatcactggaacaggacaagggtttgatggcacgggaaggcgagttggtggatttactgtacatccaccaccaccatctctgcggcaagctacgttagctgctgcacagaagcgggcaaggaatggagctctattgccttctggaccaagaaagttgggtggaaacagtgaaattatgagtgcacttagtccagtacaagctgctgcaatggcggctgaaagaagaatgtatgatgatttgtggtgtggatcacatgatcaatctgctattgatgattcggatgatgttattattcttcaagagtcgccaaatttgacaagggatgaaaaagacaagggtagctgctccaacacttctgcacagcccagcacttcttctagaattcacatagcagcacgagatgataggacaacaagtgatgcacttgatagttcaaagtgggaatgtggtgcttgcacacttctgaaccagcctctggcaccaatctgtgaagtttgtggtacaacaaaacctaaaattgcaaaggcgaagtacacaacttggtcttgtaaattttgtactctagagaacagcactaaacttgacaaatgctcagcatgtgatcaatggagatactcatatgggccacctgtagccacatatggcccaagctatgattgagataacagtgaaggccacaatagcacagacgacacttctgagcaggcatctgctgcattgtcgatataagttgtgttatctgcaacagttcttgctctattactactcatgtcatatcaggtttcataggtctggaaaaatctgatacctgttaaactggtagtactatttaagcgaccctcttttgtggacgttgcttggagcaatccacggattggtaacaactcgcacctagggcacaccggcgaattggtctttatctgttccgacgtcgtcgactcatgttgccgtggggtgaggaaatttattacgtcaattaatccgaagagcgacgaatgtcgcagggtcgccactggctggtaccgcatggtcaggttc

SEQ ID NO: 30479 - DNA, 2712 bp, Zea Mays
actgcccagctcgcaataactccttcctccccatctccacattctcccatccgccgttcccctccgcttcctcctaccatggcgtcttcttcctccccgagatctcgccatgctagctctcccgccttctgctagccagctgcgagtacggagcgctcgttttcgggcttcctgcatgcgatatcaccgacgaaacgtgtctctggaagaaggcatcacaggccgggatcggagaatgaaagctgacgatatagagcaagatgagctagggttcgcgaggcactagctgggaccgtacgtaccgtgctgccattgttcatgactccggcaaggcgcatgccggcgatgatcggccggaataatggcgtcgcgttcgggtcctcgtcagcgctatctttaagccaggctgacttcctagacagccatcatctgcagcaagcgttcgagcagcaactctttgaacagatcccagccgccgcagtggatagcagcgacaacatcatccacggtcgctccgacgcgctggtggacgagtttgagagcaagtcgtgcagcgagaatcccgatggcaccgcctccggcgatgatggccagggggacgaggaccctaaccagcggccaaacaagaagaagcggtatcaccgccacacccagcaccagatcgaagagatggaggccttcttcaaggagtgtccacacccggatgacaagcagcgaaaggagctgagccgggagctcggtctcgagccgctgcaggtcaagttctggttccagaacaagcgcacacagatgaagaaccgatttgctgcagtgttctcaagcatcgtgtcgagggcttctacgcacgaggtgttgtcaaccggtgtggcagggagctacaatggtgcattgcaagtgatgtcaatggagttccaggtgccgtcaccgctggtaccgacacgggagagctactttgcgaggtactgcaagaacaaccccgatgggacgtgggcggtcgtcgatgtatcactcgacagcctccgccctagccccgctctcaagtgccggcgcaggccatcaggatgccttgtccaagaaatgcccaatggctactcaaaggtgacctgggttgagcatgttgaggtggacgacagatcagtgcacaatctctacaggcctttggtgaattcaggcctgggatttggtgcgacaaggtgggttggcacgctggaccgacagtgcgagcgtctcgccagtgccatggccagcaacatccccaacggcgacctcggtgtgatcacgagcatagaggggaggaagagcatgctgaagctggcagagaggatggtggcgagcttctgcggtggcgtgaccgcgtctgcggcgcatcagtggacgacgctgtcggggagcggagcggaggacgtccgcgttatgaccaggaagagcgtggacgacccaggcaggccgccgggcatcgtcctcaacgctgccacctccttctggctgcctgtcccgcccaagagggtcttcgacttcctccgcgacgagacctctcgcagcgagtgggacatcctctccaacggtggcgcagtccaagaaatggctcatattgcaaacggccgggaccatggcaactgcgtctcccttcttcgtgtcaatagcgcaaactccaaccagagcaacatgctgatcctccaggagagctgcacggacgcatcgggctcatacgtggtgtacgcgccggtggatgtggtggccatgaacgtggtgctcaacggcggcgacccggactacgtggccctgctgccgtcaggcttcgccatcctccccgacggaccgccggcgccgggcatggctccccatcacggaggagagggtgctgccggcggcggcttggaggagttggaggccgccggcgggtccctcttgacggtggcgttccagatcctggtggactccgtccccaccgccaagctctcgctgggctctgtagccacggtgaacagcctcatcgcctgcaccgtggagcgcatcaaagctgccgtctgcggcgctgaaggcaacccacagtagtagccatccataagatagagaggtgaatatgctgcttcagttccttaattgggctcgaaaatacacctagcttgatgaaccgtttgaatgtttttttttttttttttgtagagcgagaggaggggtggtgcagcttttggggatcggagatatttatcagtggggagtcaagaacgcacctcagactctccttgccatgtggtgctctgatactgatgcaagcagggaaaaagaaggcgtcaccactatgcaaggggggatggttcgggtattgacttctccgtcgagtcaactagagaaaggatgcgtgctgcagagaagatgctgtttcttctggatctctttccatattttctagggtttacttcgtcatgttcgtcgtgttgttgttgttcaggctaaaaggtgcctgtgcctgctcgtaggctcgtagctagagaacagagatttgtttacctcttttattttattttttttggattgcaaagatttgtagaatctaggaccagtcatttcatcaccaatgcttggctaaaacgtgtaccgttgttgttcgtagctttcttgctatttaaaacgatgcaatttcaatcgctgagtttctagcttcttgtcttcaccgaattttgaaacgaaaacacgctggagatcatatcg

SEQ ID NO: 30480 - DNA, 1576 bp, Zea Mays
gaaggcctcaagcgccgtcagatcgctaagtcttacacaccagagaaacctagatacaggagtcatgtgagtgaccggtgagtttagtaactcgtgcatcgtagtgctttccagccctaagctcatggctgatactgaatgaataacgtcctgtcctgatgaaactcctttttaagctatgtgatactgaaatgcatgttgatattcctttctatttgtggtttagtatcaattagttcaattgtgctcgattgttgttctaccgagctagttttacatctatgccaattgtccactgtatcagtagtttagattttgtataacctttttattttgcaattataacaaaaaagtgatcaacagggatctttatgtatgcagtgatgaataatgaatgcattcaacgtgcctttcagagttacactagtgtgaaggacttaaaatgctagcagtttatagcaaaactagtttcaggctttgtattgttttattttacagtagctcgttactgtatatgtatatttgttgtctttttttatttatgtgaaaagtttgattggcttttccgggtgtatggtgccacgacagaatcctagttgcaaacagaaggaacacaatctcgttgggactagtcattgcaatcttgttgattgatctaccgattccattattggccttctttattcgtaaaatattaataagatctggttttagctatatagacttgcagtctacatgtctgccataagattgtggttctctaaaatctgagcaaaagtgctgcctggttaaaacattgtcccatacataatagtagattatttgttgtcattgatgcatgagatgctattgtttatcaccttttcaatgcatttctctgttttgtacaataggtaaactaccaattttacatgtagataccaagatggttgttccgtagattcgtacacaaaaattgtttaggttgcagcaaaatatagtagttttaaagcaccccatgttcctttttgtttctcagcaatctgtatcatacctgctgctttctgaggtggtatcattgttttcaaccatgaaatactgagcctatcagtttcagctagcatggcttggtaatatgagatgattcatgcttattgattagatcgagctaatgaaggaaaaagttatgtgttctttttctttgacaaaagaagatggagtttccatattttaactgtggttattataggtttaaacaagcgcatctgaccatggctaggagctgagcagaagagaagtgaggacactgagttaaaacgaagtcatttttttgttgcagatatttgtaacatgatatgctttgcctttatgacagcgaggcgagctgcacctgaagaaacaaaagaatcttaggaattacaaacaagggctgtactgtaataatgtggttcttgtaaaccaattttgccttagaattctgtaacttgaatcatccacagatgtgcgactgtcttttgtttatgtggatctatgaattacctgccgctcctcgtttgaactacttgcaattccattatagcatcatttgaaaatggca

SEQ ID NO: 30481 - DNA, 1294 bp, Zea Mays
gttcctgtctccgtctccgcgtcgctccctatccaatcttctcctccctcccttccccgcgtcgcggcaagacgacctcgccgctccctgcctccctctccccgccgcaggtgctggagatgcaggcgactgccgcctccttcctcgcccgcccactcccgcggcttcgccgctggggagcggatgcggcggtggtgcgtgagggcgttatcgcgctccctctgcggctgcgggggccgcggtgctccattagcctctccatcggcgccggcgccggcgctggcgccgaagctgaccacgagttcagctacgagcatgttccggtgttccctagataccgaatacgagatccctacaagcttcttggtgttgatcgtgacgcatctgaagaagagatccgaggtgcgaggaatttccttattcaacagtatgctgggcatgaaccgagtgaagaagctattgaaggtgcttatgagaagataattatgaagagctaccagcagcggaagaagacaaaaattaacttgaaaaccaagttaaagaagagagtagaggaatccccttcatgggtcaaagcacttcttggttgctttgaggtgccatcgatggatattatctccagaagattgtttttctttgctttcattgctggatggagcatagcaacttctgcagagaatggacctgcgtttcagctcgcgatatcgctattctcatgcatatatttcctcaacgaaaagatgaagaaccttctaagggcatcaaccactgggtttggaatacttgttggcggttggatcattggttctctactggttccactggtcccaacattcatcatcccaccttcatggtctctagagctacttacctcactagttgcttacattttcttgtttctgggatccactttcctgaaatgaatctgtttcaatcttgtaactggaactgttggatcttttgagagggaaattacgatgactgatctctggatttgagttttagaaattttttgcttgtactggcctcttgagattggaatactggcgttgttgtgggcttgtgacataggcttcccttttgggtctttttttcatctgatgtaaacagtttttctccctgtctggtgacggtgcagagacaaatgtggcatcggtacccatatctgggccgtgtttttgacagagatacgaaactggccagaatgcattggtaggcttgattactctgtttatctctgctgttggatattatattttctattattggatcgtcatggttggatttggacttt

SEQ ID NO: 30482 - DNA, 577 bp, Zea Mays
cagggaccgatgctctgtacggcgtcggatccaaggtcgacgtgtgcggggagggaatctcgatgggacgacgaatgacggatcgagggagagagattcccgacggcgtggcaaatgtgacgcactagcgtgacttgcctttttctacaggagcgactgagcgagcagtcccgccggcgaggcggcgactgggcagcggggtaggtgaccggccggcgcttcaacgatttcttcattcacatcagttcacgtgactcccgtaggccgtaaccgcgctgagacatccgaggagcaagacgtccacgcgaccacgtcatggcttgtccttgtagctgtggccgccccatggggcgagcagggtagtacgtaccgccctgtcgccgcggtgctgtgctgagcgcgaaagcattttgctcaaattattaccgcgccattaaaaccagtggtgtcagcgcagcgcaggagaggagggcatgttcctttgtcactcagggtcagggagcatgcgcgctgcatttccacaacggtcagctgtacttggtgccttactggtcaaactagtgtcatgatggacgga

SEQ ID NO: 30483 - DNA, 3908 bp, Zea Mays
cggccgcgggcaatcccccaatttccaattccagggagggtcgcgaaccctccattggccattgctcgatctctgtccctctcgtcgcaccttcgcagccgtcgttcaccgaggccgcggatggcgaggacttcgggcccgccgggtcccccggagcccggccgccacgacgcgccgatgctgctgcgcgtgcacgtgatcgaggcgcggggcctgccagccatctacctcaacggctccagcgacccctacgtgcgactgcagttggggcggcgccgcccgcgggagaccacggtggtgaagcggagcctcagccccgtgtgggacgaggagttcgggttcctcgtcggcgacgtcgccgaggacctcgtcgtgtgtgtgctcaacgaggaccgcttcttgggcgccgagttcctagggcgggtgcgggtgcccctcaccgcgatcatggagacggacgacctttcgctcggtaccaggtggtaccagctccagcccaggagcggcgtcaagttcaggaagaaaaggcgcggcgaaatttgcctgagagtatacttatcggttagggccaccctttgtgatgacgcacatcaagctccaccgcaacttatcgatgatatatcgtgcagctcacacaggtcaatcgaaactaatgaatcaccattatcagctactgttaacagtctggatatgtcagcctgtgccagcatggatcggacatccctcaaaagttcggatggcttcaaccaaagcatgacggaggtccgaggtcctagaagcacagggccactatcttgtgtcagcatagagcaatcaattcttctggagcctgaagaagatgatggcagtgccatcgttgatacatcctcagtagtggaggtcatgtctcggtacttccggaaaactgctgatgctacacattctgtagcatcagatcctgtgtccctagaccagtttcgaagcacacaaatgaattctgaatgtcgtgaaaatgaagagggttgcacactgcctgaggtcagccttgatgaactgctgaaaaatatggagtccaaagaccaagcttgtgaactgccaggaaacttgcctggtggtgtactaatggaccaatcttacattattgcaccagctgaactaaattctttgctgttttctggaacttcagatttctggccagaagtttctgaacttcaaggaacaagtggattcaacattgagccctggaagcatgacaataatgagaactgtttaaaaagaacaataacttatacaaaagctgctagcaaattagttaaatctgttaaagccactgaagagcagaaatacttgaaggcaacaggaagttcttttgcagttttgtctagtgttagcactcctgatgttccctgtggtaattgtttcaaggtggagatattgtaccgtataatatctggttcccagttgccattagaacagaccacacaaattactgtaagttggcgtctgaactttgttcagagtacgatgctgaaaggaatgatagagaatggagcgaaacaaggccttgcagagggttattcacatttctctgaagtactgtcccggaaagttaaagtagctgaacttgccgatgctaatacgaaagataagattttagcatcactgcagacacagaaagaatcgaactggaaactggttgctcgcttccttggaagctttgcattcatatgctctctcagtacagcactgtatatcactactcatcttcatctagccaagcctaatgtggtgcttggcggtcttgaatattttggcattgaccttccagattccattggagagattgtgttttgtattattttgatcatccaagggcataatatcatgaaagtagggcgacgttttttgcaagcctggaaacaacgtggtagtgatcatggggtcaaagctcatggagacggttggttgttgactattgcacttattgagggaagcggtgtagtaagtgcagtttttacatgcaatggaaagaggaaaaccagctccgtcaaataccagacttctgaacctaaatggaatgaaatatttgaatttgatgcgatggacgacccgccagcaagattggacgtggttgtgcatgattcagatataccaaacaatgaaactcctatcggtcaaacagaagtgaactttgtgaaaaacaatttgtcagatttgggtgacatgtgggttcctcttgatggaaggtttccccaagggcaccagcccaaattgcatctgcggatctttttgaacaattcgcgggggactgaagttgttatgaattatctggaaaaaatggggaaagaagttggcaagaagatgcacttgcgctcatctcagacaaattctgcattccgtaagctcttcagccttccccccgaagaatttctcatcgacgatttcacctgccatctaaaacggaaaatgccacttcaggttgttccaccaaaactagcaacagttggcagtccatcattgatgatcatcctttgcaaggatagaggtcttgaagctaggcatggcgccaaagcactggatcctcaagggagactaaagttccattttcagacatttgtttcattcaatgatgctcacagaattattatggcaatttggaaattgcggtcatcaggtctggaacaaaaaggtgaggtgattgataaagaacctgaactgaaagagaacccttatgaagaaggttctctattggccaacgaagatgtaaaaatgtcagaagtctactcggccgttctttctgtcgacgtcagtgcgttaatggagatgttctctggaggtccactggaacacaaagtgatggagagagccggttgcgtcgactacttagctacagaatgggagctgctaaaccgtaatgtataccaacgtcatataaactttcggtttgacaaaagcttgtcaagatatggaggggaagcaacgaccactcagcaaaagtataacttaccgaaccaaaatgactggattgtcgaggaggtgatgaccctccaaggtgtccagcatgaagattactccagtatccaattgaagtaccacatgaccagcacgcccttgagaccaaacagctgcaggatcaaggttttgttagggattgcctggttgaagggcactaagcatcagaagaaggctgcaaagaatgtcatgatgaactccgccaacaggctgagggagatcttttcagaagtcgagaaggaggtcacatcaaggaaagttccagcttcaggctaactggcgtaaagtgaacatggattgattcaggtagattaaaagatgatgatagcaattgtcagctggggacatgctcaacaatagtccattagcgtcacagtttgtttctgttagttcttggaaccctaggataggatctcactgagttcctctgtgaccgtccaattacatagaaatagatgtattctacctgatctagtaacgcaaagagaggataaggagagtagaacttcataccttagggccaaggtgaggggcggcactagtcatcctggtcgagtgagagaacgggatcactggtgtctaacactcctccctgcgtattaggaagctgaggtggcgcatcagtggcaggtgcagtgagggcactgcgctctaccgacgccttggaagggcggatccggtctctagggcacaggtcttttttttggaggtgtggcggctagagtcagttagaggtagggtcggacgaaatgcttgtgtctggttggctcgctcggttcatggtcagctcgtttaaattttttcacgagcagagctgatattttagctcggttcgttaatgagccagctcacgagctaaacgaactaccacattctagcaaaacgaaattatatgcatatcatttatggaataattg

SEQ ID NO: 30484 - DNA, 2585 bp, Zea Mays
gaagtgctgaccctcgataacctcgagaaaacattgaggtcacgagtgttggggaggagctagaccatgaagggaaaacatgagatatgggaagaagaagaaaaaaaatagagaaaggaggaggatatagataggcctcttctttccgaaaatcgggacgatcactctagacaaagtaattattttcttggaagttctgtaggagaaccttcaaagattcaatcaaataggagtaacatttcgcctagaagtcatgcaattgctgatacagggaggacttatccagatgaatgttgtgctacacaaggagaaactcatgtaatcaatattgaaaatgatacttctgaagagtttcgattaggaagcacgttaagacggacatcaccagcaaaattgacaacacctgctcagaagcacagaagggtttctggagatgactatcataatggaagtgttcctctgaaggatagtacatatcgtaagctatccttcaaacttgacttggacattctaatagtccattgcttgcaaaggttggcatttgtatgcccatttcatccaatcttttgttagaagtgcagatagtagcctagatttagaggtcatagctggtccatctcatggaataagctgttctcggcagtcaagtaggccttctatgctcccaataactcttggaagggttcccccaagtgatttagtgttaaaggactctgaagtatctgggaaacatgctcagataaactggaatgcaaagacattaaaatgggaacttgtggacatgggcagcttgaatggaactttcttgaactcccaggcagttcatcatccagatgctgagtctaggcattggggtgaacctgctgaacttgcacatggtgatattataactctagggacttcatctaaactatctgttcaaattacactgcaaaatcaacgagttcctgctggtgttggtatggcatccgatccaatggtggcacgtagaagtggaaagaaacttccaatggaagacataagcttttgccagtgtcctctgcagggtgttgaacattttgggctctttggaatttttgatggacatggtggggatggagctgccaaagctgtcagcaagattcttccagaaaatctgggatacatgttatctcatcctgaaacaaaagaacgagtgcagtcatgttctgatgcttctgatgttcttagatatgcttttactttgacagaagatgcaatcgatcatcagtacgagggatgtacaggcacagcacttcttatttggtttgatcaaaataaagattgttttgcccagtgtgctaatcttggtgattctgcttgcgtaatgagtgtcaatggaaagacgatcgatatgactgaagatcaccgggtagctagcgcaactgaaagagctaggatagcaagaactgggcagcccctgaaagatggggaagtccgtcttaatggactgaatcttgcgaggatgtttggagacaagtttcttaaggagcaagactcacgcttcagctcagaaccatatctgagccaagctgttcgtatcaccaaagcgtgcacagcttttgccgttattgctagtgacgggctttgggatgtcatcagcacgaaaagggcggtacagcttgttgttgagggaacggagaggtactctggtgacagcgcctcagcggctaaagtagccaaccgcgtgttggacgaagctaggagcttgcgaaccaaggacaacacatccttaatatttgtagattttgacattctgagaacagatccttgtatcgccaaatgacatgtcagattcaagacacctttccgtgaaccatcttcctggctgcttatatagctccaagttttggtccacccattcagttttttagtgagatgtgatatatatattcagctgtagattggcataggagcagagtccataccatgtaatctggtgcatgcttttagactctagtgcgtgcgcgctgcctgcgtgtgggtgtgtgtgtgagggggattgtcaatgagaaggtcttcatggagaaacttcctggtcaattttcaatagagttagaattttggaacaagagtttcttggccactgaccccctcaatcttgtctgaagaacgtcgggagaaacttggtgctagacccagttgctgccacgtggacagcattgagcctgagtttttgtcaagtctggaatccttttaccgcattggtgaacttcggtgttggatcactcatccattctaaatttgaaactagtttttgttctatgaattcaggaagttttggctcatttttttaccacaaaaaaatatcaacacttgtgccagaagtattcaagggacaatctagatattggcaaccaacgtgcaactgaattcctactccctagataggccttgcagagataagagaagatggggatgtacaagatcgaattagggtttaggttgatgagttacgtctaataataatatattaattccctgagaaactgaggagccgggtggccaaatccatgcaggaaaatttgatgaaagactatgatttaatcgtcgtcatcaggcatggg

SEQ ID NO: 30485 - DNA, 3091 bp, Zea Mays
ctctctctgtctgcgacgactgggtggtctaccgccgttgtcttctccggcgaagagcgcccaccaggaaggattggtaattggatgaaattgagtttgcgccccagttttgggagattatgttgacctaggatcagataaccatgtgctgatgcaatggacacccttcatagcgacccttattccaggagcagcttgcaactgcaaattagggatggctccatgtcctttgagaacaacagtgcagttttggataaacatgaggttgtcagccctcgagttggcatgacctttgagacggttgatctggcatatcaattctacttagagtatggctatcgtgcaggctttggggtctcaaagagaacttcccacagtgttgatggggttaaataccgtgctacatttgtttgttacaaaggtggcatagctaggattaagcctggcctcaaagctcgaaggaggcttgttgcaaagactggttgcaaagcaatgatggtagtgaagtttaatgccagtgagaaccattgggaagtggtttttgtcgagttggaacataaccacccatgcaatcctgagatggtcagattcatgatgtgctttaaagaccttcctgactggcaaagggagcaccgcccattcaatgccaaaactcgattgaacccgaagattcactctggtagaggcaggccacccaaccaaaacaaagatttcatggtgagatccttctcccagtcaaattattccatcgatggggcagggaagactggaaagttaaggtttgcagagggtgacgttgaagcactcttagttttttttgataagatgcaagctcaaaactccaacttcttctataactgggacatggacgatgaaggtcgtctcaagaacgtttgctgggttgatgctagatccagagttgcatatcaacacttctgtgatgttatttgctttgatactgtctatttgacatatcagtttgtcattccattggtcgcatttttgggaatcaaccatcatgggcagtttgtgttgttaggatgtggtctacttggagacgagtctccagagacctttgcgtggttattcaaaaaatggctaaaatgtatgaatgataaatcacctgaagcaattgttacgactcattcaaggccagtagtcaaagcagtcagtgaagtatttccaaatactcggcacagatacaacctttggcatataatgaaagaacttcctgaaatgtctggaagagttgaggataaagaagcagtcagtctgagaatgaaaaaagtagtctatgatacaattacatcagctgattttgagagggagtgggctgaaatgatcaaccaatataatctccatgataaccagtggcttacaaccttgtttgaagagagggcaaaatgggtaccagcatatgtaaaggatactttttgggctggtatctccactgttcgccgtagtgaacgattggaggccttttttgatggatatattacaccagaaaccacaataaagacgttcattgaacaattcgatactgctatgaagctcaggtctgatcgagaagcctatgatgatttccgttcatttcaacaaaggccacaagtcctgtctggtcttctgtttgaggagcaatttgcaaatgtttatacaataaatatgttccagaaattccaggatcagttgaagcagctgatgaatgtgaattgcactgaagtcagtaggaatggttcaatagtgacatacacggtgacagtaattggaaaggagaggaagtttgactacagagtgatgtataacagtgctgagaaagaagtgtggtgcatctgcaggtcattccagtttaaaggtattttatgtagccatgctcttgctgtcttgaagcaagagcttgtgatgctaatacctcccaaatatattcttgatcgatggcgaaaggactacaaatgccctgaggaacctaaggaaacccccatttcacagaaagctgctaaagatacagggaagggctcaaaaccagaaaacattcgggaagatcaagtggacaatctctacaagcatggacaccagtactttgctgacattgtggaaatgggagctactgaccctgatgcgatggaatacgtcctttctgtgatgaaagaagctaaagagaaagtgcgcaagtttgaggagtctcgaaaagagaagaggcctggagagggtccagtttctgctggtaaaaaaggggcgaagttttcgaagccatccacacaagaagttggcaatacaacatcagtttcgactccgactgaagcagtggcttcggtcacagtggtgtcatctcctccaatggcggcagccccaacaatgatggctatggcgccaccttcagcagctgtggccggaggaatgtttttagtaccaatgcacccgcatcccttggtgttcccacccttcccccctgcagtcccaccagcggtagctcctgtagcaccacctgctgcaccagcaaccaatgttgtctccaacacctcaaagaagcgaaagaaaagaaaggggaataattgatcttctgatgctgatgaaatgatgaatctaaaacaagatcagatcggcgaagtagaaaatgagtttgatctcacactacgcatcaggcctcgacatgagagtgagctatcgatttatctcttctgcgcgggttggtctttcgagaaaaatctcttctgcgcgggttggtctttcgagaaaaatctcttctgctggctgtgctactgctacctatgagactacctactgcagtctgcatattcctggggtgttggcttcactgcttcagctagatgctctgctgtggctgacgcagttcagtctaaggagagatgcattttgggctcagcacactgatcttgattactgtagattactagattagattgcctgtagtgtacattatcgtcctcagtgccggaagtaatctaacatgtagtccagcttatgaatgtaaagatctgtttctgattatggattgcatttatggggaaggatctggatcttattaagaaattctgatttacaagcatttgccgtcatttgagtttattggact

SEQ ID NO: 30486 - DNA, 1635 bp, Zea Mays
ctttatttacccagaaaccctagtctctcacgctcgcggagtcagtctcaccatctctctcggccgacagccggccaccaccagccgccagtagcaatagcaaattagcaacccgccgagcaccgacctctccatagttcctctacggctctaccgagcaaccgccggcgtcgaccctgccgtccaggcccgtcctgccgcggtgccgcctgcgtccctgccccagccacccggccgccacccgccgccgccagcgaggagcgagtagtagcgaccctggtccctgccgcccttgcgttcgtggctccctgcccagtgcccctgcgtcagcgtcactgcactctccgaggtggaggtggttctcaaatctcaagtccatccacggcgctactaccctcgctgcaatggagttgaggaggcctgcatcctctcctcttgtcgacaactacgtggtacctggtgacgtcgtcctggacctctctgagatgaacaaccagaccattaaactcggcgcgggtctgcgtcaggagtgtgacaccatccaggcgactagtgctgggaagctgcggcagttgaaacccaacaagtattggattgaaaactcacagaaaagatatataccttctgtagaagataccgttcttggtattgtggtcgacaccaaaccagacaactttttggtagacataaagggtcctaatttggcctttctaccagtactttcatttgaaggcggtacaaggagaaacatacccaagttcgagattggtacattaatatatgctcgagtggtgaaagcaaatagtatcatgaatcccgagctctcatgcatggatggtaagttttttagttttcagctcagtgtccattttccttaattgatcatcagaacttcagaagtatggagtaccaaattttcttcgtcttagcaaatatatcctcattgcctgtgcgaacctctcagcttgtggaatgatactcagtctggcctgttttcttttggctttatctggttgttcttttactgtattgatgctgttcctattttcaagctactgggaaagctgccgaatttggacagctcaaagatggttatatgttcgacacatcaactggcatgtcacgaatgttgttaagttccccaacgtgtccagttctggaggtccttgggaaaaaactgtcgtttgagattgctgttggactcaatggtcgagtctgggtgaatgctcctgcagcaagtactgtcattcttgtatcaaatgcaataatgaggtcagaatctttgagcggcataaaacaaagagctatggtagaaaatctattggagagattgtcatgatgataagtcagcaagcattagtctaaagtaaaatggaggagtttccattgtgtcagttcaaagtaaaagtaggaaagtttgagatcaaagtgactatccccatcaaaagattattatgtatcacgtgtcgtagtatacagtacactatactcttttttatattaaattatcaatgtatttatcaaagtcttgcgtcccttgtttaatattcgaagggcgggtctagtgcaatcgtgagacctgtctcactaaatcaccaggtcacggctttgaagcagtcttatcatgtttgtggg

SEQ ID NO: 30487 - DNA, 2726 bp, Zea Mays
acacgagcgccctcacctgctcctgcgacgctcgtcggctcagcagcagtcctcccccacaaaagcagagacgcgtccgacgccgccaccaaaagcaccttccccagccacgctccgccgccatagccgcaggaaaatatcaaatcggagccgcgaagcacaacagaaatttttttccctagggcttgcacgcaaaaccctcctgaattccccaattccgtgccgtccctcgcttcttgtgggccacgaatctagggtttatgcatggcttctgaccctcccggagatggcaccagtggtgaggagacggcgccgggccctgcccccgccgtggaggcgccgcctgctcccgccgttccggccaggtcgcgctgggccgctgagatcaaggtctacacccgtaagcacccccgcaaaaaccctaaacctcctccagaatcagcggctgaccccgtttctgttccttccccggctccgaatcccctttctgaaaccttatcctcgattcgccgctccatccaccgcacggaggcggtggacgctgcggcgctgtccgatccggcagcgccggcctcggttcccacccgggcgccgtctggggaacgtggcgccgcctctggggatccctcgtctgggctgaaccgggtcggcggcggtattcctaacggccacggcgacgaccgggcggccgccgctgctgtgaaagctgagaaagcacggaaacgcaggttaaggagtgagctgcggcgctgtctggcaggagagctcgaccaggtccgcgtgctctccaggcgactgaaggaggctgccgaggccctggcgcaacaggaggcttctgagcccgtgcctttgcctttgatggtgctgccaacacagcagcaggtggtggatgctggcctttgagaaggagaaacggacgccgaaggccaatcaattgtaccaaaattcagagttcttgcttgccaaggataggattcctccctcagattcacatgtgcgcaagaaacccaagcaccacaagaagaaacataggtccctagaatctcgtggcgcagactttgatgccgagcggcgcctgtactctcatgcgttcaagaagtcctcatcacttctgagccgcttaatgaagcacaagtttgggtgggtgttcaacaagcctgttgatccagtcacacttggtttgcatgattattttactattatcaagcacccaatggatcttggcacaataagggggcggctgagccgtgggcagtacaggaaccctaaggagtttgctgaggatgtccgtcttactttccataatgcgatgacatataatcccaagggtcaggatgtgcatttcatggcggagcagttgttaggaatctttgaggcacagtggcctgagattgaggctgaggttaactacctcgcatcatgtcctccattgccgaagaagtttcccccgccaccaattgacctgcgcttcctagagaggtcagattcaatgagacaccatgtggcattggacaccaattcaagaccgatcagtcatactcccacttatacccgaactccgtcaatgaagaaaccaagagcaaaggatccaaataagagggacatgacaatagatgagaagcgtaagcttagtgagaacctccagaatttgccgccggtgaagcttgatgctgttgtgcaagtcattaagaacaagaacttatcagttaagcaacatgatgatgagatagaggttgaaattgatagcatggatgctgagacactttgggagcttgacaggtttgtgtcgaactacaagaagaacctgagcaagcaaaagagaaaggccgagcgagcgatgcttgcccgacaagatgcagagttgcgtgcacagcaccctatacaacaaccacaaccaaccccagtcccccaagaaccttttggtgaaaaatctccaaaacaagttgtgaaagattcgctggaaggcgagcaactgccagcatctgcaccagaacaaaatggtgagaatagacagaatgcgagtagttcaagcaattcaagcagctccagcagtggctcaggatcatcttctagtggctcagacagtgatagctcctcttcagatggatctgatgctggcaattcatcttgagatataggccatacaacccctgatggtgtttagtttgccaccatctttctgtggagtaccagtgactgcggaggcttcatcaccacaccatgcgcaaaagtctgttcgattggctgctctaaatttgggtcttgggtttgcataaagtttgttgatgcacatgatgttcctcatcacgatcattgatggtccattgttatgttatggagtgatgaggaataggtggttgtgttgggcacgagcacgagagatgatgtgtagcagttcggacctttgggtgggtagcagtaggtagcctcccctcctttcccctggtctggtgatgatggtttgttggagatgtggctatatgtgcgtatgatatgccgtggctccttttgagctgtttgctggctggcgtcttccagcgatggataatacgtgaaggctgggctgcgacggcctccagcatgcagtcagttgaagtgaagtgtacgtgtggatgttccgtctgttgggtgtgccttcctttggcactgtacgtttggttcgtcagctcaggtgtctggtctacgaggagcaatgtagtaaaggcagcaggctgttcgtattggtt

SEQ ID NO: 30488 - DNA, 2493 bp, Zea Mays
ggaacgtgttgggcggccgacctcatgcctcaccccttccccgtcggcccccgactccccgagtcgccattgcctgccctcgttcggctcgatccccgcactacagcgcccgccaccaaccccgcccgcgcctccgctactaaagccgaggcctcacccaccacctgaccaccatgctcctccccctcctcagatcccacccgctcctccaccacgccgcgcgcctgtcctccccacgcacccgcctgctcctccgccgcgacgcaatcccgctcgcacgctccccgcctatccgcatggcggcctcgtccggctccggcgccagctcccctgcctcggcgccgccagctgccgtggtgcacaagtcaaagatcaaattttgccctgcttgtggaagtccaacgaaactggccatacctgatggcgatgagaagatgagggctgtttgttcttcttgtggaagagttcactatgaaaaccccaaaatggtaaatgctgaacaaataaaagaaaaaggaaaggatccatatacatttgtatttgtgctttaaattacgacactgaatgcctgttcgcacagtggccgtggattttttagttctacctacagtattttgtaggaggcaaatcacagctgcagctttaatctgcggtgaacaccccttcaattccatgattatagagcccgcattttttcattcatgtatgaagtgcttttgatgaacagatgtgtccccattttcttttttgtttaatctattggtgaaacaagggactatagctggcaatatttttttgttatatatgtgtaacacatgttggcttctattttctgccatttacaatatatatcatctggataggttgttggttgccttgttgagcatgataataaggttctcctttgcagaagaaagattgaaccagcttatggtctttggtaagttccctttgatgtttttctttcgattttttgttctgattctattctgtgctataatagttaatgtcatagctgtactatgttttgatattctcatgcaacttttttgactatgcactccagatgcatatttgcagtatttgtttgccgaactctttgcatgtactgttcagaatatgatgtcatattataatataggttttgcattttttatgttaggaatagcttttcttctgttttcacaaactccctagccaataggatatgctttcttatcttcaacttcaatgcagtaccaattgcctagttctttctgtcaaaacttttcttagatttgtgtgcgatgaacaaattttcttttcattattgaactataatcatgtactgctgtcctccaatttgagttagtttacattaacaggacacttcctgctggttatttagaggtgggggagtctactgctgaaggagcctctagagaaacattagaagaagcatgtgcagatgtagagatagtctcgccttttgctcagttggatattccactgattggccaaagttacattattttccgagcaagattgaagacccccaacttttcacctgggccagagtcgctggaatgtgcactttttgctctggatgatataccattcgattctctagcattttcttcaatcattgtcaccttaaggatgtatactgaagatgtgaggtctggaagcatcaaatttcactattgcacgataaacaaaaggttaggagccagcccttcagatcttcggagtttcgatattgataaccatatagccgtgtgaggttgaaaggttctaaaccttttgcgattgaggagaatggttttggcatacaacaggcgcgcgcgcacacaccattggagccttgtttggcgcctccctgcacattggaacagatttaaagtaggtgctggaactgtaaatgattcggtatcaaaaaggctggtttagccattttaggagattatgcgtttcgatttcatgggagttgggaggacagaattgtatcatagtgcagtaactcttggttgtaggattgagttatcctgcatgccatggttgtggcgcttcgtcagcgaccgaatgctgtaatgtggttacgattctctgagctccttttcaaccattaattccagttgtaaagcctgtattgcttcatcttttatcttttaaaagtcacgttatcttcagatcgaactgagtgctcaatacatgtgcagccatgctcgttcgtgattatttgcaccctagaaacagcaaaaggtatcaagtttgttcatcaaattcagaaagaaaaagaactttaactatcaatatctctaaaacaattgctggaatgaaaactcgggtattataagattaggtctgaatgtctgattatggatatagatgtaaaccttgttgccaatggtattataaagtttagtcgtggtaaagaaaacactccgtttatccaaaaaaaaaaaagcaattaatgtgtgttcttcgttaaaaaacaatatataattaaaaata

SEQ ID NO: 30489 - DNA, 3745 bp, Zea Mays
ctggcgaaggcaacaggggccgaagtgtcaacgtgtggctgcaatccacctccgcattcactccacgcgcacgccgctatacgcgacgctgccgagcgcatcgccgccggtccctccctcacttcctgtgcctgttctcagcccgccgcttctcagtccacttctgccgcagcccctcttctctcggtctagagatccgtccgggcgcggcagcctcgctttcgtttcggtaagcaatcatactcgagcttgcttggattccctagtccgaagggctttgttggcaatcgaaccctaaaatccttcttctgattcgttcagttagttgtagatttgtgtgctgacggatgccctgctaatccaatacatcgatccgtggcctgtctagatttttgttcttgaaaacgggcaaggtcgacatgagttgacagtgtacgagttcttgctttcttgttatctaatcaaggtgttggtgcagcttgtttaccaaaatttagggggtcacgtgaagcctgtccctgcttcaggaggggcgaatgttccttcttccaaattcccagttcgcgatgttttttccccttatggatggtcaatggtgcagtagctggcgtcaaatacttttagaatagagccttttctatctgatgtaccaatgctagaataaaactcatttgttcataactggatccctcaagcaatagtagttcttaatcttctacctttgttgaattgtgaaatatgacactgtgcttgcgctagtttgaagtccaacccaggagtgattagtggtgttcagctcagtaccgtagttctgctttgagcatgtttggtgtccggtgtccattttcgtctgcctcaatctgaatctttatgtttaccttttttccccactttcagcataatccaaattctatttgacatgttacctttttcatccatacctgtgatttggatttatgacttatcttgctgtaatttcctttgacctgattgtttagtcgtgttgaagaatgtagtatctgtggtagcatggccatgagaagccagtgattttgagttttctttgtcgttatttttctaagttagttccgcttaatatatcatgatcaaggccagttatttaattcttagaagcggtctgtgcttctgttaagtttctatttgcagaaatctagcttttactaccatgcccaattatgtctaataggcacggagaacaatcactttagaagacttgtactccttggcgtgtcatactctttgtaacaatcttaccattcttgagaagaggtacatctgtccgtcagcaatgtccatagaagagaggaagataagtgtgataagcaagagcattgcgctaaatccaaatgcagaggaatttgttccttcatcccttagatctgtcaatgattcctccaagagatcatatgcaactacggttgtctcagggatatctaaagaatccagcactgacaagccagagtcaattttacgaagtaactctgatgaagaagcacatcagtactggcagcaacagctccctgacgacattacccctgatttcaaagtcatgggacaagatgaaagtcctggacctgacagtctatcactcacagacctgtccataaatgatggcattggcacatcaatattttctccgaaccagacactgagcatgcagcaccgtgcttcgccttttatcagggacaaactaaatacacacccaaagattaacttgtctatcccaacttatatggatgaacggtcccaagccacaattttgagtccaactgcaggttccatgagtccaaatgctgctccatgggtgaagactctaaggaatgggggacattataacacaagcataagggatgccagtcagtacaatggagattctagcattggagcttcattgcacaaccttactgatgcatatcatggaagcaggcgcagcttaagctcgactatggatatcatgaatcagctggagtgcaggatcgatcgtacatacactcgtattgctggatctatgttcaggcatagtgtactagtagctcaaatataggaaaatgcttatcctctagaaggcgctgaactaccccccctcctccttgtgtccaggtcaatctattcgctgtgactccgtgtactccggttttattctacttttgaacaagaacgagcgataatgaaacgattaattattcctttgatcttccttctactaacaaaattacatgtgccgtgtttgcacacgattttattctagttcgagcatgcttcacagaaatggctattgtacttgtttactgcatggatcttctacatacatttatgcctaataacagagtaaagtcgatggacgacgcagtcagaacctcaggtcactatcatttggaaattcaagtcctacatcaccagcatcatatgcccaaaatggtcttggaaactatgctggacgtgaacacgtatccctcgatgttcctagaggaaggtacaagacgactagtttgcctgttcctggtcttggttcaagcagaggttatcagttgttgggtggctcatataatggaaaccatgatatgatctcaaccaataccccacaaaacatggctggaattcagacaggaccagcttggcttgaaagtgacgctgaggcaagcacatatttggaatcaaaggatgaagttcatgattttgcaagcctgcgacatgcagttcttgaacaggagctatacagtatacaaagcctgttggctcaggagaaggctagagaaacaacatatcgacaaagattacaaacaccacaattgcaaggcctcatccaggagcaaaatcccccaatcgatctctgtggtcttcacatcagcgaggcaatacacgtcctgaactacgagctcaacaaccgaagaaagatcgtgagatcaaccggtcgccgactccaggttatgataatatcaagcgcccgcaccccagcaaggctgactgccgccgtcgagcagtatctcatggaacacggccttctgtacacgcaggtgcaaccaggcctgctccgcatcctgctctagtaatggaactggtcgtcctagctgttgttcacaactggatcagatgaaaaagaagggaaaaagaaaagaaaagaaaagataagttgacctgtacttttgtatatggcagagattgctagcaggatagtagcgttaagaacttaagatagctcatgtaacattcatgtcaggctttttgtcagcaaatgtatacgtcttaaaatttgggagttagggaatattctcgttgtctttggtgccggtggatgcacacggcatagcgtcttcacagaatcacaatcatattctcgatcacaatcttcggtgctggtggatgcttaagttctgttcctgctggtgaattcaaattgtgagtaatgcctggtcgatgcattagttcttcacaatagtcgattcaaattgtgcgttgttagattattgttttgtattttgtctaagtgtaatgggcattggttagtctatatctctttactgatatatacaacattcagtctctataggatagggttttcaacattgtatccagtctagttctctcttccttagccgttgccaccacctggccgttgtcatcacagctcctggatggtgtgtctcttataaatatgttctagagataataacatagatgagcatattttttgtatccatgatatattgcttaattgaatatccat

SEQ ID NO: 30490 - DNA, 2321 bp, Zea Mays
tttttttacggctgttgtaccagcctaccaggggatagctagcgactagcgtccgtgagatccagagaactattgtctgccacttgacgagatcctaggggagcggagggagcctgcttatccgcgcaggaacgacggtgttagcttctggatctggggtttactgagcaccaaggctcttgcaaactccgggtttaaggcctgaggatccaggaagaggacagcaatgggggaaggtgcaggtgaccgtgtcctgagccgcctccacagcgtcagggagcgcattggcgactcactctctgcccaccccaatgagcttgtcgccgtcttcaccaggctgaaaaaccttggaaagggtatgctgcagccccaccagatcattgccgagtacaacaatgcgatccctgaggctgagcgcgagaagctcaaggatggtgcttttgaggatgtcctgagggcagctcaggtttgcatcagattcagatctcgctggacagcactgttccttttgtagtgtgcaccttctttaatcattctagctctattatcttacaggaggcgattgtcatccccccatgggttgcacttgccatccgccctaggcctggtgtctgggagtatgtgagggtcaacgtcagtgagctcgctgttgaggagctgagagttcctgagtacctgcagttcaaggaacagcttgtggaagaaggccccaacaacaactttgttcttgagctggactttgagccattcaatgcctccttcccccgtccttctctgtcaaagtccattggcaatggcgtgcagttcctcaacaggcacctgtcatcaaagctcttccatgacaaggagagcatgtaccccttgctcaacttccttcgcgcccacaactacaaggggatgaccatgatgttgaacgacagaatccgcagtctcagtgctctgcaaggtgcgctgaggaaggctgaggagcacctgtccaccctacaagctgataccccatactctgaatttcaccacaggttccaggaacttggtctggagaagggttggggtgattgcgctaagcgtgcacaggagactatccacctcctcttggacctcctggaggccccagatccgtccaccctggagaagttccttggaacgatccccatggtgttcaatgtcgttatcctctcccctcatggttacttcgctcaagctaatgtcttgggttaccctgacaccggaggccaggttgtctacatcttggatcaagtgcgcgctatggagaacgaaatgctgctgaggatcaagcagtgtggtcttgacatcacgccgaagatccttattgtaagtgtgatgcctaatgtgataaaaaaggaaaatatagcggctaaattggtgacattaagaaccttatttgaattttttttttgcgcaggtcaccaggttgctccctgatgcaactggcaccacctgtggccagcgccttgagaaggtccttggcaccgagcactgccatatccttcgcgtgccattcagaacagaaaacggaatcgttcgcaagtggatctcgcgatttgaagtctggccgtacctggagacttacactgatgacgtggcgcatgagattgctggagagcttcaggccaatcctgacctgatcatcggaaactacagtgacggaaaccttgttgcgtgtttgctcgcccacaagatgggtgttactcactgtaccattgcccatgcgcttgagaaaactaagtaccctaactccgacctctactggaagaagtttgaggatcactaccacttctcgtgccagttcaccactgacttgattgcaatgaaccatgccgacttcatcatcaccagtaccttccaagagatcgccggaaacaaggacaccgtcggccagtacgagtcacacatggcgttcacaatgcctggcctgtaccgcgttgtccacggcattgatgtgttcgaccccaagttcaacatcgtgtctcctggcgcggacctgtccatctacttcccgtacaccgtgtcgcttttttagtagtctgatggactgttagtagtttgcgttgcgtcggttgagagggaacgttggtggtggtggtgtgtgtgcagtcaggcgtggtgctccctttgtttcctggatgggatgttgctccttgaataataatcgtagtggccttggagcccttttcctgaaataagagcagcatcctagtgcttacctttgcagctgtaactggtgtttgcctcaggatttttgctcctcccttctatggattgtgcttaaaattctctataataaccttacagataaagct

SEQ ID NO: 30491 - DNA, 279 bp, Zea Mays
ccgcgcactcctggcttctctcccagccgccgcgcgctccctggctcctcattcttctccacgcacatcctcactccttcctcaacctcctcttcagccactgccgacccatggcgagctcctcacgtcgcgccctccccctactgcggcatgtcggcgccctcgattcctcagcctggcgcgctgccccttttccctgtttctgcgcacgaggtgctctagcttgccggtcatcttctgctcctcccccatggtcgtccctccctcatccctccccat

SEQ ID NO: 30492 - DNA, 1767 bp, Zea Mays
actctctaccagtctaccctaaccagcccgacagccgccgccgtttctccatcttcctcgcagcgccggcactacatcttcgctcccaccccgactcgcgctcaacacgcaggcgacggcggcagcgctcaggctcgggctctcagggacggcggggcagtcccagactcggcgtcgtcgtcagcggctacccttcccgcctctcgccaatcgcctcgcgcccgcgactccggtcctccgcacaccggcctgcgaccctgccaatagtgtataacttggagatatggatttgcaagagaagacgaccccaactcataaaggaaaaggaaagaaaaaagaaagcgcaaagaaaaaagaaagatcaaggaagagaacgtcatctgttttggattccactaatgacacagtcatcagcgaggaaatgtcagagtataatcttgatgaacctactatggaggaaaaactggcaaccctgaatttaatcaatagagagaatgaaatacatggtactgagaagcaatcgctctctgtggcaccaccaagtgcagattcagtccatatcttgctgaagcaagctcttcgtgctgatgatagtgtagcactgttaacttgcttgtataatagagatgagaaggttattacgaagtctatatcactcctaacaccagcagatgttgtgaagcttctcaagttctttgtcttgcaaatacaatctaggggtgcagtgttggtttgtttactcccgtggctgcaaactttattgaatcgacacatgagcagcatagtgtctcaggagtcttctctgtcattgctcaactcgctctaccaggtttgtaaaatgaagtaaccccgttgctttgaagaattttcaatgcaatgcccctaagaagttatataaaaaactaatagaaccctgaatatcaacacttaaattatgcttgagtggaacacccatcctggtgatcatttacatttagagatgatgcatgcctctctaggatcttactgcctggtttaaaagtgaacttgcactgtattagcgatattctattcaccagtcatcactcattaggatattctattcatcagtcggaggtggtgagtttggtctgcaacaggacaatcttattgatgcaagaacgtcaacatttaagtcagcattgcaactctctaccactctagattaccttttcagcgagattgctgatgatgaagctgatgaggaggtaccaccaccgataatctatgaagataaggacactgatgatgacgagtccgaagttgatgctatggaaaccgacagagaagaggctgaagagctaggtgctgttactgatgcctctgaaaattcagatggaagtgagatcatgagcgactgattgccttttactctcccaactgctgaagtccaaatatcaacatcaattattcacgtaagatggaattcacgataattgctcaagatagttgtgcttgtactttgtggatcttaattgagtgaatgtttcaaatagcttttggatgacatattgacatttgagctgagaaaagggtagttaatgcaattgattgagtaaagcaaacattacccatcttatagtttgtactatctgtgaagggtaattgtttctgtatatggtgcttgaggtcatatttactcatgctaacctcgacctctcggaagtgcccaagagaaccgttgggtcgatggtctaacatgcgacgtgtggtgtttttcttgtttgaatgcacaccaattcgttcttt

SEQ ID NO: 30493 - DNA, 3028 bp, Zea Mays
tattactgcctagtaatattacaacagtaatttaccataggagcttaatatttccttgaccaatcttcaacggctagttggtttggttgacgactcgtcgtccccccatgtccggtacgtacgaggccaaacccggcacaccttgtctctgtctctcatctcatggtggtgggccaggcaaggacactgacatctgggcccaagcaggcgcacagcatgtgggcctacttgccattgggataaaggccaactcggtcactgcgctccttctccttccttctctcacacactccactgctcccctcctttttccttcaaatcctcccaacaccacccagggagacaaccacccccgccgcaatggacaagattgagacgacgacgaggaggaggaggaaagggagaagcagcagccgccgccgccgccagggggcacggggaccggcgggcctcgtagccacggccttggccctcctctgcgcctgcgccttctccacgcctgccgccacggctctcaccccggacggcgaggcgttgctggagctcaagctggccttcaacgccaccgtgcatcatcggctcaccagctggcggcgcagcgaccccaacccctgtgtctgggagggcatctcctgctccgtccccgacctcagggtacaatccataaatctcccatacatgcagcttgggggcatcatttcgcccagcatcgggaggctggacaagctgcagagactagctctgcaccagaacagcttgcacggcccaatccccgcagagatcaagaactgcaccgagctcagggcaatttacctgagagccaactacctgcaaggaggtatcccttcggagattggcgagctcgtgcacctcaccatcttggacctgtcaagcaatctgttgaggggaacgataccggcctccatcggaagcctcactcaccttcgcttcctacccaggcccgttgtgtgcattgaccatgaacgagtatgcgattggttgcctgtgccatccgaacgcagcctgcacgcgcggaaacaggccaggcgttttttcagccctcagcctgcacgcgcggagacacagaaaagacgcttctccggtcgcccaggccggcgtgggcgtggctcgcattggcactgcaaccaatcacgtagtatgtatctcccaggaacctgtctactaatttcttctccggagagatcccaaatgtcggtgtcctcggagccttcaaaagcagctcgttcgttggaaatctggagctctgtggcctgtccatccagaaagcttgccgtggaaccctcggctttcctgccgtgctgccccactccgatccgctctcttcagctggcggtgtctctccaatcagtaacaacaacaagaagacatcgcgctttctgaatggcgtcgtgatcggctcgatgtcaaccttggctcttgccctgatcgctgtgctcggattcctgtggatctgcttgctgtccaggaagaagagcgtcggtggaaactacgtaaagatggacaagaaaactgttcctgacggcgcgaagcttgtgacgtaccagtggaaccttccgtactcgtcgagtgagatcattagaaggctggagctgcttgacgaagaggatgtggttggctgcgggggcttcggcacggtgtacagaatggtgatggacgatggcacgtcgttcgccgtcaagaggattgatctcagccgccaaagccgcgacaggaccatggagaaggagctcgagttcctgggcagcatcaggcacataaatcttgtcactttgcgaggctactgccggctgctccctgcagcaaagctactcgtatacgatttcgttgagctgggcagcttggactgctaccttcatggagatggacaagaggaccagccgttgaactggaacgcgcgtatgaagatcgcccttggctcggctcgaggcctggcatatctgcaccatgattgctcgcctgggatcgtgcacagggacatcaaggccagcaatatcctgctggacagaagcttggagcctcgtgtctctgattttggacttgcaaagctgcttgtagacaatgccgccgcccatgttaccactgttgtggcgggcacctttggatacctagcaccagagtacttgcaaaacgggcatgctactgagaaatcagacgtgtatagctttggagtgcttttgctggagctagtgacgggaaagaggccaaccgattcatgcttcatcaagaagggactgaacattgttggctggctgaacaccctgacgggggagcaccggctggaggatatcgttgacgagcgatgcggcgacgtcgaggtggaagccgtggaagccatcctggacatcgcagcgatgtgcaccgacgcagacccggcgcagcggccgtccatgagcgctgtcctcaagatgctggaggaagagatcctgtccccctgcatgagcgagctgtgctacgagcagcacctggagctctgagccgaggaagcctgacctgactacgatgcagtgcatgatggatgagactgtgtaggaaacaaaagttttgtagatatgacgatgatgaaccgcgtacgtagtgtaggtgtttgtgagcagctcaaaagtaggacaagtgcagaaccaacaacctgatcggcacgttacatacatagatcttctctctgtctgtcttctaatcctttttggcctttttgttctcagttttctttggacggccgtattctgtagatgagctgggaaacagtgaacggcattgagacctgagaatgaataccagagcaggacaaaataacaacagcagagggtgtttcggtataaaaagaaagacggtttaaagaaaactgatttttacaatgtccaaaccgaaaggacagttaagactgcaatatctaaactagaacctgataactgggatacagagcaccaccagtgaccagagcattgcaaagttgacgagtgaaggtaatacttgtccatacatgatgtaccagcatgtgagccttgcaaag

SEQ ID NO: 30494 - DNA, 1120 bp, Zea Mays
agcccgccgcgacgtgtctcccgctcccgcgcgcccctttccgagttgcagagcggcagggaggttgctggtcgcgcggcttccaaccaactccatccatggacctcgcccggcgggaggcggacagggccgccgcagcggagttcgtggctctcgacatccggggcgagggggagtcgcctgcgaacgacccggaattgctgatggaatcctcatttgtcgccgctaaggagttcgagcgggatcggagaggagacgtcatttcttcctcctccggtgcgtatgagaagcagacagtgcctgtgcatgttgatgactgcccgagggaacacttacagccctccacgccaactgcaggtggtggtgcaaagcgtcgtcgttccagccgtcgtgttctgggatggcgtgatcccaggaaaatactcttcgcctttgcagcattgtccagcgtgggcactttgattctgctctactttacactctctatggggaagatgacaggaggtcaagctgatggccagtgatagccttgctctgtcttgcttgcaatagcattactaatatttatttgtacagaagaaactgaataactggctgctttctaatgtagtagccaccacatccctgcgtatatcttcatgatttcctgattttagatgtttgtacataggcacaggaaagttgtattacagatacagttttaagtgaaaagcttcttctcatgaggagcgttgaacagtccattttgagatgctagttaccggctgaaacaatgtttcttatttccaatatcgaagtctgtataagtggctgttgtttgagaaatttcagagatactatccaaagttccagacaccttggttcgattttttattttttttgtttcgaaaagttacagacacttttttttttttttttgctgtggcggtgccggtgctagtcacattttttttaaaaaaaaatggggaccacttctggacaaacttatggtgaaaatatgttttgattaatctgaattgtaaactcgtcaatcctcggataatgtttgtgtaattgctgtggtgttttaaaagtaaaacaaagtctgctggagtggcacgggagctgaaaaaaaaaagaa

SEQ ID NO: 30495 - DNA, 605 bp, Zea Mays
tatatcgccggggcattgtgctatgccaaactgctcgcctcgctaaatccgctccattccctcgccctcgccgatcgccggatctctccctccgcctcgcttccgccgcacgccagggcgcacggcttcttcctccgctccctcgcctcagttcctatggggttcctgcaaagcactttttcgctgttgatcggcaccggctgcggcatctacattgcccagaactacgacgtcccaaacataaagaagctcatgaggagcctggtgggcaaggccaaggaggttgaggagtcatacaagaagacgggcaacagcaagaacaaggataacgaatagcgttgacccgcagtctgcggtccaccatctaggaaagctaattgttgcaagattattctgattattggaggtatactaccttgtacgttgtaccttggttagtaccttctgtctacttatttttttctcttaaagaaaatatgagatggcatactggaactgcggcctactcttgccccggattgaatctgtctagatgtggcaatacaatttttgagaggcccttttcatgacggcatcatgatcaagtgtgggatgaacgatgtgtg

SEQ ID NO: 30496 - DNA, 3694 bp, Zea Mays
ctcatctatacactaatcagcatccccccctcccgacggcccctccctccatctctctcacactcacctctctctctctctctgacacaaacaccgagggagtagtgactactactgtcctcagacctgttgtggacttgtggcactgactggctgagtttgatctcccttgaccacagaatcctatctgaagcagccagaagagttcctgagggtagcatgatgccatccatggcggatcctactgtcgaggctccgaatgctgaagccaacaggaggcaataacctgcaggtgatagggacctgggaactccaagctgctcttaagcaatgtatgggggtgctctccggaggcagctcccgcatccagcgtttcccttcgtattatgctctgcgaacatttgaccgagcatgggagtgcaggaggtatcaccagcagataaaggaaccgggccagaatgatagagtagccatactggttcatctgctggctttgcataatacccgaacatggatggcaaatcagggaacatagtgcagagtctgcctgatacgctgtcatccctcatggggctcaacaagtacctcgcacccagaaccagctatatcgaatcggtgtctcacatcatcgaggagttgtcaccaaccaaaccgaagatgaaagtaatggttcacacggctcaaaatatttgttctgatgatacagattcagatgctgaagctgcaaaggttcaagaggaactggttttgctggatggtaaactaaagcagataacgctgcagaggaggcagtcactaaataactatttggatctgaaagggaatataagggtgttctgtcgtgtgaggccttttcaccatgaagaaaattatcaatccagaactctgtacaccctggatgagagtaatatattcctaaaagttgctgagaccaagataaagcaatacaagtttgacaaggttttcaaccaatgctcaacacaaggtgatgtatttgctgaagtggaaccagtgataaaatcagctttagatggctataatgtttgtatatttgcctatggtcagacaggtagtggaaaaacttataccatggaaggcaagcctacagatctaggtgtcataccacgtgggattcaagcactgtttgatcgaacttcagagagcaacagaaggtttctgttcactttcagtatgctcgagatatatatgggaaatttgcgagacctgctagttccaagaggcaaggcacaaggttttaagaaggtaccaagcctttccattaaaacagatccagatggcggcatcgagattgaaaacctagtggcagttactgtcagtagttttcatgaagtgaaaagactatatgaagtggggacccactttagatcaacagcttccactatggctaattctacatcaagcagatctcactgtttgattcgtatttcattgacctcatttgacgcaccagagaggaaaagagcaagaaacaaattatggatgattgatctaggtggaagtgaaaggcttgtaaagacaaaggcaactgggaaaaggctcaaggaaggcaaagccataaatctgtcgctgtcagccctagcggatgtcatagatgcactacagaccaaaaaatcccacatcccttataggaatagcaagctcacacaaattcttaaagattctataggatgtgagtccaaaacgcttatgcttgttcatatccgtccaaatgaggatgatttgtgtgagagcatctgtaccttgggttttgcgacaagagtcagaagtattcgcctggaaaatgaagaaccacaagaagtaaaagcaagaaaggaacatttattaatggaattagaaaaggagatcagtgatctagaacaagaatgtgaaggtattgttagaaagattaagaagctcaaggagacaatggagcattttaaagggcatcagccatctgctgaagcaaattttgacatttcacatccatccagtgaagagctgaaaactgtcatgccaaagaatacaaaggattcaaagaatcggagagatgtttcttccaggttacccaggtttatgaagccaacagcgtctagccagcacaggatagacttaaataaacaaatacctgttagtaacaagacaaaaccaccagtgccaccaaagagaaggccttcctcagtttatgctgagtctgtaaggctgccagtaaatgctgcaacttggcagtcagaatgtagttctgaatgcagtatctccatgacaagtgacatgaactggataccaagtatacaagatgggacagaatgcagccaggatacatcagaatatgagaccaaacaagtgattttctcagaacatgagaaaccacctcagagtcaagtgatttcatttgaagaatcaggggagatgcaggataaaaccaaggaaatgggcatcatagacattgacagctggattcatcaacagatcattgaaaacactggcatatgtcagtgtcacactgaaaggacgctagatgttattgaagtaaatgaatatgaaacttacaattctaatactgcttcaccagttcagaaggaatttactaatggttccaaaccctcactggatgaagatagcaacctgaacctttgtccccccacgcaaaacacagaagatagcaaggaaaccagggctgttaatcaattcacaaaaacagaattatacactcctccattaaaagaactttgcggcagtgccaaaattaaggaacataagaatgaaaagcttgggcgtcatggaagttgcagaagatcactgcaggaagagctcggcaattgcaagccagagcagccagacaaggaaccaaaagctgatccaaacatgcaacctgaaattgaattccatgacaacaaacaccatataggtaagttgacaaaattcattcaagctcttcgaacagcatggattggtgctcttcttggactaggcaccatgaaccttggattagagcaagacttcttcaagagcttaacactctgatttaactagaacttcaccatttcaaaaggatttaacgaagctgtatacagtttcagtaagagtatctacttcaggaatcaatgggcactgtatatataaggctgcaatgaaatgtaagctgccaatatgccagtggcagatgaattgctagtctgaaatggtttctttggttataaatggatagtttcaagacaagtgggaaaatgggaagaaatgtgatatatgacaaattttgaattaacattatcaatttatcataaatgataaatgattgttacagtatgcagagaagctattgcaatatctgaactgagggagagttatttacatctccaggccatttcagtcgattgagcactatatatgccaaacataacatgtcacagcaatgactcttactatgatatctttcatatagcaacttttgagctaaagctgtaaagtagtggcgtattttcttccaaatatatgcaaaaggagaagcatgtagactggggtgccaaccataagtttatatcaagtcacgaggccctgcagctgattttcatacctgtaaggtccatatacttcaataaaattaaatcttttgttcaaaagtaagtctatagtagatcagagctttgagtttaactttatgtattgtgggaaaccctagccctaacacagggttggg

SEQ ID NO: 30497 - DNA, 8258 bp, Zea Mays
caaaactctgctcctcgcttaaacccgcgagcctccggacccggatgttgttccggttccgcccggccccctcgtagccatcgcctccttttagcgccgccatcccacctcgccggcggccatggcgaccccgtcttatgcggcggtgaagtgcctcaacacgtcctcgtccagccgcaagcgtttctcgtttaagagcttctcgcagcgggtggaggagatcgacatcgatgtgtaccgcagcctccacacactgaaggcggagccatccagcggatcgtccttcttcctcgacgcaattgtggagtggaggttcgatcaacttctgtggcttccatcatatttgatgcagggcacagaggagcttaatactgcagaagacttcatctcattttatgaggagatgataccattggtacaaacacttcctcaaattgtcttgcaccgggacaagctcttttccgcacttctacaaagggtaaacatgagtgcaagattgtccctggagccaatactcatgttgattgcagctttctccagggatattctagaagattttttgccttttttaggaagacatgctagtgcacttttatctcttcttaacgacggaggtgatcgcgaccctgaaatcttggagcaggtcttcacatcctggtcgtatataatgatgtacttgcaaaagtatctagtgaaagatactgtccaaattcttagcagcgttgagatatttcccgaaggactatgttagagaatttatggcagaatctgtttcatttttgctgaggaatgcacctaataatcagctaacgcaaggtctactgaaagttctacttgaggctgctaaacaaccatcacctgcacggatagacggggtggtctctttgctgtggcatgtcatgaaaggaacttccacaaagctacactcaaaagctgggcaggtcttgaagttcttgttgagcaagtcaattgtttccactctccgtgataaatttcctgatgggtcttctactgttcatgccgtcatgacagggctgattcaaagattatgcgatgaagtggatccaaaagaattaccattgatgtatacttgtttatgtgaagaaatcaactgctgtcttgaggatggctgtttggagcatttgaagtgcttgattgtttttcttgcatttgctttacaaaagaagcaaaacaatgcattcgataaggtgaagatgattaaacttgttgagttgctggttagtagatatgtgttccctggtagcaacataacaggatcttcttcaattgaggttcttggaagtattcttgactttatgctttctgttctggatgttccaaccattttgggcaatttgtccatcatatcacctttctatgccccagtgttcaaacttaaaaatccgagggtgattgtctttataaagaaacttttggtaaaaggtccccaagttgcacaacattttgaaagtcaaatattaagtgcaatggataatttcattgtaagttcacccgaggatgtcatatttatccttttaaatttctttaaaggatcaaagaagcaaatatttctttgtagcactgatggaaatcatctggattcagtggagaaaacttgcaagttctttgaatcaaaattttctttgtggatagagttattagatgatacagccggcactggtaatcgatctagtaaccagttggtttttctaaatggcataaattcaaaggatttacatgcagggaacatgaatggtcttccaatgactacctggagaggtctacttggtgcagcattgtcatcgtaccacaaactactgttggtcaacaccagcagaaattcagaatttagttttttcttatcgcttgccaagagtcacagtacatgcccacaagtactgtctgctgtagctgaatatttggattccctgcaaggagtatcatccatggaagtgacaaaagaatttgatccacaaaatctcttggagctgttctccatctttgctttcaatttgagcagtccaaccaaggatgttcggattttaacattgaggattctatcatattttgtgaagatggatcaacgtctaatcacagatgaggagcgaccacacaagaggcagagaacagaagtttctggagaggaagctgttgctaaatacgctaatgttgtggatattcttttgattattgagtcaatgccaatttcagtatctactagccgtaaaattgctatcttcatttctcggatacaaatgagtttatcttccaagatggttcatgatgattacatacctcctctcttacatggtattattggcatattgtacaatagatttagtgatctatggccacaaacactggattgccttgctgttctcattagaaaacacaaggagcttgtttggggtcagtttgttccgttcattgcaattcaccaatcaaaaggactgactgtgaaaaatcaggagaagctggaagctgcaacccaaccacagtctatttttgactgcttcaacttgtatcttgctatggactttgattgcacaccagctgtgaccgtggctaccttattgcttcaatcgctccaaaggattcctgatgttgctgaatcccgctctcgacaacttataccgctatttctcaactttatgggctatgatgatagcagcatctttagtgctgattcatatatgcctgaaaaatgtaaaggcaaacaatggaaagcgattctaaaagaatggttaaacttattgaggttaatgcacaatgcaagatcgttatatcagggcaattttctccaggaagtactaactaaaagggttcttgatgacagtgatcctgaaatacaagcaaaagcattggattgccttttgaactggaaggatgaattcttgatcccgtacagtcagaaccttaaaaatctgattgatgtaaagactcttcgtgaagagctgaccacatgggcagtttcacatgactccttgtcaattctgaaagaccatagaagtcgtgtggttcctctggttatccgcgtgttggcaccgaaagtaaggaaactgaagctactaggttctcgaaagcacacaggtgccagtcatcgaaaggcaattcttcgtttccttttgcagtttgattcaaatgaacttgagctttttttttctttacttctgaggtccttgatccctggcagcctccagcttaaaatgtttggttctcagccagacaaccttcttggaagtttctctgacattgttggaacttcaacagaaatttgtgtagagaattttacatggaaaaaggcaaatggtttcattcatctggttgaagaaatttttggtacttttgatatgccacatataagcccatttcttaatgttttattaatcattgtcgctcgcttgctggagagttgcatgaggaatcttagaaatgagagtgatgggaaatatccttgcaaccaaacaaatgaccatggtaatggttgttccataaattctgaagtgggcaattctgtgaacgtggatgaatgctttaaagaaatgcatctagaaggccatatggagacagcgtcaggatccatcaccacctatgcacttgagttcattgagaatctgttgaggttggatattgatttgcagcagcaagatgaacatttagtgaagaaagttcttcttcaacatatggatgttcttatccatagtctccatgattttgttaatcatcgcaaagagctcaacaggagatctggtacatggcttgggcaacgtgaacttaggctgttcaaattattgctaaattacatcacagatccctcagctgctgataacttcatagaccttattcttccatttttcagcaagaaagatttgaactccgacgattgtttggaagcactatgtgttgtgaggggaataattcaaaatctgagatgcaaagtatctgaaaaagttctaaatgcactgaacccattacttgcaattgttggattggaactgcgactatgtatctgtgatatttatgctgggttgtcattgaatgatccttcgatgttgtttctggctgggttaataggagatctgaatgcagtttcagcttcagaacttggtgaactagattatgacacaagacttaacacctatgataaggttaggccacaattgtttcttggcttgacagaagagcatgtgggcgccatattatctcattgtgtgtatgatatgtcatctgaagaattaattttgcggcaaagtgcatctagggctctgcagtcgttcctggacttttccgcctcagttatgaataatgatgtgtccaaatactctattgatgataaatttagagagaataataccagaagcatttgcacgatgggctgtattcagaagatattggaaaaaacttatctgcacaatatgggagtagcaatgactaaagatgtatcaattcaaaaggaatggattattttacttagggagatggtctccaattttaatcatttagcatccttaagctcatttaggcctctctgtaaggtggatatagaagaggattttttccacaacataactcatttacaggctggtaaaagatcaaaagcactgttgctttttagacagggaatcaaggaaaacaacttttcagaggatatcactatgaaagtctttgttccactatttttcaatatgttttctgacgatatcactatgaaagtctttgttccactatttttcaatatgttttctgacgtaaaagctgggaaaggcgaacaagtcagagatatatgtttggatacactatctgctgttgctgccaaagtgcagtgggaacactatagaacaatattgaagagatgcttccgagaattaaaccttagacctgataagcagaagatcatattgaggctgatttgttccatattagatgcattccatttcatgaaacctgcaaatgatgcctcaggaaattctgatgctttgagtgaagatattgattcttcccttacattctctttggtcacagtctcttctgataagcaacagtacatgcaaaaggtagtgtttccacaggttcaaaagttgttaggatcagatccagagaaagtcaacgtcaacataaacctggtagcactgaaaatacttaagttgctaccggtggattattttgagtcccaactttcaagcatcattcatcgaatctgtaacttcctcaagaatcgtcttgaaagcatacgtgatgaagctaggtctgctttagctgcttctgttaaggaactggggattgggtatttgcagtttgtggtcaagatattaagagctatacttaaaagaggttttgagttacatgttctgggctacacacttcattatttgttgtcaaaaaacattactgctgatatgtatggtaggcttgactactgtttagaagatttgttggcagtggttgacagtgatttacttggagatgttgcagaacaaaaggaagttgaaaaacttgcctccaaaatgaaagagacaaagaagagaatgtcgtttgagactcttaagctgattgctcaaagtattacattcaagaccgatttactgaagaagataatctcacctgtttctttacatcttcagaagcaacttactccaaagttgaaaaccagacttgagatgatgctacacaacatagccttagggattgagtgcaactcatctactgaaacatcaaacttgtttatcttcgtatattgtcttattgaggatactattacaggaagcagatctgaatgcaaagagaatacacaatctagtcctgatcaagacagtactgtaagaaagaccttcctgggactaggtgagagtggatcacagaattcttatatacttaccaagtttgcacttgacttacttcgtaatcgtctgaagagcatcaagcttgacaaggaagatgaacaactcgtgaagatgttggatccttttgttgaccttctgcgaaagtgtatgagttcgaaacatgcaagtgtcctctcagccacatttagatgttttgccttgttggtgaaacttccgttgccatctctgagggacaatgcaattactataaaaaatgtacttatggagattttacagagagctggaaactccaatggtcatttagtcacatcttgttttaagctacttgctgatctacttagaggattcaggatttcactttcagataatgagcttcagatgcttgttcatacccctatgtttgtagatcttcagacaaacccttcccctgttgccttatcgcttctcaaaacaatagtcaggctaaaattggtttctcacgaaatttatgatatagttgttaagataggagagttgatggtaacaacattaactgaatctatacagcagcaatgcattcaaattatgctacaattttttctgaactatccactttctgagaagcgcttacagcaacatattgactttttcctggcaaacttaaggtatgatgaatatccatagttactttatcatgatatctcactgtatgctaacactctggaaaattgcagttatgaacatccttcaggaagagaagcagtgcttgaaatgctccatgacattcttaccagatttccccagaggattattgatgagcagggtcaaaccttttttcttcatcttgtagttgctctagccaatgaacagcatcagaatgtgtcttcaatgatccttagagctattcaaaagctgttaggacgcattggtggtcagggaaagagttacatttatgagtattcactttcgtggtacactggtgagaagaaaagtttgtggagtgcttcagctcaggttattggtttacttgttggcgatcacacattacaaatgggcaagcaccttaaaagtattctggctgttgttaagaaaataatggaatcatctattattgcttctggagctatacaattaggcttatctgatgaagctgccctgccattgtggaaagagacttactactctgttgccatgatggagaggttacttcttcgctttccggagttgtattttgagaaaaacatggaggacatatggataatattatgcaagttgttgatccatcctcattcgatgttgcgtagtatttcaagctctctggtagcatcatattttgctacagtggagaagaggaaacatgaacagaaattggatgccccatcatggttgcttgttcaaccgagcaggctattcataatagctgtttccttgttgaaacaattgaggagtgagctgagtgatactacggcaaataatctgattgtacagaatgttgcatactcagtctgcaacttgcatatgttgattaggcaatcgacctccacacatcagttttggtctagcattagttctgatcgtggtgctttccttgagggttttgaattgcttggttcaagaaaagcaaaaaatatatttctcctttgtacttcaacatctagtgatgtatctggatctagcctcgacaccaacgaagagcctacatctttgttagtttcgtcaatcctaaagaagatgggaagaattgcaatgcaaatgcaggatacacagataaagaacgtgttcaattgcttcaatatgatttcatcagctcttggtcctgatgaatcactaacctatgctgatcacctcttggccccattgtataaagtttctgaaggatttgctgggaaagttgttagtgtgaagcaactggcccagggggtccagaacaagttacgtgacctgattggttccgagaaatttgttgaagtctacaagagcgttcggatgggcctgaaacagaagcgggacggtagaaagcaggcacagaagattgttgcagccgtggacccagaacgcaatgccaagcgaaagcagcgaatggcagccaagcaccgggaacacaagaggcgaaagataatggcgatgaagattggcaggtggatgagatagcttggtatttaggctctgcggaattcggtgaatcatataattgtagaggataatttttcgtgctacaagtgctggcataaaattatgtttctgttttatatgctgtctcactgacttactgcccgacgtaattttattgttgagttaccgaaccataccgtaagtaaaaattaagaggcataagcaatgaagacatagaattgattgaattatatttttttggggtggatggataagtaacaatatattattaaatgtgcaattaagagttttctggctgaggtttgc

SEQ ID NO: 30498 - DNA, 230 bp, Zea Mays
cttgatcagcagatactggagtagactccttcaaacaccacttcttctaggtgttctacaagtcaattacaaatacatgtatgcttatgtaatgatatgaaatgcaaactctcacaaggagaggtggggaacataaatatcacaaactaaaacatatgacaagaatacacatatttctacctaacttaacacttgataaaagtgaccaaattgaacttgcttaggtaaac

SEQ ID NO: 30499 - DNA, 2484 bp, Zea Mays
cttttattcccattacaacgtgcgcacaaaaagtggcaccaaaactttgaacggtggccatgctggagcgcttccctgtggccaactggccaatggaggagaaatatgaaccaaccaatgacaagtcggacccactggattgacagcctctgacgccgaaaaagccacagatcggatcgcggcgggcagaggccacctccggattcgggcgctcggcgtagccgcgcagtggtgtgtctgcctccctccttgtatcctcctcgaattcgagcggcggcgacggcgggaagggagatggaggcggttagaggcgatgggaggtggtgcgtggtgactggcggccgcgggttcgccgcgaggcatctggtgacgatgctgctccgctccggcgagtggcgggtgcgcgtggccgacctgggccctgccatcacgctcgaccgcgacgaagaagagggtttcctgggtgctgctctccgcgaaggccaggccgtctacgtgtccgccgacctccgtgacaaggcccaggtcgccagagcttttgaaggggcagaagtagttttccatatggctgctccagattcatccatcaacaacttccaccttcattatggagtcaatgtcgatggaacaaagaatgttattgacacttgtatccgttgcaaggtgaagagactcatctatactagttcacctagtgtcgtgtttgatggagttcatggaatttttaatgcagatgaatcaatgccttacccagataagtttaatgattcatattcagaaacgaaagcggatgcagaaaagcttgtgatgagagctaatggtagggaagggcttcttacatgctgtatacgcccaagtagcatttttggccctggtgataagctaatggttccatctttggttgctgctgcaagggcagggaagtccaaatacattattggtgatgggaacaactactatgatttcacctacgtggaaaatgtggcatatggccatgtttgtgcggagaaaactctatcatctgaagatggtgcaaagatagccgctggaaaaacctatttcataacaaatatggagcctataaaattctgggagttcatgtcattgattttagaaggtcttggatatgaaaggccttcagtaaaaataccagtctctgttatgatgccggtggctcatgttgtagaatggacttaccagaaatttgccaagtatggaatgaaagttcctcagctgaccccttcaaggatcaggctgctttcatgtaacaggacattcagttgctcaagagcaaaggagcagcttggttatgaacctctcgtgtcccttaaggatggagtgaagagaacagtagagtcgtactcccatctacaagctcagaatcataggagtatatcaaaggcttcaattttcctcgggaatggaaatcgtatgaaactgccttcatcccttgtgcccacacataccctgtatattcatagtacttttgtacttcatttgaaatccttaccaatttatctattcatatgcagttgcaaaaacagtactttgggaagatgcgaagcaaactgtgacagtgcttctactgttggctgttatctactaccacttatttacatgtggttacaccttcatcacagcgatggcaaagcttttgtcactaactgctctgttcttattcattcatggcatgctgccatcaaatctgtacagtcctttattatcccttttcatttgttgtatttacctactatcaaatgattaactggtattttgatcttttttccatcttttccatcattccattttgttgagtgtcctaatttactatatatttggtaatactttgcaggttcggtcacaaggttgagaaactcgaggcctctaattttcacatcacccaggcacaggctcatcatattgctaattccattagttcgaattggaactctttagtcagtgcgctaagatctctttgtagaggaaatgattggctattgtttctcaaggcttcaaagcgtatgagaaatgggaggacagcattgatagtatggtgggcgacgcctgtaccattcttctgcactttggttctgccaaggaatcatctagctagaaacaaacgtaggtgtagcttgcagactgccagttactttgtttactgatattatcttcagctccagctgtttctgggtttcgttgacctaaattttcttctgtattcatctgatggtgttgtagaattgcctagcggcacatatgcaagttttggactcttttcctcttgatagttgatgtacaatatgaaattgtacattttccccctttcccctcggagtggttctcttcccatcaacggtgacaataggctctagtaaagatcgaattggattatgattggactctatttctattcatttttgaactaaaatttatttagagtccaaagaaattgtgaagaaacatttggatcgcgatccattacca

SEQ ID NO: 30500 - DNA, 5973 bp, Zea Mays
ctccagtgcaaggggtttgttgagaaaacgacattacccatcatggggcaaatcgatcggcatgtgtttcggcgtgattataattttttcttgtcaagaaacagcacaattttcgacatagacattgaagcgtttcaactgaagccttggagacagcaaggagcggatcttactgactactttaattttagtctggatgaagaaggctggagaaagtattggtgtagcatgcttagtacaccactttttgtgcagaagcaattaaggttaggggctagatcacttgtaaatgaaacatcaggattggagcaggaatcatacaaattgaaatctgcgaaagcaatgtccaacgtagcaaatgattctggatctgaaggaagaaatgacattggcaagccaaaaggtagagcaatccatgttgaaggcagtgcgtgcgaacgtgttccttcagcagacttgtggcgtccaatacaaagggattcagatgttgtgattcaagtaaacatgacactttcaccatcaaatcagtccacttcggatgacagctcaaagttaaatcacaagggtgtggctactgaaagggtgtttgataaggaagtttatgatggaggttcctcagagggtgttgggagcaaactggacagaagagattcttattttgcacgtgaccaatctcctagccctgattattctgatgtactttctggagaatcaaaagaaaatcactattttaagagatccaatagacattcagatttcagggacttctttgaagccaccaaacttcaggatgagcatgtcaaatctgatttttattgctatccaagtaagccagacagagaaaatagtgaaagctgcagacgtggttataccccttctactgatgatagaaacatggcatctaaacttctgtggatgggtgaagctcctttcactgggcgaggcaagtctggtgatctttttttgggtcacaacagcgaccgtgacttcaaatctcgacataaagcaagaaaaggacagaggagacagagtttagatgacagaaggaatgctatatttgttgaaaaagaaaaaccaacagatagctatcatagtacgtgtgataggaagttcgtgaagagaagatctagctcatcttccctgaggaccaactatcacaattccgtttgcaatcaatcttatgagcagcgttattcacctcttgaaaaaaaagctctgaaaaacgatgagcattactttagcgatgagtctaattaccaccataggcagtctttgtcatgtgacatcaatgaaggagatattgacaagtgcttctcttcagcgaaggagtggcaacgagatggtgaccatatataccattcaatggtaaaaactgatatgcctgatgctaatgatggacgcatgtacagagataggtatagtccggaaaagaaaatagccagacatgaccatagcatggatgttgaattttcccattacactgattacagattttgcgagtggcggagtctggaggtaagaggcagatacagagataaaggaaaatttgccaaaagcaatgatgggcatttcagacatgctaaccatctcgagttgtattctggcctcaacaattttgagagggacaaacctgctactggcttccctgttatgagctcaagaaacagatgcatcgataacaaagaagtctgcaatgctaagatgacacaaaataattgccatgggtatcatcaaaagaacaagcaacatgattcatcattttgtattggcaacattcctcgatatgctttgcgcactgatacttatgctgaaaagggccattttgttctgccaattaagaggaagctttattctgatctgggttccatggaccaaaggactcttgctgatttgccacttctgaaaggaagattgatgcatggccaatccattgccagtgacaggaggatttatgctttgaagctgcataagtcgacaaagaaaattaatacagaagccatttgtagttccagtgatatgagaaatattaatactctttcaaacatttgtgttggcagaagacatgagctggataatgctgataacatccacttgaatgatagaaaaataaagtttgagagggaaggtaatgagttaagacgtgtaattgaagataaccaaaagggaagccatcctgtggataaggatttgcacacttctagacataagcatgtacatcagaagctgtggaaacagaatctgagtcaccgtcactcaggcaatcaggatttggagaaatcagcagaccagaattgtctaaataaagatgtggagatcgaggaaggagaattgattgaagaggaccataataatatcatttataaaagcaagcttaagcaggaaaatgttgtactgaaatcagttattgaaacaagttcagcagagcagttacaggtgaataatgcaacgtcgaaggatgctacctgcaacaacagagctacaagagaatctgatgagaaacacattcttgaggtaatggaaaagatgcaaaaaaggagggaaaggttcaaagaggctattgcaccaaaaaaagaagtcggtgacaagaaagacctatcggctttagcatgcagtacagatttcatccagaatcaacggcctgctaggaaacggcggtggggtggtaattgttggatgctggaaatgccttgagagtttgtccgtgatggtttcttcaacaaggtgttctgcttatgttgctcaaaacattttactgttatgtttacttattctgatggctgggttggggaaacaaaatatagaaagcatattcttcaggcacttttatagatatagtatcttgcatagtttaagagtaaaaaggttcgacttcaaatgtaacgtgtttgtggggttctttcaaaccactggagatgatttactatcccctaagatgagatttaaatggtttcctttctgcaggctgctaaatgtttctctgtgtttatgtattcaagtttatctcttcatactctgaatgccatcatctccagagttctttttattattatgcagcaattgtgtttttccccgattaagccagtcacatacaagttgcagtctgcagttagttgttgccttacccactctgtcaggctaatatatctgtctgagtcagagagaagaacggacatttgccctctcgtcagaaggcgaacacgcgagcagctccattgccaagagaatttggagaacgctgagacgacacgatcgtgcccactgcccacgagaggagttgccgcctgtcaaaggctggaagcggggacttgtggggaagatgggaagccgccttcaactcctgcagacagaataacagaaatatcgaacgacgtacacactccagctccgacaccgtcatccgtcaagtcgtcaactgacagtgcactcggcggtggttcgaacgccgaaccgacgtggcgcgctgacgacctccaaccgtgccctcatcccagcctcccgcttccgtccctgcaaggtccaagcccggtacggcaccgcatccgagagggcagacccgtcagtccaggcccctcgtccttcactcctccttcgcctctcaaaggcgcgcctcgctccaccattcccactggcgatttgcaacagacaagctccactagagctcggccggcatccatggcgatgcggctcctgtccccgtccacgccgcccccacgcttcccgagccccggccagaaggcacccgcctccatctccgcatcgtcttcctcgtacttctctgtccgcttgcgccgcgcgcgcgcggcggctgcagcggctgcaggcgcggccgcggcgggcgggtccgaccggcgcagcggacgcttcgagggggaggcgatgagcggggcattcgacaggggcctcgcggagatcgcgaggaaggtgccgctctttgagcccacagcggacggggagctcgccgctgcggctggcgagcggccgttgcctatcaatctcgagctctggctctaccgcgtcaaagtgcacaccagaaagttcgagttccctgaagcagaaaaacttctggacaagtgtatctcattctggcctgaagacggacgtccttatgtggcgctggggaagctgtatagcaagcagtcaaggtatgacaaagctagagcggtgtacgaaagggggtgccaagcaacgcaaggcgaaaacccatacatttggcagtgctgggcagtcctagaaagcaagggtggaaatattcgaagggcacgcgagctatttgatgccgctactgtggctgatgcaaagcatattgctgcttggcacgggtgggcaattttagaaataaagcaaggaaacataaaaaaggcacggaacctacttgggaaagccctgaaatattgtggaggaaatgagtatatttaccaaactcttgctttgcttgaagctaaagcagagcgctttgaacaggcacggactttgttcgagcaagccagtcaatccaatccaaaaagttgtgcaagctggctagcttgggctcaggtagaaatgcgtgcaggaaacaataccatggcaagaaagctctttgagaaagctgtccaggctagtcctaaaaaccgattttcatggcatgtatgggcactatttgaggcaaatgaaggtaacattgacagggcaaggaagttgcttaagattggacatgctgtaaatcctagggaccctgtaattctacagtcactcgcgctactggaatacaacttttcatctgcgaatgttgctcgtgtgttattcagaaaagcgtctcagattgatccaagacatcagccagtttggatagcttgggggtggatggaatggaaagaaagaaatgcaagaacagcaagagctctctatcaaagagctttgtcagtcaattcaacaaatgaatgtgctgctcgttgtcttcaggcttggggagtcctagaacagcgtgctggtaactacacggccgctagacgattgttgaggtcttcactgagtataaactcccaaagtgaggtgacatggatgacatgggcagcacttgaggaggaacagggggatccagttcgagctgaagaaattcggaacctttactttcagcaggttagttcagcgtactgaagttgtggatgatgcatcctgggtcataggcttcctcgacatcatcgaccctgccctagacagcgtgaagaggctactaaacctggatcagccttctagaccggcgaggcaagatgatgttaaaagcacaacagaaccgtgtcctcccactgccaagtcttcagaaacttctgcgggcaatgatgctcgtaacaacgggagcgaagcaatggggactctaacaagtgatttcgatttggatgctttcatcaagaagaggctggccctcgacccatcggagctggatgccgtgctcgagggctctgacccgaggggtgttgtttctcagaggaggaaacagcggctgcccaggaagccactccctcttctccctgtcccgtaaattttccagatcggtctgtctcatttccattccaccggtaaaatccataagggctagtttgtttgagactccatttttttccaagtgttaaaaataaaaatcccttgaaaaaaatgaggttatcaaactagccctaaatccctaactgtagcagcctgcaatacgtgaatatgtgtgaggactaaggagatgacgtcccctgccgctgccatagcaatcaccacacctgttaattgtcattccagccacgtgtatgtaattctgccaccatttgttagtaaagtctagctctgtacataaattagactctttttgtctacataatatcgccggactaagttatcgagaagtattttgacaatggtagtgccattacttcaacaccttagagcatccaagaaaatatgtaaaaggttcccaaaaccatttttgacggcgaaacaccatcttcattcact

SEQ ID NO: 30501 - DNA, 3168 bp, Zea Mays
aaaaaataaactaaaataaagggagagaaaaactgtcttttgctacagctgagctagaaaaggaacctttttccgcgcgttattcttcttcttgtattcgaaagcccaagcccaactgataaaaggcccatgctcaagcgataagacgagaataaacaaccaccgatcccccagggcccaggcccacgcgcacacattctgattccgaaggcaagggcgtgtacatggcggtgagacgaggagccaaaacccaacggcgacgagaaatccacggcggctagttcaccccatccggcgcgagcgactccctccgcctgcaccaaaaacgagggcgttttcgtgtcccctcctccaaactccggagcccacatcctccagtccccactcacctgcgccactccccaccacgctcctcaaaaccctaggtccttcgatctaatgccgtgagctctcgaattctcaattcccccagcctctccatggaagaccccgtggcggtaccctcctcgtccttgaccgaccctgccgctgccgccgcagctagggttccgggtgcggtggcagcagcccctggcgtcacctctgcgccgtccgctctcgctccgacgcagccgcctgccaccgcggccgcggtctctgaagccgcgacgccgtgccagaggcagctgttcacagtggagctgcggccaggggagaccacaatcgtgtcgtggaagaagcttctcaaggaggccgggcacaccgccgcggcaccgccagtggcggtggagccagcgttcgccgcacatgcgggcccatctggtccggcacatcctgcagaaaatgacccaaaggatccaacacagccaaatcggttcaatgcagtgattgaaaaaatagagcgcctttacatgggaaaacatagcagcgatgaagaggatcttaatgatgtaccagatgatgatcagtatgacactgaggattctttcattgatgatgccgaattggatgaatatttcgaagttgataatttgaaaactaagcatgatggctattttgtgaacaagggaaaattggaacagattgaacctggtacagcggcaaatgttgctccaaagaaaaggagaagaaaggatgcatcaagttcttatctggagagtaatcaccttggtccaattgattattttgatattggcgatgtacctgaaaaatcctctgcaagaggtactgtgcagacgggaaaacagttagttagtagcaacgtaagttcttatggtcaataccatgaggacaatagagtggtgaagaataaaatcagtggtcctggaggagcccctaaaagaaaatcttctgaattctcgggtgacgctgcagcacgagctaagattattaaggatgtctcgcatgctcctttggagctaagagacatggaaaagcataaagctgcagcactacctgttgactatgcacataagtcaaaaatcagcgaaacatttgattatgcatatccagcttatagggataaaggcacttcagggcaacttgatttccaacaaagaaagataagcagggaaaatcaaggtccatcaaatagaacctatcgcaaagagaaacatggaacaaatgaatatcctggcatcgctatggctactgcggtctattctacacaaacaatgcacccagttgttggtagggagggttcaggaactaaacccaaaggcaccaggcttgagcgagctattcgcgatctccagaagatcgttgcagaatacagaccaccaacaattgatattaatgaggtagatccaaatggccaggtagcagttaaaagacggttgcctcctgaaataaagcaaaagcttgcgaaggttgcaaaggcaaataacggaaagatccaagaacatgagctaatgaatcgcctcatgggcatagttggacaccttgttcagcgcaggacactgaagagaaacatgaaagaaatggtagaatctggtatatctgctaaactggagaaggctgacaggtttcagcgtgtaaaattggagatcaatgagatgattaaagagcgtatggctacaaagtccaaggtcaatgaacaggatggttcagctgatgattttcaggttgctaatgatgaaagaagagctttaaaaacaaagtatacaatggatactgcattggaggacaagatgtgtgatctgtatgatatgtatgttgagcctgataaggcgttagcacgaattgttagctttatcatttgcatgttagtgaagggtatggatgaagacaagggccctcaaagcaggaagttatatgtagagcttgccgagttatggcctcatggttgcatggacaatgtcgggatcaaagatgccatttatagatcaaaggagcgaagaagattattgtacagccagcaaaaggttcgcagtgaagagagaatgaagaggaagaggctggctgcaacagcaaagctgccagatggcctcgcagttgcaatgcaaagtggagttgccccacaagttgcacagccacccataacaaatcccatcacataccatacggctgattatggacagaacccggggttaaaatattttgatagggctcgtgaaacgagctccagtgcaatccctgatgacggcaacagaattgctggtgaggtcaagaagaagaaaagaaaacctgaatatgaccctgtagatacacaagctaacctaccaagggctcccatgccgcacgggagcgagaagcaaaagccttctaagcctgctgacgaggccagtgctggtagcctgccctccatggcgacaactcaaactgtgcttggcctaccgtcggtgcttggtcataaccaacaacctagctgattctttcggcgtagtgttggacatttggttctccttataggcctttttcagctgctgtaacaaattatggcctttccatgtgttcagcatcgattgttgagactaacatgttcccgagtagagaggatatttgatcactctttacttttccagcattgcatggttggtacccttgcccagattatctgtgcagcgctgatagatatgatctgcaaccccttcaaataccagttgtaattatgaatattttctcgagacatgtactgctcatattgtgcgaagcgatgtgcagattttcttttacttttgttcaagtgtg

SEQ ID NO: 30502 - DNA, 4857 bp, Zea Mays
ttacaacgtgtgtgatgcacaattttttctgcagtgatttggtggtttgatattgtaaagtgtttgatgggttatgttggtcttcagcgctgtacaaaaaggatgtgtgatgggggttttatagtcaaaatagatagtgcttgctcgcccattacatccttgtgatgatgcatcaactgagctttcttgggccggccatgtagctacacagcttattgctgctgcagggaagaggaacatactaggataaaagaactatttttttagtctatttacaagtaaatgtgtccttaaaagtgaaatgtggcatctgaagttgcaggggatattgtatttctattttgcccctttgttccacacaaggttactaagtcgtcacttaacgcttaagcgccaaagagattaggggtcgccatagaggcaaagcgtcgctccattgccttacacgcatgccactgcccgcaaaagtgtgccatatcccactcaattctgctccatgtccactcgattctgccttatctgcttgattccgctgctgctcgcttgctttcttacatccccgcttgccaatcactcgatctggaaggggaagctgttggcggttggtctgaaggtgcaggacattggggaagtgaaaggaagcagagaggttgcgagtggtggcagcacatctggaggaggacaaactcagagagggaagcgacagtcagggtgggggcaagggcagaggtggaagaatggccctggagaaggatgcctctggaatctggatcatgatgtatagataaatcaagatcacagggtggaccagactctaagaaggatctaattatccataaggatgggaatagtcaaaatattgcagcacagactttcacttttcgtgagctcgctgcagccactaagaacttcaggcaagattgccttttaggagagggaggttttggtcgtgtatataaaggacgcttggagaatgggcaggctgttgctgtgaaacaacttgatcgtaatggtctccaaggaaacagggaatttctggttgaggttctcatgctcagtctcttacatcacactaacctggtcaatctaattggctactgtgctgatggtgaccaacgccttcttgtttatgagtttatgccattggggtcactagaagatcatctgcatgatctgccaccagataaagagcctcttgattggaacacacggatgaagatagctgcaggtgcagctaagggcttagaacaccttcatgacaaggcgagtcctcctgtgatttaccgggattttaagtcatcaaacattcttcttggagaaggatttcatccgaagctatcggactttggccttgcaaaacttggtccggttggtgacaagacccatgtttcaacacgtgtgatgggtacatatggctactgtgccccagaatatgcaatgactgggcagctgacggttaaatccgatgtgtatagctttggtgttgtgttccttgaacttatcacggggcgtaaagcaattgacaatactaagacccaaggggagcaaaatttagtggcatgggctcgtccactgttcaaggaccgaaggaaattccctaaaatggctgatccaatgcttcagggccgcttccctatgaggggtctataccaggccttagccgttgctgccatgtgcttgcaagagcaagctgctacacgtcctcacatcggggatgtcgtcactgctctctcatatcttgcttctcaggcatatgacccaaatgcccctgttcaacacgtccggagcaattcatccacccccagggccagaaaccctgctgggtggaacggcgaccagcgcagcgtgcgctcgcctaaccatcattctccagacccgcggcgcagagacgctgcgggggcatccaagtatggagcagaggttagcaggactagctctaccagcgactctggccggcgatcaggcctggatgacatggacctgaccgggtcgcaagtgggaagcccagcgcagaccggaagaagaagagaagctccaaggggcaccgacagacagcgtgctgtcgcagaggccaggacatggggggagaattcaagggagcgaacaaatggccatggcagcttcgacagcacccatgagtgaagccgtcaggttctgttccagtcatcattccagaacccccaccatgggttgagtccactcattcatcagcaccagtcagatccgatcttgggacatggcgtcggtccaagtgtctgtgaataaggcttttcttgccctcctgtggcgaatgcaattctcctggcgcccattccttgccaatgcgacctgtgtgtgtcatgcctctggcgactgggagcctcaggaggagcctgtaggattcagtcagaggtagacaggtcagtgaagaaagaggaggggcgcggagtcacattggcgagtgttttgttttttttggcggctaaatgctgagtatgttcagctgcatgtgtcctttttgtgtatgtgtacgtgtaagacgtgtaatagcaaccgtgtcaggtttggctacctgagaggcctttgaagcttctgctgctgcttccttccccttgggaattgggagttcagagttgaaatgtaggataggcgatgttgttgagtacatcaactgtttttacccttccatgttgtacggcgacgcttccctgaacaatatgaccatgatgtgcccccctgtccgccaatggccaatccgtgtaggtgcagacgactggtctctgcacgcgtcaagacacccggaggcggccgccggcatcgcaccatccccgaacatgggtggcggccgcggcggcgattcagcgctgaccataccacagatcgggagcatctgaacaattgtgaacgaaagaagaagaagaggccaccatactgatgaccagtcgatcacggcagaatctcgccaagatccgaaatcactggctggtgagcggcagcagagcccagacgtcaggtaggagatggctctcacgagaattggcctcgccggcctcgcggtcatgggacagaaccttgccctcaacatcgcggagaaagggttccccatctcggtctacaacaggacaacctccaaggttgatgagaccgtgcagcgtgccaaggtcgaaggaaacctcccagtgtttggtttccacgaccccgcgtccttcgtgagctccatccagaagccccgtgtcgtcatcatgctcgtcaaggctggggcgccggtggaccagaccattgccacgctcgcggcgcaccttgatcagggggactgtatcgtcgatggtggcaacgagtggtacgagaacacggagaggagggagaaggcgatggaggagcgcgggctcctatatcttggcatgggcgtctccggaggagaggagggtgcccgcaatggcccgtccttgatgcccgggggctccttcgaggcatacaagtacattgaagatattcttctcaaggtggctgctcaggtacctgacagcggcccgtgcgtcacatatattggcaaaggtggatcaggcaacttcgtcaagatggttcacaatggaattgaatatggtgacatgcaacttatcgccgaggcttatgatgttctcaagtcggtgggtaagctcacaaacagcgagctgcatcaggtgttctctgagtggaacaagggtgagctcctcagtttcttgattgagatcacggccgacatctttggtatcaaggatgacaagggtgaaggctacctggtcgacaaggtcctggacaagaccgggatgaagggaactgggaaatggacagtccagcaggctgctgagctttctgtagctgctcctacaatcgaggcgtccttggactccaggttcctcagcggtctgaaggacgagcgcgttgaggcttccaaaatcttccaaggtgactactccactggcctaccggtggacaaggcacagctgatcgaggacgtgaggcaagctctatatgcctccaagatctgcagttacgcgcagggcatgaacatcatcaaggccaagagctcagagaaaggatggggcctcaaccttggtgagctagcgaggatctggaagggagggtgcatcatccgtgccatcttcctcgaccgcatcaagaaggcgtacgataggaaccctaaccttgccaacctcctcgttgaccccgagttcgcccaggagatcatagacaggcaagctgcctggcgcagggttgtctgccttgccatcaacaatggcgttagcaccccaggcatgtctgcaagtctggcctacttcgactcgtaccgcagggataggcttcccgccaacctggtgcaggctcagagagactacttcggcgctcacacgtacgagagggttgacatgcctggttctttccacaccgagtggttcaagattgcgcgcaactccaagatctgaacatggcctcgtgtttgcatatgccagtatgccaccgtgtcgagtaatcaatcatattactgcttgcagggaggaactgtgtttgatttttattttccatgcgcaatgcttaatttaggtcaggaagtccaaagtctctcccattgttttcctgtaagagctaagcagtaccagatggagaaccttatatttgctggaacatgaataaaagcatttgacatgcttgtgtttagttctctgtcggccatgcattatattttcctttccccttgacagaaattctctcctgtactgaagtgttggctactagtactaatttttccagtccctgcacaatccaaactccacctgatgggcaactttgcagtggcttagcatttggtgtcatctcacgaatgctcatgctgcccgttta

SEQ ID NO: 30503 - DNA, 7708 bp, Zea Mays
caaaactctgctcctcgcttaaacccgcgagcctccggacccggatgttgttccggttccgcccggccccctcgtagccatcgcctccttttagcgccgccatcccacctcgccggcggccatggcgaccccgtcttatgcggcggtgaagtgcctcaacacgtcctcgtccagccgcaagcgtttctcgtttaagagcttctcgcagcgggtggaggagatcgacatcgatgtgtaccgcagcctccacacactgaaggcggagccatccagcggatcgtccttcttcctcgacgcaattgtggagtggagggagcttaatactgcagaagacttcatctcattttatgaggagatgataccattggtacaaacacttcctcaaattgtcttgcaccgggacaagctcttttccgcacttctacaaagggtaaacatgagtgcaagattgtccctggagccaatactcatgttgattgcagctttctccagggatattctagaagattttttgccttttttaggaagacatgctagtgcacttttatctcttcttaacgacggaggtgatcgcgaccctgaaatcttggagcaggtcttcacatcctggtcgtatataatgatgtacttgcaaaagtatctagtgaaagatactgtccaaattcttaggatcacagcagcgttgagatatttcccgaaggactatgttagagaatttatggcagaatctgtttcatttttgctgaggaatgcacctaataatcagctaacgcaaggtctactgaaagttctacttgaggctgctaaacaaccatcacctgcacggatagacggggtggtctctttgctgtggcatgtcatgaaaggaacttccacaaagctacactcaaaagctgggcaggtcttgaagttcttgttgagcaagtcaattgtttccactctccgtgataaatttcctgatgataaggtgaagatgattaaacttgttgaggatgttccaaccattttgggcaatttgtccatcatatcacctttctatgccccagtgttcaaacttaaaaatccgagggtgattgtctttataaagaaacttttggtaaaaggtccccaagttgcacaacattttgaaagtcaaatattaagagtatcatccatggaagtgacaaaagaatttgatccacaaaatctcttggagctgttctccatctttgctttcaatttgagcagtccaaccaaggatgttcggattttaacattgaggattctatcatattttgtgaagatggatcaacgtctaatcacagatgaggagcgaccacacaagaggcagagaacagaagtttctggagaggaagctgttgctaaatacgctaatgttgtggatattcttttgattattgagtcaatgccaatttcagtatctactagccgtaaaattgctatcttcatttctcggatacaaatgagtttatcttccaagatggttcatgatgattacatacctcctctcttacatggtattattggcatattgtacaatagatttagtgatctatggccacaaacactggattgccttgctgttctcattagaaaacacaaggagcttgtttggggtcagtttgttccgttcattgcaattcaccaatcaaaaggactgactgtgaaaaatcaggagaagctggaagctgcaacccaaccacagtctatttttgactgcttcaacttgtatcttgctatggactttgattgcacaccagctgtgaccgtggctaccttattgcttcaatcgctccaaaggattcctgatgttgctgaatcccgctctcgacaacttataccgctatttctcaactttatgggctatgatgatagcagcatctttagtgctgattcatatatgcctgaaaaatgtaaaggcaaacaatggaaagcgattctaaaagaatggttaaacttattgaggttaatgcacaatgcaagatcgttatatcagggcaattttctccaggaagtactaactaaaagggttcttgatgacagtgatcctgaaatacaagcaaaagcattggattgccttttgaactggaaggatgaattcttgatcccgtacagtcagaaccttaaaaatctgattgatgtaaagactcttcgtgaagagctgaccacatgggcagtttcacatgactccttgtcaattctgaaagaccatagaagtcgtgtggttcctctggttatccgcgtgttggcaccgaaagtaaggaaactgaagctactaggttctcgaaagcacacaggtgccagtcatcgaaaggcaattcttcgtttccttttgcagtttgattcaaatgaacttgagctttttttttctttacttctgaggtccttgatccctggcagcctccagcttaaaatgtttggttctcagccagacaaccttcttggaagtttctctgacattgttggaacttcaacagaaatttgtgtagagaattttacatggaaaaaggcaaatggtttcattcatctggttgaagaaatttttggtacttttgatatgccacatataagcccatttcttaatgttttattaatcattgtcgctcgcttgctggagagttgcatgaggaatcttagaaatgagagtgatgggaaatatccttgcaaccaaacaaatgaccatggtaatggttgttccataaattctgaagtgggcaattctgtgaacgtggatgaatgctttaaagaaatgcatctagaaggccatatggagacaagtgtatccatcaagcagttgaaggatttgaggtcttcatgtattagagttgtctcgtcagcccttagtcactatgaaagccatgagtttggagaaaacttctggggtgtttttttttcttctgtgaaacctctgatagactgctttacacaagaggcttccagtagtgagaaaccaagttcattatttgcttgttttatggctatgagccggagcccaaaattagcaccactgttggggtcaaataatcttgtaccagctattttttctattttgactgtgaagacagcgtcaggatccatcaccacctatgcacttgagttcattgagaatctgttgaggttggatattgatttgcagcagcaagatgaacatttagtgaagaaagttcttcttcaacatatggatgttcttatccatagtctccatgattttgttaatcatcgcaaagagctcaacaggagatctggtacatggcttgggcaacgtgaacttaggctgttcaaattattgctaaattacatcacagatccctcagctgctgataacttcatagaccttattcttccatttttcagcaagaaagatttgaactccgacgattgtttggaagcactatgtgttgtgaggggaataattcaaaatctgagatgcaaagtatctgaaaaagttctaaatgcactgaacccattacttgcaattgttggattggaactgcgactatgtatctgtgatatttatgctgggttgtcattgaatgatccttcgatgttgtttctggctgggttaataggagatctgaatgcagtttcagcttcagaacttggtgaactagattatgacacaagacttaacacctatgataaggttaggccacaattgtttcttggcttgacagaagagcatgtgggcgccatattatctcattgtgtgtatgatatgtcatctgaagaattaattttgcggcaaagtgcatctagggctctgcagtcgttcctggacttttccgcctcagttatgaataatgatgtgtccaaatactctattgatgataaatttagagagaataataccagaagcatttgcacgatgggctgtattcagaagatattggaaaaaacttatctgcacaatatgggagtagcaatgactaaagatgtatcaattcaaaaggaatggattattttacttagggagatggtctccaattttaatcatttagcatccttaagctcatttaggcctctctgtaaggtggatatagaagaggattttttccacaacataactcatttacaggctggtaaaagatcaaaagcactgttgctttttagacagggaatcaaggaaaacaacttttcagaggatatcactatgaaagtctttgttccactatttttcaatatgttttctgacgtaaaagctgggaaaggcgaacaagtcagagatatatgtttggatacactatctgctgttgctgccaaagtgcagtgggaacactatagaacaatattgaagagatgcttccgagaattaaaccttagacctgataagcagaagatcatattgaggctgatttgttccatattagatgcattccatttcatgaaacctgcaaatgatgcctcaggaaattctgatgctttgagtgaagatattgattcttcccttacattctctttggtcacagtctcttctgataagcaacagtacatgcaaaaggtagtgtttccacaggttcaaaagttgttaggatcagatccagagaaagtcaacgtcaacataaacctggtagcactgaaaatacttaagttgctaccggtggattattttgagtcccaactttcaagcatcattcatcgaatctgtaacttcctcaagaatcgtcttgaaagcatacgtgatgaagctaggtctgctttagctgcttctgttaaggaactggggattgggtatttgcagtttgtggtcaagatattaagagctatacttaaaagaggttttgagttacatgttctgggctacacacttcattatttgttgtcaaaaaacattactgctgatatgtatggtaggcttgactactgtttagaagatttgttggcagtggttgacagtgatttacttggagatgttgcagaacaaaaggaagttgaaaaacttgcctccaaaatgaaagagacaaagaagagaatgtcgtttgagactcttaagctgattgctcaaagtattacattcaagaccgatttactgaagaagataatctcacctgtttctttacatcttcagaagcaacttactccaaagttgaaaaccagacttgagatgatgctacacaacatagccttagggattgagtgcaactcatctactgaaacatcaaacttgtttatcttcgtatattgtcttattgaggatactattacaggaagcagatctgaatgcaaagagaatacacaatctagtcctgatcaagacagtactgtaagaaagaccttcctgggactaggtgagagtggatcacagaattcttatatacttaccaagtttgcacttgacttacttcgtaatcgtctgaagagcatcaagcttgacaaggaagatgaacaactcgtgaagatgttggatccttttgttgaccttctgcgaaagtgtatgagttcgaaacatgcaagtgtcctctcagccacatttagatgttttgccttgttggtgaaacttccgttgccatctctgagggacaatgcaattactataaaaaatgtacttatggagattttacagagagctggaaactccaatggtcatttagtcacatcttgttttaagctacttgctgatctacttagaggattcaggatttcactttcagataatgagcttcagatgcttgttcatacccctatgtttgtagatcttcagacaaacccttcccctgttgccttatcgcttctcaaaacaatagtcaggctaaaattggtttctcacgaaatttatgatatagttgttaagataggagagttgatggtaacaacattaactgaatctatacagcagcaatgcattcaaattatgctacaattttttctgaactatccactttctgagaagcgcttacagcaacatattgactttttcctggcaaacttaaggtatgatgaatatccatagttactttatcatgatatctcactgtatgctaacactctggaaaattgcagttatgaacatccttcaggaagagaagcagtgcttgaaatgctccatgacattcttaccagatttccccagaggattattgatgagcagggtcaaaccttttttcttcatcttgtagttgctctagccaatgaacagcatcagaatgtgtcttcaatgatccttagagctattcaaaagctgttaggacgcattggtggtcagggaaagagttacatttatgagtattcactttcgtggtacactggtgagaagaaaagtttgtggagtgcttcagctcaggttattggtttacttgttggcgatcacacattacaaatgggcaagcaccttaaaagtattctggctgttgttaagaaaataatggaatcatctattattgcttctggagctatacaattaggcttatctgatgaagctgccctgccattgtggaaagagacttactactctgttgccatgatggagaggttacttcttcgctttccggagttgtattttgagaaaaacatggaggacatatggataatattatgcaagttgttgatccatcctcattcgatgttgcgtagtatttcaagctctctggtagcatcatattttgctacagtggagaagaggaaacatgaacagaaattggatgccccatcatggttgcttgttcaaccgagcaggctattcataatagctgtttccttgttgaaacaattgaggagtgagctgagtgatactacggcaaataatctgattgtacagaatgttgcatactcagtctgcaacttgcatatgttgattaggcaatcgacctccacacatcagttttggtctagcattagttctgatcgtggtgctttccttgagggttttgaattgcttggttcaagaaaagcaaaaaatatatttctcctttgtacttcaacatctagtgatgtatctggatctagcctcgacaccaacgaagagcctacatctttgttagtttcgtcaatcctaaagaagatgggaagaattgcaatgcaaatgcaggatacacagataaagaacgtgttcaattgcttcaatatgatttcatcagctcttggtcctgatgaatcactaacctatgctgatcacctcttggccccattgtataaagtttctgaaggatttgctgggaaagttgttagtgatgaagtgaagcaactggcccagggggtccagaacaagttacgtgacctgattggttccgagaaatttgttgaagtctacaagagcgttcggatgggcctgaaacagaagcgggacggtagaaagcaggcacagaagattgttgcagccgtggacccagaacgcaatgccaagcgaaagcagcgaatggcagccaagcaccgggaacacaagaggcgaaagataatggcgatgaagattggcaggtggatgagatagcttggtatttaggctctgcggaattcggtgaatcatataattgtagaggataatttttcgtgctacaagtgctggcataaaattatgtttctgttttatatgctgtctcactgacttactgcccgacgtaattttattgttgagttaccgaaccataccgtaagtaaaaattaagaggcataagcaatgaagacatagaattgattgaattatatttttttggggtggatggataagtaacaatatattattaaatgtgcaattaagagttttctggctgaggtttgc

SEQ ID NO: 30504 - DNA, 4320 bp, Zea Mays
acagcccccggcgcgcgggcgagccgacgagagtgggagtgtacggcagcggtagggtgggtttgctctttgattggccgcggctaaacaccaaaccttggggaaatggagctgctcagtggtgcagtggcggagcgggagcttggggaagcggaagcttgcgagcagccagagcactagccattacccagcgctaccctacactgacaagtccatcgatctgatcgcgctgctgctgagtgcagtgtgtatacaaaaggccgtgaaggcggtaagaccgagctgcaaaggggtgtgagggagaagcgagaagcccgtgagctgagctgctgcggtgctagggagccagggtttcgtttcgtttcgtctcgtctggcccctcttctcttggcgcggccatggacgcctacgaggccaccaaggtggtgttctcccggatccaagcgctagacccggaccacgccgccaagatcatgggtctcctcctcatccaggaccacggcgagaaggagatgattcgtctcgccttcggccccgaatctctgctccacgctgtcatggccaaggcgcgcaaggacctcggcctgctcctcccggcctcgccgacctccgtcgcggccgccggccacgcgccgttcctgcagctcccacgccaaaactccgggcgcgccggcgccccatcgccgctctcggtgtcctcgccgtcgtcatgggggcacgcgccggcgttctccaggagcaatagcacgagtaatggtactggcaccgcggaggaggcggcgggggctggggaggagctgcccagtcccgtgaacggcggcgcagcgccgttcttccctcatcagtccggggacgcgctcctggacgacttgcagctgcaggagcagcttgcgttcctcaacgagggcagcgcgaacccggcccaccagctcccgggtttcgtcggcggggagtgccggagccccggtccgggtgatgcctctgggatgttcgcgttcggcctcgggtggcccaacggcggcccagcgcaccgccggagctcgtcagtcaacgagttctgccttggcggcggcggcggcggcgatggtttcgggtggaagccctgtctctactacgcgcgcgggttctgcaagaacggcggcagctgcaggttcgtacatggcggtctctcagacgacgctgctgccttcgctggcgccaagatggaggcagctgccgatcagcagcagcagcagcagtgccaggacttcctcatccgttccaagagccagcgcctcggctccgccgccttcccctactcctccaccggctccctcccaggctcgccctccgccgctagcaagtgcctcagctttctgctgcagcaacagcaacagcagcacgacagagccgcggcggccgcgtctctgatgctgggcggcggcgacgaggcgcacaagttcatgggccggccgcgcctggaccgtgctgacttcgcgaacatgatgaacccgggctcgcggcagatttacctgacattcccggccgacagcacgttccgcgaggaggacgtctccaactacttcagcatctacggtccagttcacgacgtgcgcattccctaccagcagaagcgcatgttcgggttcgtcaccttcgtgtacccagagacggtgaagctcatcctggccaagggcaacccgcacttcatctgcgacgcacgcgtgctcgtcaagccctacaaggagaagggcaaggtccccgacaagtgcaggaagccgcagcaaggggacttctccggctgcacgacgcccactggcgggctggacggcgggtacccctttgatctgcaccagctcggcggcaggatgctgcagcactcgagcagcgccaacgagctgctcctacgccgaaagctggaggaacagcagcaggccattgagctccagagccgtcgcctcatgggtcttcagcttctcgaccttaaggctcgcgctgctgctgcagcagcatcgccactgccgacaccaattggcgatgccttcgcgtccagccaacctgtgagcaccaccgcagtcgagtcgccatcgccgccagagtccgctgctcaagctgaggagcggatttgctctggaggggaaggtcaacggtggtgataaggaggaatctgctcgcgaggcgagcccagacgccgctgatagcgaccaaagcggcggagagcacaatttgccggacagcccattcgcatcccctacgaaatctgctgcgcttttgcatgacagtttcactgccacggagaccgagagcaccgccgcgtcccgtgttggcgtggatgccggtgtcgggagcaagatcgacggtggaagcaaccatctccgcccccccgcgttggaaatcccttcgcccagctcctacttcttccccatgcacaggctgtcctccgatcacggagccatggggatgtaaagttcaccattgtaggcgagttataccccccaacctaatcatagtaagcactaacggcatctttattccgacttggcttctcaaataacagcctttctgctttactaattattctgccctctctctgtctctctctcttattttttctctctctcttctttcgctgctttgtggttgtgacaggaatactagaagccaagaaaagcgatggtggaatatatagggaaaaaaaaaggagtcgagtgtcagcatagtgttagctcccttatgttctagtaccttttttagaggatagttctactaaaccacaagagaagaagatgccattagccttgattaagaaaacggcagcatatgcagtattgccagatataagtatatatatattatatatacaaataatccagtgtcaccctagtctttagagagagatatataaatagtatctgtacttaatgtttaccagtagcaggcaggtaacatgagcacaaagatgttactgtgacactgtccttgatgtactctacaatgacaggccccccaacccaccccacccccactaggtttattatactaaatgcgaggttaatccacgattctggtaccagccacatgtcacatgtaaagagcagtacagctacagcctgctgcgagattcatcagatattgtatactactaggccactagggaggcccagtgactgtagaagtgcacatgaccatggcagttgtctgtaagctattttaactgctactagtgcaagatcccaagccaggatagagagtcatagaggtgtgtgtgtatgcgtgggtgtctcggtatgggtctcctagtatgtccgcagtctgcagagacaggtcgctgcagaatactactacaatactactagtacatgattgtattgacctagttgcgtggatgtagttgacagtttgacacctctatctacagacagaatggaagtaaaagtgagaaagaaagtttgtgcgagtgcttttgcctccattgatccatctttcaaaacctcgaaaggtgtgctttgcccctccagcggtccaattgatccacctttcaagatctcaaaggtaccgggatcaggtgttgctgctgttgtgagatgggtgtgaggatcttgactgaagaatgatggcggtagcgggtagcctatgagtgaatttatttaagtgtccaaaaggcttattttggaacgcaggaatttcagagaaatcgtataggaaatttacaggaatcgtgaagctgtgatctattcagatgtggctgtggttgtttgcagctatatatacagtggaatctaatttatttttgcacccataacagtttctgcagcaattaaaagttggccagccgaacagctttaattcacaagaaaaacgtaggaaacaagaaaaaaaattctttgttccaaagtagcactaattcttatttccgccaggatattttaattattttgttatcctacaacattcctaccagcagaatgcaatgcaggtcagattcgtttcgatcagctttagtcgtgaccctagaacattgcatcaagtacaatcatgtttgtcccagagtatctttgattacctgatgcaaagcccgaggcagcaacatcagcatgggcgtccacatcagtgcatgccgtggaattaacgatgattttgtgaaccgatgcagtagtgactcgtttgcctgattgagctgtaagcgccgtctagatgtggtctgcagatgccaacacgggccggcgacttttaagaaaccaaacccaaaaaaaaatgaattcgaggcaaataaaactgcagctcgaattgttgttgattttgttagcaagttttgtctggtggcattagactaaatctgta

SEQ ID NO: 30505 - DNA, 264 bp, Zea Mays
caaagattatggtaaatcctttttgcatattttaataattcagtacatgtttgttaagataatggctgtagttttctcaagagatgtgtggagatgtgtctagcatatgattaaggtataacagtataacacagtttcagtgtctacactcaatccatccacttggctttgtttggttgatatctttttgttcttgcataatggattagttcatggatggcatctcgattttgctctgtgcaaatgtgtggtggtacacacttc

SEQ ID NO: 30506 - DNA, 4624 bp, Zea Mays
tggaggccttgtttgaggttccagagctcgatttcctgtcggttttgcagaagaaaattgcatcgtttgatgacgaagagccagatgcttgtgccggcacctattcatttggtgtccgagacatgaaaatcattccagatttcattgatattgatactgagacaagaataccatatgcagctgaatttgcggagtcaatttatcaagtagaagtccctgtaaaacatgatgatgatgataactgtccttatgctaaagatagctactgcatggaaatcataggactagagaatggtcaaataataccccagttggagatgccccacttgtggagtatcaagcagataaaccaattacagcaaatgatgtagcagtaatggattttgtaaggatcaatgatggtattttactggataaaaagtcagcattataccctctcaaacctgatgggacctgttcacattttccttgcttcattctctttgaggaagtaaagatcatcgactttccttccaaggatgcctttaagtcacttgttcttattcagtcagagaaagctgagatgaatacatctgaggaaatattcaaagacgactttgatcaagcaaaacatttctatgaatcagtggttagctctgaattggctctagttgatgatacattcaaatcactacctacacctattttacatgatgataaagcaatgcgatctatgcttccccctatagaagaagtactttgctccctaaaaccacttcctctatctgcagcagatgggatttatttggattggcatcttttatcagaagggccatgcaaccgggagagttgctctacttatgagagcatggttgaggaggtaaagccttgcagtttaaattctgaactacaaataagtggccagcagatgccagcgcttgacattggttttctggaggattttccgagaagtgcaaagcctcaacatgaggacaagcagaatgaggtttatgttcctgggcctatatctcatgatccatcagctaatttggaagcaactcaaaagaacatgctagaaaatgttgttagaggtcatacccacatggataaattgagttcagaaaaggaatcatccttgtttgagtcaacgtcacagtccaatgggctaagcttctacttgaatgtgagaaatggcactaataaagtgagaaaagctgaggatatttctaccttagacatcccctcttcaaaacaagcagcttcaatttcaaccagacctaaagttaacaaactcatagaaattcatcctgtcaacctctcagatattatccaaggccttatcaatgacatccatgtaagttatacatctgctttgcaagaaagtgcatacttaaggcattctttctccgatgggcaaggtttaagcatttcaaagcaaaagcttcttgaactgataacaggggaaggttcagaaggcctgtatagctgctgtaaatatgaagataagatggagcttattgtactgtatgcattaaaacaggttgcatattacctatgtttctttggtctgcatgccgcctatctgtatgtaggcaatttgactggaacctttgaaattattcctgagaggttaagacatcttcaacgctgcattggtgaagctcgactgaaagctgagaagcaattacaggagtctcatccgtcattatctgtcatcgagacaatccttagatctaatacccaaatcgaccaaaagatccttatagtgtctgatagagctttctggttgccattgggccaaaagcttactgcaatgaagataacatctgttgagtttggaacataccattcaaccacttattcagatgcggtgattgagacaaattctaaaagatgtatgctgcaagaattatggaaatcagactgcattctgctagataacaagaacatcccagcttcattccccttcagtgaattttgcatgatagtggaatatggaggcccaaataaatcatctatcttgttatctctggctcccaaattagatgggttgccaccactgcatttcctgtatgtcacagttgatggtgaaggccttccaaatgctcttgtcgaggacaatcacacagacccggatttgaaatccacattggatgctgctttgcatacacttcagaaggacttgcaagagaagatgaacaaaatgcgcattgttgattcattaaactttataccggcaacaaatcaacagcaacatttgcagaccaatcatctcactgtggattcatcaaaaaaaattcctgcagatgttcaactgcacaatgcgggaaatctgaacgaaaagaatattgttgattcacacaacttagtgactgcaactgaacagcccaatggcttgaaccaaataaccattgccaatttacaaaattttgtgcctgtagttgagaagagcagttcgactgttgtatctgcgaatgtgataaaagccccccaagtcaaccaatctgccggtgtccttcctctcagtgagaaaatggacagcaccaaagcaggaagattgcctggcccagaggtggcgattgttgtcaatactggaaatcatggaaaaaatatgcttttctctcgaagatcatcttatcagcagatactagctttggagagaggaggtatgcaggttgtagagcgagatgttgatctgcctgtggatctaatacttactgcggcagtttgtttactatggtatgatacaagaacctctggttccagtgagttaacaatatcagcaggcacatctggtataacaaattttctagaggatattgctaccaacgttctgatggcacttagcttctgtttctgtggctgcataatggtcttcgagggtgaaaatcacttgctttctgctgtaatggaggcatctgattctctatatgcttcagctgttaacctggacatgaatttgcagctattcttctcagaaatgcccaaatcaacagatcaaatcattctcaattgcatcaggaatgctgttaggataaatcaggctctttgtccacaaataactgaatcggaaagtctggttgagtcatttctcacagcattcccttcagttagtcctctgtctgcacacatgatactttcttctggcagtcttatggatttcctcagatggtcacatgagcaacgtactcaggctgttgaaaagtatcatttgccaccgcagagcatttctctcttcagtgctttgtgcaaattcggtgaactaggtgaatcaaagtctgtaatgactgaatgctcttctgttgattcagatatcagtagtactttgctgcagtctccgaggaaaaagaaaaggcgtgccgcacaagacttttccgttgcagttagtaatcctgctttccctaatccatgtactcaattgcatggtgactgtgtagaaaatgacaagatattctcaccacctaagttaaggaaattctttcacatagaggatacaatgtctgacctccccgaagtctttatgattgatcaacggttgaatatgggtagtgaaggtgtctcttgtcagccaagaaagtatgatgtggatgctgtaactgggatcaatataatagatgatgacttcattaatgagttgactccaaatttcagaacatacaatgaaaggactagcagtatggtggacacatgcaatttctctaagcaatccgaattgggagctaaacagccaatcagaagttcctttcccgccagcttaccatcagtctgtacaacttccagtcatccaacattcccatccgcattggagatcaataatgaccctggtagctgggacgttccatgtagtataaatcagacatgggcaggtcatgtgcatggggatttcgccacaagctctggcagaaatgatcagggtgtcagatatcatgaaccaagacaggaaataatgcagactccagtaccttcactttcttttctgaaacaggattttggctgtcatggagcatcacaaggctcaggctgggaaattgactatctaaggcgaatgaatgaaaacagaaaagcatgccgagagcaatctagatgcagtgtttcaacgcagccaaattcaagaacaagggatggctcctcaagaattctgagtgctcctccaattgaatctttcagatatgaaagaaataaagatgcccctttcagggaccagaaccgttcagatattgaatctttcagatatcgaagagatataaacacgcttttgagggaccagagcccttcaaatgaggttcgtaggtatgggaaaggcaggggaggaactaaagcacagagccatagggtaagaaaggatttcaaggcacaacctagcataaatcatgaaaagagcataatgccatccatcgagccaacatggactcctcttgacaagagagcgagacaaaaacttacatttgcaacatatgggaacgaaaaacaaagcaagctggtttggagacatcaaagcagccccggtgttggatgtggcttccctaaaaagtaccatgaagaaggtacgtagattatcaggtccagtaatgtcctggacacccagagcgtgttattttaggagaaggtgcccacatgttcaggtttcactgcagtaatcttgttg

SEQ ID NO: 30507 - DNA, 1495 bp, Zea Mays
  misc_feature (1)..(2): n is a, c, g, or t
nntttacctcaatttggtgcttgaatatgtgccagaaactgttcaccgtgttattaaacattacaataagatgaaccaacggatgccattgatttatgttaaactttatatgtatcagatttgtagagctttggcttaccttcacaactgcgtaggagtgtgccacagagatataaagccacaaaatattctggtgaacccacatacccatcagctgaagttgtgtgacttcggcagtgccaaagtcttggtacaaggggaaccaaatatttcatatatttgttctagatactacagagccccagagctcatatttggggctactgagtatacaacagctattgacgtgtggtctgctggttgtgtacttgctgagcttcttctaggtcagcctgtttttcctggggacagtggtgtcgatcagcttgttgaaattattaaggttctaggtactccaacacgggatgaaattaagcgcatgaatccaaactacaccgaatttaagtttccgcaaatcaaagctcacccatggcacaaaatcttccacaaaagaatgccatctgaagctgtagattttgtgtctcggcttctgcagtactcaccaaacctccggtgcacagcattggaggcgttaatccatccattctttgatgaactgcggtacccaaactcacgtctaccaaatggccgttcccttccccatctcttcaattttaaacctaatggtaagttcatgctatttcgacatttgcacgggctgaaactttaaggtagtgtttggttccggagtcggttgggatggagcagctccgtccgagagattttagggaggctgatagttcaacatttaaacacttgttagagtcactctatcctacatggaaccaatccaaacaataacaattgagagcggagcagctccgtcccaccatgcttcagtaccaaacactatctaagtaaatcctgatgtaccacatcttcattgcttgaacagagttgagaggagtaccagaggagtttgttgtgcaattgatccctcagcatgctaagaagcaatgtgctttcttaggagtttgagaaagcagttcaattttattccagaaaagaaaaaagagagaggatgcagcagttgagaggttacctgagtattgattacttacgttctgtttaaccgcacagtagcattagcctacagtattatcgactaggcaacgtgtgctgttatctttcacgacggcttttacatcgcaatgttctaccacggtggtgggatctttttcaccacattctgtaaagcagaagaagacgtaaatcgactggtcacccgttcttgtggtctgtatattggtctcccccaatcttgagaacacgttcttttgtttttggagatggattcatttcgtatctgtatcactatcaccaaatgaaacaagaactcatgtattcttgaactggattcagttacatgagagtcaaaccatgtcctttctctaag

SEQ ID NO: 30508 - DNA, 144 bp, Zea Mays
acatagcggaagacttattacaaaataaagaaataaaagtaaaacgaactaaggatcgtcggcgccaatgtcgactgggatacgccacctagatcagatcgaactcctcagtgttaggcggctcctcctgaaccacctgatcat

SEQ ID NO: 30509 - DNA, 717 bp, Zea Mays
ggctgactctcctaatttccttcccgtttttcttcctgtggtcgctcgttgagtgcggaaattccacgaacgtgagctcaacatggagccggcgacccctccggcacccgccgccggcgtcacggctaccgtcgacctctcctcagtcgcagccgacctcggtggggcgcacctcctgccctgcggcatcaggcagaacggcggcgcccccgtatccgactacttcaagcctagggacacaggttatgtattggagaagagtcgcggacagaattcagatgctgaagtcagcaattttacatcccgagctgaattccagagcataacctactggaatcacgatacagcgccatcagcagaggattccctcccgaggtgcttccattggcttaccgtcgctaatgcgatgcatagagcagtgactgctgaagacctgactaacatggcagcaatgcagaatcaggacaagtagattcgttctataacgaagccatgcaatttcgatttggtgaaccatctcgacaaaggatcttgtaacaaccaacatgttatttgaacgcatccagtaggtaatgtttaggctttggggtaagatgcttcaggagatccttgttcagtagcatctgaaaatgtctgggtaatttagattgggacctgtatcagactatcagttatctccaatattgtgaaagagtgccggtgttgcctttgtgttca

SEQ ID NO: 30510 - DNA, 1510 bp, Zea Mays
gggttctactcaccagatctatctgacaactgcattagtttcccttggagacgaattttcaggcttggttaaaaaatctcctcattgtgcctcatccgctctcggttacgatgttctgtgcgccagcatccggttgggccgttgcatagtggacggttgacgtcggcccgttagtgatgggaggctagggttcgggctatcgagaatatgatgctgtttcagtatcttgtcaacacacttgaagcagattttgtgcctcgccaaattgcaaccaaagagtcactagactgggtgattttcagagagtctctcttaagtatgcttctgggatcacgaaagctcgtgttcaaatcttttgtgaagaactgcatgtgtattctactcaaccagtattaccatgaagctaaagatgattatgaagacatcataccttctgaaagagaaactgaatcaacatcttatcacaatttctccctaaactatttgtcctttgagttaaaaaagacactcatttctctcaggaaattatttgtgatggttatgaaacttgacttgaccaggaaagaagcagacacattagggttaacctcaagagctgacagattcagaaactctatcatggatattattttggatgaactaacttacaacagcagttatttatccccatttctcttggcctttgtggaacggaagtggaaattggagattattttgcagtacttttcaaaatattgtggcaagggcgcagtccgtactcgaaggtctgataattcacaagaagatttgaaactggaaaatgttctgaatttctttgtgacagccacaagtgcaaaagctattgtcagaaagatgagtgcagaaattgcccagcttcttttaacacatgcttaccaggcgtgcctttctgctgaagatgccaacagcaattctgctgatacacccgaaaaagttggagctactctccaagagatatcttccaacttcatagctgcttttcaaaacatcaggaaagttagcccggatatccagatatcaccgttcgagaaagaagctctgtttactgctgcaacgttggttaggaaattgaagagcaaagaaaggtttaagcaagagggaactccaggacttgctgcatgatggcgcgaagctcctgttgaaggctgctaatgcaaagatcaatccgcagacgccgagcgaggatggtgggcactgaggtgttgtcatgttggatgatctttgaatcttttgaggggctgctgatgtcttgtgtttcctgttgctgaaataagtgagaagtggctgagaacttagctgttatgtgtgtgtttctggtttgtttcagtttataaacattgagttgtttggtggtgtgacctgaatcaggtcagtttctggtgttttatcccttctagatcttagcccttggtgctttgctagacgtggataagaacaattgtatttctgttatgcaagtaatagaaatggagtgatctccgttcgaaaaaaa

SEQ ID NO: 30511 - DNA, 2092 bp, Zea Mays
ggaagactgttaccccaactcagtttcgtacaaatggctcagtcggaacttctctgtgtcatcaaatgatgccaagaggttgcttcaggactttgtcaacaaacatggaactgacctccaagtgatttacagtgtgtcggggtggttgaagagcaatccccaaaactattgtgtaaagctcatttcaggcccaaaacttgaagaagcaaggcaaattttcaaagattcttgttcagttcagatctacagtatccaggcctgtattccaaaagatacagctgtactttggaatcctgaatttgtgcaggcagaggagcttttcaaccagccttttgattatgagaactgtttgagagataataggttttgtggtgttttgaattcttttgtcaagcgaacatccaatggaaagcatgtgagttcattgccaccaaagcccttgaatagtgctgcagccgccgcgcagtctaagcctagtgttactccaaaggagcagtttgttactgctcgacggcaagatttgcctgtaagttcaaagcagggagcagacactaagtccgagaaggataattccacagtattagataaggctggcaatggtcctgttgtcaaagaacaatcagttgatgcccatgcaagcaaaagtaaagctcaaaatggaaaggccatgcctagtaatggtggatcactggctaacatgtggggccgtgcatcagcaaaacctaagcctccaagtaccactaattctacagctgtagcaagtgttgcagctactgctgatgcacaaatttgtgcaaaggaagaagcagatggaaatagcagcgatgatgaacatgggataaagtacaagaggggatccactaatgcaaataacagaaagagaagagcggtatttgattattcggatgatgaggaagatgacaatattgtaagcattgcatctcctgagctaccaaaacagcataccccagaccctgttgttggaattgctgaagacgctgaagtaaatcaaaagaacttggaaactgaacaccatgtaccaaacaatgggaaaggttcctcaacgggggtggattctgacttcacatctgaatgtaaaatcaaaacgatcgatcctatgaacgattctgggattactttaaaagaaaagagcagtgatcctccaatcaatgacaagaagcaggattctgctgctgagcctgcctccacctcaccaaagaggagaaaggttttgaagacacgcatagatgagaggggaagggaagttaccgaggttgtctgggagaatgaagcttctgcagatgacaaggcagagcagaatgtcaacactattgatgcgactgcaagcggggcgactgtcccaagcaaaccgaagcccgcaacaaacgctgacaaaagcaaagctccaagcaaaacagcagcaggcaacaagaaagctgcgaaggctggagccaagcaagggagcattatgtcgttcttcaagaaagcatgagccagcggggggtgcgcatgcaccaaaatgagacaggacttggttaagcaaactggcagtggcagttatacctgaacattgtcagtcaggccggcgagcaagaagggctgctccaagcaggcgaccgttagctgtatcgtttgttttagctagcgtagcgatggttgagtcaagcagcagagagcacgcattctagctgaggtagtactatcttgctgaagatgtacacgtacacatatacaataactgttgtctactgtgctgtctagaagagtaaaggtccaaggtggaagggcggaacagtttgagtacctgtgtctggttggtatggaccccactggaagagagtgcacacaccatcatggtcttggagggtgcgagctgggcaccggtggcgtagcaagccagcaaacggccgacagcaacgtagggagggagttggagagccagagccaccccatcgtatcggtatcgcgactcgtcaacacatgtttgctgttggtcctacaagatgacgattcatataccagcttggagttggagagccagagccacccctgcggccgaccgaagccagcggctaagcagctaaatgcctga

SEQ ID NO: 30512 - DNA, 2789 bp, Zea Mays
ccacaatctctctgtcccgggagtccgtcctttctgctctgtcgttactgaaacccagcgagcaccacttcccatctgctcgtgtcagtcagttcctcggctgtgccgtgagtggcggcggcagggagcggcgcagcgcagcgcagaagcagcggagtggcccaggcgatggcgccgagggaccccaaggaggacggcttcggcgtgggcggcgcggcggatccggaggccgacatcgaggccccgctgctggtttcctccggatcatcgttcctcctggacccggcgctcgaggacggcggcggcggcgacgaggagcagcgccgccgccgccgccggttcctccacggcagccacacgcactccaacaccacctcccaggtcgcgctcgtcggcgccgacgtctgccccatcgagagcctcgactacgagctgatcgagaacgacgtgttcaagcaggactggagggcgcggggacggggccacatcctgcgctacgtggcgctcaagtgggccctctgcttcctcgtcggtgccctcgcagccgccgccggcttcgtcgccaacctcggcgtcgagaatgtcgccggcgccaagttcgtcgtcacctccgacctcatgttggacggcagacacggctcggcgttcgcggtgttcctggcgtccaactttgcgctcaccatgttagccgcggtgctgacggtgtacgtggcgcctgcggctgccggatccggaatcccggaggtgaaggcctacttgaacggtgttgatgcccccaacatattctcactgaaaactctgatagtgaagattgtgggatgcattgcggcagtatcatcatcactgcatgtgggaaaagctgggccacttgtacacacaggcgcatgcattgcatcaatacttgggcaaggtgggtcacgtaaatatcgtatgacatgtaggtggctcaggtacttcaagaatgatagggatcggagggaccttgttacttgtggttctgctgctggtattgctgctgctttccgggcgccggttggtggagtcctttttgctctggaaacagtatcttcatggaaaggaaaagcttacaaactactactcgctgcaacagtcactgtttgtacatcatgttgtctatttggcttgccatggattgctgcttgcaaaccttgtccaactgacactagagaagcttgtccatcaataggccgttctggtaatttcaagaaattccaatgtgcaacagatgaatacaatgatttggctagcctattcttcaacacaaatgatgacactattagaaacctctacagtgctggcactgatgatgaattccacatttcgtccatccttgtgttctttattgcatcgtattttttgggcatcttcagctatggccttgctttaccatctggcctttttgtgccagttattttaactggtgcagcttacggccgtctggtaggcatgttgattgggtcacagtcaactttagatcatggtctttttgcagttctcggctctgctgctctgttaggtggatcaatgcggatgactgtttcagtttgtgttatcatcctagaactgactaataatctgcgtatgcttcctttggtaatgcttgtccttctcatatcaaaggtggtggcagatgcgttcaatgcaaacgtctatgatttgcttgttagattgaaagggtttccacaccttgaaggttatgctgaaccatacatgaggcaactgtcagtcagtgatgttgtaactggtcctctacagacattcaatggcatagagaaggtcggccatatagttcatgtcttaaagacaactggccacaacggtttccctgtggttgatgagccaccattttcagatacccctacattgtatggtctaattcttcgagaccacctgcttgttctattgaggaagaaggatttcatccgtagttgcacagcgtctacactgaatgctttaaaccatttctcacatgctgagtttgctaaacgtggatcaggaaaacatgacaggattgaggacattgaattatgtccagaagaactggaaatgtttgtagacttgcatccattcacaaacacatctccatatactgtccttgagactatgtctttggctaaggctcttatacttttccgtgaagttggattgagacatcttctggttctaccaaaatcttctaagagggcacctgttgtcggcatactaacaagacatgatttcatgcctgaacatatattgggccttcatcctttcctctttaagagtagatggaagaaggtgcgacttggcaaggtaaaagttaccaacatattttgaagcttgctggtgactggtgatttggggaggtcaccgaaggatcatccgaagctgtatacctggtgtcaaatcacgtattttgcagagaataactcaacttgaaaactagtggatcttacttcaagaaaataatttcgttgtaaatgctaagaaggggatggaacatggctgctaagtgctaacaagttattttcccacgaacaagaggaatctcactgtaaatttattatgcatactttagctaacctttgaaaacaaatgctatctgtagtgcctagatgcattccttattaggcccatcagtgcaaaagtaacttcagttccatcctccattcatataggctactcaaaatagctgctcatatcctgcatatggtgtgataaatacaatgtatttcctcagctttgttccatagcttctttttgcaatattcatgtgcttacattgtggt

SEQ ID NO: 30513 - DNA, 2000 bp, Zea Mays
cttggatcctcatgtgcttccctttcttgagggacagccttgtggcaatcatatataggacagtttcgtatctataataatgtgctcatataaagaaatcaagtacaaatgaagaagcacatctctgcccattatttgatgactgaagacaggttgcactatggtagctgctacaactgcgggaatgtttcttgtgtgttttgagtccctctgtccctgttttgggtcaaaaagtaaggatgggagcgaagaccatgttcttgcagaatattccaattcctgtaagtcagaaaacgacatatcactctgtcatgatgaaacctgacaacacagcaaagcaatggctaacctgtttgtcaaggcaaagttcatactagcaaacaagagatgtgcttgttatttctggttgtataaaacactcaccgtcgattgtgatattgcattttatctgttttcagtgaattcttctgaaatgaggtcgatttctgatagaattgctgcaagtccgcttcgagtacctgcaagtccatctagattttcactgtcttcgccaccaagttactttggaaaggtctacagagcggcgctgttagatggacgtgttgtagctattaaaagggcaaagaaggaaaattttctctctttacgtgctgaattcagcaacgaagtcgcattactaaaaagtattgaacataaaaacttggtccagttgcttggttacattgacaaagccaatgaacggattctcataacagagtacatatcaaatggaactcttagggagcatttggatggtcaacatggcctagttttgggatttaatcagcggctcgaaattgctatagatgttgcccatggattgacttatctgcatctctatgcagagaagcccataatacacagggatgtgaagtcatcaaacattctactgacagaagctttcatggccaaagtggctgactttggatttgcaagaactggtcctactgagccagaccagtcacagattgagactgatgtgagaggaacagcaggctatttagatccagagtatatggggacaagccatcttacgatcaagagtgatgtgttctcttatggtattttgctcctagaaatcctttcgggacgtcgtcctattgagagaacgaggggtccagcagaaaggattacagtgagatgggccttcaataagtaccgcagaggcaatgttaggggcatactggacccaatgttaactgaagcagtgaacgaggatatactgaacaaaatcttcgatgtggcgttccagtgtgtcgctcctacccgcgaagacagaccctccatgaaagaagttgtggagaggctgtggaagataagaagggatcatacaaaaatacagaggatagcagaattgactctctgaatccttaaggctctgttcgttttttacagattggaggcccgaaacggttcctgaccggattgtttctctaatttatataagttttgataagttggaatgaatcctggtccaatactagacaaacgaacgggccctaaaccatctggtcctggttgctgtttttgcttgggagaacatgggtcagttcctagtgaagaccaaagaccgccacataaaaataattcaaattttgtggttgtgaacaactgggattctttaagagatgtggggaacaatgccctgcgattgatggtttccctgtagccattactgttaatcagcataagctgttcagtcatcgtcctcgagaagtacagtgtagcttcggtgtacggcatccttgtactttggaaaacagttagatatgaaggaaacctctgactactaatttcttctggatataactagtgaaggaaactaaaaattattattcctcactcgtgtaatcttgcaaagactttttggtttatgaaatgtaaatgacaatggtaatgatttatgcttgagtaccaacgataataagtttgaatatatcaatattactttttagtgtgat

SEQ ID NO: 30514 - DNA, 153 bp, Zea Mays
cttgtctagctacaatgcttccgatgagcgcacacaaatcgccttcgtggttccgaccaacagccgagggcaagcgttgagaagctcaggcggcggcggttggttgatccaggcctcaattctaaccggccctgcgaggggtgtgcgagtctg

SEQ ID NO: 30515 - DNA, 4818 bp, Zea Mays
ctcactcccattttccattgacctcgcccctctcgtccgtctcctccctccctgtcccggagcttcgatttttcccttcgagaggagccacatgattcaccgtcggaaagaggcaaggcaacggaacccgagccgctccgcttgaggtgaggtggggtccccgtctgggtcgggggggcattaccttgccgcccccgcgcgaagggagattcccgccacctatagtcgtcctctcgtgggccattttctgccttggggagagcatagacgcagcgccgcgggaaagccgggcgccgcatggatcgagacatctggtgttcccgtctcaagagtcttggcgtagcggggcggaggaggaggacggggttccggagcgcagggccgcggcggcacgccgggatttcagaggcgccgcgctgttgagtgttgacgtcttctcgatcctgggaggagctgatttctctgctgagggcctggggtggctctcggttcagtccctctccctgtgcagtttatttgctttttttaggtagttgggggctacttgttggttgggagaggagctgaattattgcgagctgcattcttggagattcttgctgctcgaatctcagctgctcttcttcagagggaattgccaattgcgttctgcagtaagattgatttggacaaggttggagcgaattggctgctacggcggggagttccaaaaaaaacccgtgaggttttggccttgtcgacttcttggggcatctgggagtagctttggtgcagtgattcacttgagtctggaggaatggcgccgacgaagaggctggagaaacttaagctcagcacattgttgactttcatgcgttgtcacgggggctctagtgatgaccacttacggattgggacagtggggttctccagagtcgtgtacgtcaatgagcctgataggcttgaagaggagggattcagttacctgctgaatgaggtgtcgacgacaaagtacaatctggccaccttcctgcccaagtccctcttcgagcagttcaggagggtggccaatttctacttccttgtctctggtatccttgccttgactccacttgcaccatacacggcagtgagcgcgcttgcgccgctgtgtgtcgtgattgtagccaccatggcaaaagaaggggttgaggactggcggaggaaacaacaggatcacgagcttaacaatcggatagtcaaagtgcatagggggaatggtcattttgaagagtcaaaatggaagaatatcaaagttggagatgtaataaaggtggagaaggataatttcttccccgctgatatgattctgctttcatctaactatccggatggaatctgttatgtagagaccatgaacctcgatggtgaaacaaatttgaaaattaaacaagctctcaaggtgacattggatttacatgaggacataaagttcagggaagtcagacaaacaataaaatgcgaagacccaaatgcgaacctctactcctttgtcggttcaatggaatggagaggccagcagtatcccctgtcatccctacagcttcttcttcgagactcaaaactacggaacactgactacatatatggggctgtcatcttcacaggccatgatacaaaagtgatgcaaaatgcaactgatccaccatctaaaagaagtaaggttgagaagaaaatggatcaaattatttatcttctaatgtcttctctactcatgattgcattacttggttctgtcttctttgggatctggaccaaagaggacctaagagatggtgagctcaaacggtggtatcttcggccagatgctactaccatattctatgatccaaagagagcagctctggcatctttctttcatttgttgacgtccttgatgctgtacagctacttcatacccatttctttgtatatatccatcgagatggtcaagatcttgcaagctctattcatcaaccaggatattcgaatgtatcatgaagaatcagataagccaactcatgctcgtacttcaaatctaaatgaagaactgggtatggttgatacaattctatcggataagactggaacattgacgtgcaacatgatggagttcatcaagtgttcaattgctggaactgcctatggtcaaggcgtcactgaagttgagagagctatggctatgaggaaaggtgctaggttagatgatgacattgaaaatggagaccacaaagacaaaaaaaatgacaacagtccccatgttaaagggttcaatttcaaggatcaacgaataatggatgggaaatgggttcatgagcctaacagagttatgataagagattttttccggctcctagccatctgccacacatgcattgctgaaatagatgaaaatgagaaggtttcatatgaagctgagtcccctgatgaagctgcatttgttattgcagcaagagaactagggtttgagttttacaagaggtcgctagcaactataattgttcgtgaacggaatccaagtcagaatgttgttgagaaaagaaagtatgaactcctaaatatgttggagttcagtagctcaaggagtcggatgtctgtgatagtgaaggaaccagagggaagaatattacttctcagcaagggtgcagacagtgtgatgttcaaaaggcttgcaccaattggaagaaaatttgaagaagaaacaagaagtcacataaatcagtattctgactctggtctaagaacctttgttctggcataccgtgtcttagatgagaaagagtacaaggaattcaatgaaaaattgaacgctgccaaagcatctgtaagtgctgataaagatgaaaaaattgagcaggttgctgatagcattgaacgggacttgattcttcttggtgctaccgcagttgaagataaacttcaacaaggggtgcctgaatgcatagacaagcttgcacaagccggaattaagatgtgggtcctgacaggcgataagctggagacagctatcaatattgggtttgcttgtagccttcttagacaaggcatgacacagataatcgtcacactggaacaacctgatatcatcgcattggagaaaaatggtgacaaaccaaaaattgctaaggcatcaaagcaacgggttatgggtcagatagaggatggaatcaaacaaattccaccttcaactcaaattagcactgcatcattcgcgctaatcattgatggtaaatcactaacttatgctttggaagatgatgttaagtttaagttcttggatcttgctctcaagtgtgcatcagtgatatgttgccgatcttcaccaaaacagaaggcactggttacaagacttgttaaagaagtaacacataaagtgactttagcaataggtgatggggcaaatgatgttggcatgcttcaagaagctgacataggggttggcatcagtggtgctgaaggaatgcagtgatgttgctgttgcccaattccgcttcttggaacggctacttctggtgcatggacattggtgttaccggcgtatttcactgatgatatgctatttcttctacaagaatgttacttttggtgtaactatctttctgtacgaagcatttgcatctttctccgggaagccagcttataatgattggttcttgtcactatataatgttttcttcacctcccttcctgtcattgctctgggggtatttgaccaggatgtgtctgctaggctgtgcatacagtatccacagctataccaagaaggagtgcaaaatatattattcagttggcgtcggatacttggctggatgtttaatggtgttatgaatgctgtcttaatctttttcttctgcatcactgccttcgaggaccaggcattccgtcgcgacggtcaagttgcgggcttggatgctcttggtgtcgtcatgtacacttgtattgtatgggttgttaactgtcaaatggcgctctctgtgaactacttcaccataatccagcacatattcatatggggcagcattgcagtatggtacctcttcctcttggtttatggtgccataaacccgaggttctcaactacagcctacatggtcttcatcgaacagctggccccagccctctcattttggctggtgacactttttgttgtggtggcaacacttgtcccctactttagctatgccgccatccagatccgctttttcccgatgttccacaacaagattcagtggaaacggtacttggggaaggctgaagatccagaggtggcaaggcagttgtcatcaaaacaccgcacatcattgcagcacaggatggttggtatctctgctcgtcgtgacggcaaggctgtgcaaataacaaaggagacagagctacaagttcaggagtagcattgtcagtagattttgcgttttgtacagcttataggatcttgtctccagcaagatgacagctgaactgattgggacttgagatgttcctggattgctgcttctgtgatgcctgtcatgggagttgttccagttcagatgatagagcaagaccacagattgcttagataggtcgcaaggaggccaagagaatacctgctgcaaagttcaatttttagcagttcaaggattttgtgggttttttccctgcttctcttacacatgtaaatgcttgtaaccagattggtagaatttctcctttttaccccccttgcctgccctcgactgtttcaaacaataatggtaagacttctgatttgtgtgacttcatgcttttattatttggaaagaatcataaatgggtgtcttacaatctaaagttggtctcagt

SEQ ID NO: 30516 - DNA, 2063 bp, Zea Mays
tggtgctcttcacttgggtttaatccaaagtccaaaaccacatcacacccttctaatcccaatcgcggcacgactcacgagctcctcgcgccgctgcagtgggctctgcgcctttcctctcgccggagtcctaaaaaaaccctagggactagggagcgtgcggctgctgctgctgcggccggacgaggggatgggcacagggggagacggggacaaggcggggccggcgctgccgctggaggcgcttttggcgctcgggctcgaccagcgcaccgccgagaacgcgctcgtcaacgccaaggtcaccgccaacctcgccgccgtcatagctgaggctggtataaaggaatgtgacaagtcaattggtaatcttctatatgcagttgccaccaagtacccaactaatgcacttgttcatcgccctgtccttattagctatgtcttgtcaacaaagataaagagccctgcacagctagatgctgccctctcatttcttactaatactggtcctgattctctagatgtggacaagtttgaagaagcatgtggtgtagttggtatgctatgtggacaggttaggaagagacacccctggggtgatgctaaggcagtaaaggaggaaattgacaagaggcttgcagaaatcctaggtccaaagacagaagctgacagtataaaaccagtgaaaaagaagaaggaaaaaacagcaaaagttgaggagaaaaaagttgcagttgccactactgccccaccatctgaggaggaattgaacccgtatactatatttccccaaccagaggaaaactttaaggttcatacagaaatatttttcagtgatgggaacatatggagagcacataacacaaaggaaattttggaaaaacatctcaaggcaactggaggaaaagtgatgacccgttttccaccagaacctaatggatatcttcatattggtcatgccaaggctatgtttatcgattttggtctggctaaggagcgaaatggccattgctaccttaggtttgacgacacaaatccggaagctgaaaagaaagaatacatagatcacattcaagaaattgtccattggatgggatgggaaccctacaaagtaacatacacgagtgattatttccaacctttgtatgagcatgctgttgagttaattcggaaagggctagcctatgtggatcatcagactgcagaagaaattaaggagtacagggaaaagaagatgaatagtccatggagggataggccaattgaagagtcattgaatttatttgaagacatgaggcgtgggttgattgcggagggtgcagcaactctccgaatgaagcaggatatgcaaaatgagaacaaaaatatgtctgacttaatagcatatagaataaaattcacccctcatccacatgctggtgataattggtgtatctatccgagctatgactatgctcattgcatggtggattctcttgaaaacatcacgcattcgctgtgcacacttgagtttgacatacgccgcccttcatactactggctacttgttgccttgggtctttatcaaccatatgtgtgggaatattcgaggctaaacatatcaaatactgtgatgtctaaaagaaagttgaatcgacttgtgacagagaactgggtagatgggtgggatgatccccgcttgttgacactggctggactccggcggcggggagtatcatcaaccgcaataaattcctttatccgtggaatcgggataacaagaagtgacaacagcttaattcgtgttgatcgtctagaataccacatcagggaagagcttaacaaaacagcccctcgaaccatggttgttttgcgtcctctaaaggtggtaataactaacttggaagaaggaaaagtactagaccttgatgggaaaatgtggccagatgcttctgatactgatgcttcctctcactataagcttccgttctcaagaactgtctacattgagaaaactgattttcgccttaaggactcaaaagactactatgggctggcccctgctactcaatatgatggtaaca

SEQ ID NO: 30517 - DNA, 1005 bp, Zea Mays
ttccaccctccttccattccgttcggatacaccgtctcgtttctctctcctcccctcgcccgtcttccctcctgtgcgagctcagctcacggtcctcccacccccacgagcgcctccgcggcgaggaagagataatcagcaggcggagcggggggcgcgccgatggatctggagaggccgccgccggcgtcggcggcggaggcggccggggccgcggcgtgctccatctgcctggatccggtgctcgcctgcgtcgcgggccggtccgtcgccaagctgcaatgcggacacgagttccacctagattgtattgggtctgcattcaatgcaaaaggagcgatgcaatgccctaactgtcggaagattgagaaaggtcgctggctttatgcaagtggacgtcacccccctgctgatattgatatgggtggatgggtgactagcgacaactatgatatcacctccgagcttccttttggatttcaatggtgtccctttagtggattcacccagctagcatcaatgttaggggtgcgtgaagctgagccaacttgtaagcattttgacctgaacttcaacatgttaaagttttttcttttttactgcattgatatttcccttttatgaagaccacacaactggagatcactcaagtgctgcaagcagttcacttgtttgcccatatcttgccctgcgtggttttctccatcctgttaatgtgccttctacttctaattctggtgctgaaagcacttcatttcatcggcactcaactggcttggaaggacatgtcactcctgatttgaacaatgctccagttttccatgctaccgagtcaagaaatcatgacagtgagcacagacatttgagtaatcttcctgtatcaggaactcctgaatattctatgactccatttgggataggagtaccaagatatgacagtggcagccaacagggattccgatcatatgcacatcatcatcccctaatccatagtgttttcatata

SEQ ID NO: 30518 - DNA, 1042 bp, Zea Mays
ttggagatgataaccaaagcagttagcgacggatcgcgtgggaacggcgccatggctgccgagatcaatgggggcatcctcaccgtcggcaggcccaggcagcactgagttgcgctctgctgcggccgctacttccagatggatggatttgatcaaacagtgaatgtgaaggttgtaatggcaactaatagggcagatactctagatcctgctttgctgtggccaggtagacttgacacgaaagttgagttcccttgtcctgattggcggcaaaagaggcttgtgttccaagtctatactgctaagatggatttgagtgacgaggttgatttggaagattatgtttgcagaccggataagatcagtgctgctgatgttgagttggtttcatggcacataccaagatttttatgcatttgttgttttctaactactgtattgctagggtacttatgtcctgtgctggccaaagctctcaaaaccatgaaaaggcaaagaaggtgctccttatagtaaagccacattatggatttggtgagaagggtagaccaacagttggagaggaaggtgttgtgatgagcatcatcttgttctacatcatcactaatgaactggttgaacttttggttgctttggtgaatggaggcgacggcatgcagattgccatgtccggatgttatgcgggacctatgtttaatacacttgctggtttgggtacgttgttgctagattgatctgggctcttgttatgctgctgagaggtgacatgcagcctaacaagatacttggagttggcctcatcgctctttactcaaattttctttttattagagtaagcaatgttggtggaatattgctactacctagagttagataattatttgcttgtaaagtttgatttacatcaaagtacttgcccatggcttccatttttataaatgaaatgaagttatatagtgttgctctgttctatacgtctgttcttgtatgtcaagttgtcttcacattttccgggttttaatatttttgggagaaaacaaac

SEQ ID NO: 30519 - DNA, 3229 bp, Zea Mays
ctcaaatctcaatccatcgtactagtggtaccaccacacacagccccctgtgccctcctgccgtccgtgacgtgacgcagccgagccgcgcgcgcgctccgggccggacgcctccgctcgaatcgatggacgccgaggccggcgtcgccggcgccgaccagcttccgcggaggcagtactacctgaatctactgcttttagcttaccagagctttggtgttgtttacggggacctgagcacatcgcctctctacgtgtataaaagtacgttctctggaaagctcagacactaccaagacgaggagacagtgttcggcgtactttcgctcatcttttggaccttcactctgattcctttgcttaagtatgtcatcatcgtcttgagtgctgatgataacggcgaaggtggaccattcgctctctattcgctcctttgcaggcatgcaaaactcagcttgctgccaaatcaacaagcagctgatgaggagctatcttcatactatagaaatgggttcgcgcctcgcaatggatcttcaccttggtcaagaaggtttctggagaagcacaaaaaaatgaggactctgtttcttctcatagttctctgtggcgctagcatggtgattggtgatggtgtccttaccccagcaatctcagtactctcgtctatgtctggattacacgttcgagctactggtctacatcatagttctgtagttctcctttcatgcattgtgttggttggtctatttgcattgcaacaccgaggtactcagaaggttgcattcatgtttgcaccaattgtcatcatctggctgctttccattggaggaattggtttatacaacattcttcattggaacccaaatgtatatcaagctctctctccatattatatggttaagttctttagaaagacaggcagtgaggcaatgtttgctgaccttggtcactttacgagtgcatctgtcagggtggcttttattaccgtcatatacccatgccttatgctacaatatatgggtcatgctgcatttctgtcgaagaacacatttcacatgccgacaggtttttatgatactatcccagaaccagtgttttggcctgtctttgtggtggccacacttgctgctgttgttggtagccaagctgttatttcagcaacattctccattgtgaaacaatgccatgctttgggatgtttcccgcgagtgaaggttgtccacacatcgaggtggatctatgggcagatatatattccagaaataaattggattcttatggttctttgcgtcgctgtcactattgcatttcgtgatactactcttattggcaatgcctacggtattgcatgcatgactgttatgcttgttactacattcttgatggcattaatagtcatctttgtttggcaaaggaacataatattttccctagttttcctggttttctttggatccattgaagctgtatatctttcgtcatctctcatgaaggttcctcagggaggatgggtgcctcttgtgcttgcattcatattcatgtcagtcatgtacatctggcactatgggtcaaggaggaagtaccagtttgacctacagaacaaagtatcaatgagatccatcctatctctcggtccaagccttggcatagttcgggttcctggtgttggattgatttacacagagctggtcactggtgtaccctccatcttctcccattttgtcacgaatctccctgccttccatgaagttctagtctttctctgtgtgaagtcagtgccagtgccatatgtttcaccagatgagcgataccttgtgggtaggattggacctaaagaatatcggatgtaccgttgcattgttagatatggttacaaagatgtgcagagagatgatgacaattttgagaacatgttagttatgagcatcgcaaagtttattatgatggaagcagaagatgcttcttcagcaagttatgatatcgctaacgaaggaaggatggcggtcataacaaccactgatgcctctggcagcccattggccatgagggatttcgacggcctagctgactccatgtctacgaggagcagtaaatcagaaagccttcgaagtttgcaatcctcctacgagcaagaatccccgagtgtaaaccggcgccgccgtgtccgctttgaggtcccagaggaggatggcatgggtcagcaagtgaaagaagaactcacggcactagttgaagcgaaacatgctgggatcgcatacatcatgggggcattcttatatcaaagccaggaggaactcaaatttcctgaagaagtttgctattgatgttggttactctttcctccggaagaactgcagaggcccatcagtcacgctgcacattccacacattagtctgatagaagtcggcatgatctactatgtttagcttaaggcccattgccgaagctcacatgtggatacccggtcggggcaatgcttgtgctgtctgcggattgtggtgtggaaggagttcaggcttgttcgttctgggccaagtttcagcttgtagagaagaaggcagacttctttgttaatattatttttagcctaaataaaccagcacaatgttagacggtgatgtttctcatttggcatatttgcatgcatgctctgtaattttttctgcgagctatgtgatggaaatatatgcatcatctttataaactgctcgcacgcatgaattggggacgatgtggaggacaagcctacaagtaagggaggtgaaagagtggcgttgcagccttgcaggtcttctgcacctaccccatcctagcttgtgtctgctccaccgtcgtcttctaccgtggacacaaggtacgggagctgctgctcgacgagctgctcgtcgcggtacgcacggctatggccaccaaaatcggctcgtagtctttccatgagacaatgtacttgatagcggacgcacagtagcaccccatgtttacggtgagcgctggcggttcgctactttaccgagttctttagaggaccttgctttgctggagaccgaaaacaaggctgcacacgctaaatttagcatacatgagcatttacagtcctgtgttggggacagtcttaatttactccatccttcattgtaaacatgtgtacagttgaaatttgagaaggctttaacgggctctacaacttaatttatctgacaggcctggccaggtcttattcagacaacc

SEQ ID NO: 30520 - DNA, 1791 bp, Zea Mays
gtcagcgaagggttcctctgaccgggcgaggctctcatggcggcggctgaccccgagacggcggcggcgctgcggggggaggtcgccgcgctgcggatgcgcgtacaggagctggaggcagagaatcagaggctggcaaggattgcttcgacctgtacctgcggattcaaggagggcagtgttggatccattactgcacatcataatgtgaaatttcatcaaaatagcactatggagaaagatttgagctctccatttgatcacacagtaatatccaatgcaaatgaaatgcagtgcaacagaaatgcagatgacaatggtttacctgaggattcaagcaagcatactaaaagaacagattctatggtttttcttctgaaggtaacattgaaccaacagttgagtctgagatatttaaagcactggaaagagcaaaactgatggttgccaataggaaagaatcatgctactcgaggtgtggaagaactgacaaaggagtttctgctactggacaggtgatttctttatatctgcgatcgaacataaaggatgttgggggggacatgttagatgaaagatccgaaattgattatgtgaaggtattgaatagaattcttccaagagatatacgtgtactgggttggtgtcctgttccagcagattttcatgcaagattcacctgtttgagccgggaatataaatacttattttggaaaggggacctggatatattggaaatgcagaaagctgcatccaaattcattggagaacacgactttaggaatttttgtaagatggatgcagcaaatgtgagtaactacaggcggcacattacagaatttactatttctgcatgtgacagaaggtccaacaatgatgagctgtgttccatgacgatcaagggtagcgcttttctgtggcaccaagttcgctgcatggtagctgtgttatttctaataggtcaaggccttgagtcaccatccgtagttgattcactattggatattatgaaaacatctaggaaacctcaatataaaatggcgccagagcttccattgattttgcaatcttgtctatttgataaagccaactttatgtgttcagcagatgccagccggtctctgactgagcacttaaatgatgaatatcgtcaccatatgctccaagctgaaatatttcacatagcgtcatcctgtttaccttttccagaaccaaattcatcagaaacgcctcagaagaagaggaaccatattcctctcctgtcacgagagacagagccttcttacgaggagcgcatatcgaaagtcaaagcgaagctggctgataatctcaagtagagccaccgttttcaattgttacaccaatacttggaagagaacttatggaactgtagaaggtttcttccaaaagcctatatggcaccccatctcttggtgactgtcgttcgctacaggatgacggcaaagctttatttagcgctggtcggtgtcagtgtcactcatatggttgttagagctcatgctcagggatttctgaatgctgaggccttggatcttctcgctcccaaggccacgggcaggaaatcacaaacgggagaagttctatggaccaatttggaggcaaaaccagagagtttctctcccatcaagaattaaatgccttgtacaaatgacaccccacgcaaagatcacaagggaatttaagtttcaaactagcccttaggggatttctcaaataaagctatgctgcccattctgagttctgactgcattgtccgagtatttgtacgat

SEQ ID NO: 30521 - DNA, 273 bp, Zea Mays
gggccgtgggatccgtcaagttatcatgaatcatcggatcgggcgggcaggagcccgcgtcagccttttatctaataaatgcgccccctccccggaagtcggggtttgttgcacgtattagctctagaattactacggttatccgagtagcacgtaccatcaaacaaactataactgatttaatgagccattcgcagtttcacagttcgaattagttcatacttgcacatgcatggcttaatctttgagacaagcatatgactactggcagga

SEQ ID NO: 30522 - DNA, 1102 bp, Zea Mays
ctccagaagacggcgctgtgtgcacagccacacgcactggaatcatcgtgcggcgcagcgagcgagaggagtggagaggatgacggcgcccaagcctggcgggggagcggcggccgcggcgagggcggcggcggcggggcccaggacggtgctcatcacgggggtcagcagggggctgggccgggccctggcgctcgagctcgcgcgtcgcgggcactcggtggtcggctgcggccgctccgccgagcacctccgctcccttgaggaagagatcacgtcgccatcgcgccacttcttcaccgtcgccgacgttaggtctgacagcagtgtggccgagctggcaaagactgttgtagaaaagaagcaagttccagatattatagtaaacaacgctggtacgataaacaagaataacaagacatggaatgttccagcggaagattttgatatggtggtcgatacaaatatcaagggaacagcaaatgtgcttcgccattttgtaccacttatgatagagaagagacatgggattataatcaatctatcctctggttggggaagatctgctgctgcagaggttgctccatattgtgcttcgaagtgggcgattgagggcttgacacgctcgttagctaaagagctacctcctggattggcagccattgctcttagccctggtgttgtgaatactgacatgcttaattcatgctttggaagctctgccgcattatatcaaacaactgaaacatgggcacccaaggcagctacaatgatactaagcctttcactggacgataacgcctgatgtgtagatttttgcgagattatggtgatgtaaaatagtagtgataatgcgtgtctgcactctgatgtccctagctgctgtctgaacgttgttgtttagcattacctctatggcctattcatatatactcaaatggtgaggactgaggagtgaggacggtgccgggcgtgagagagaactatagaagcacgcgttgctttgtttcggtggtatccccacgcacggcaacgcgatccgatctgctgccttaaagacaaaatacctactgcccataattccgaaagatgaacaaggccg

SEQ ID NO: 30523 - DNA, 1404 bp, Zea Mays
gtccctcgcctgccccgccgcccctagccctttccccccgtgtccggtggttgcggctgcccgcatcatattcccaccttgcgaacgaggacgaactgctaccccctcgcctcgccctcgccgcctgctcctctccagttctcccccaccaaccgcagcagcgagagcgagactgagaatggccgcggcgccgtcgtccctcgtgtcctcccatctctcccgcctcgccgacctccgccgcgcggcggcgccggccactcccaccgtcccacagcagcttcgcgtcggcttctcgcgccgccgcgcccagcgcgtcgtcgccatggctggatccggcaagttcttcgtcggaggcaactggaagtgcaacggaacaaaggactccgttagcaagcttgtctctgaactgaatgctgctaccctcgaaactgatgtagatgttgtggtggctcctccattcatctatatcgatcaggtcaagaattcactaacgggtcgcattgaggtttctgctcagaatgtgtggattggaaaaggaggagcctacaccggagagatcagtgcagaacaactggtggacatcggttgtcaatgggttattcttggacactcagagcgtagacatattattggtgaaaatgacgagaaggctgcatatgcattgagccaaaatgttaaggttattgcctgcataggagagcttctggaagagagggaagcagggaaaacttttgaagtatgttttgagcagatgaaggcttttgcagatagtatttcaaactgggccgatgttgtgattgcatatgagcctgtttgggctattggaaccggaaaagttgctactcctgagcaagcccaggaagttcatgctgctgtacgcgattggttgacgaccaacatatcacctgatgttgcctctagcacccgaataatctatggaggttctgtgaatgcagccaactgtgcagagctagcaaagaaagaggatatcgatggttttcttgttggtggtgcctccttgaaggccccggacttcgccaccattatcaactcagtgaccgccaagaaagttgcagcctgatggaccaccctgtgaagaaataagaggccatcaccgtgtcgcctcatctgccacgccttaaagcctgtaggaggcgtcacctcctgtttttgctgatttgcagcacggggacagaaaataatgttttgctctcgtggatctgcacgtgacgaggagagttcagttgtcgtgagcgatgtacgttgggaatattgttatgtggtccttttctaaagaaaaaaaaatgttgacagtcaaggagaaatgtaagcgtgtttttttttaacagagaagctacatcttactgtgactgtgagtgttccatcactcgattctttcctttt

SEQ ID NO: 30524 - DNA, 1688 bp, Zea Mays
ttcgtggccctgctcgtagcttggaggcggcgacattctccggcaatgggggtcaaggggggcgacaagcccaagcccaactaccgcaagggcctgtggtcgctggaggaggaccagaagctccgcgactacattctcctccacggccacggctgctggagcgcgctccccatgaaagccggaggagtgctcctacctggcacagatgctctacggtagggtcatcatggatgtggtcaccaagagcaggcgtgcatcgcagattcacagtacacaactctaaggtaccaatgtcaagatagctgccattccttcaagcgtcgtggttctgacttcagagacctttgactcaattgtccttgatgagttttatgccccatggtgtggtcactgcaagcatcttgctccgatttatgagaagctggcttcagttttcaagcaggacgacagtgttgtgattgccaatcttgatgctgacaagcacactgacttggctaaaaaatatggtgtttctagtttccctacattgaagttcttccctaagggaaacaaagccggtgaagattatgatggtggccgggacttggatgactttgtcaagttcattaatgagaagtgtggcaccagccgggatccaaagggccacctgacttcagaggctaggcttgtgccaagcttgaatcctcttgtgaaggagtttctcaatgctgttgatgacaagcggaaggaagtcctctctaaaatagaagaggatgttgctaagctcagcggttctgcagccaagcatggaaatatatatgtgacagctgcaaagaagatcatggacaagggctctgactacactaagaaggagactgagaggcttcaccgcatgctggagaagtggtgtagctagttcagtaaagatgaaaagcgtcaaactagttgtggaatggtggtattgtttatagtacatgtgtttggactttggacactgggttccaatgacattatgagattccaagttcacacagcaggagttgctagcttgcaagccgattcttactccaaaatgggtaggcttacgggttgtgaagattatgatgctactggtaacgcctaatctttatggcaatttggtggctaacacggctgcaggtattgttggagggacgggcatcatgcctagagactttgtggcatatggaacttcttggagctttttgctatggtcttcatcaagttttataccaatgactttatctcccgctaccccgacccgctcatcaaggccatcgacaccatcaagatcgatctggagaccaacaagatcatggacttcatcaagtttgacgtcggcaacgtggtcatggtgactggcgggaggaacaccgggcgtgtaggagtcatcaagaacagggagaagcacaagggcatctttgagaccatccacatgctgcttggagctttttgctatgtctagttttctcctatttgttgtacaggaaaacatagaatagaattcaaatttggtggtcgcaaaagtgtggagactttaattcatataaagttaggcttaacattagtgcaaacagttgtattttagtttagatttagagtacacttatgtatgtgttgtttgacaatgcttatttatgatatattgaatggtacttatttatattatattaattataatgttgttcaat

SEQ ID NO: 30525 - DNA, 1286 bp, Zea Mays
atttcgcggtgtcggtgggaatgtacagatgcttctccgagaacgtgtgatttgcttgctcgcccatgagcttcagattcaagaagattgcttggggaggcgaatagggcctagtttccttggtaggcagggaggtgattctacaaggctggtgcaagatctgtatagattttttgaccaagttaacaaggaggaattcccatccgatgagaagttaccagaatcattcagggatttccttttggagatgaaggataaccattatgatgctagaacatttgccgttaggttgaaagctacgatggaaaccatggataaggaggtaaagaggtcaaggttggcagaacagctgtataaacattatgctgcaacagctattcccaaaggaatccattgtttgtctctgcgccttacggatgaatactcctcaaatgctcatgcacggaaacagttaccgccaccagaactgttacctttgctttctgataattccctccaacattatattctagccagtgataatattcttgctgcttcagttgttgtcagctcaattgtacgatcttcctcactgcctgagaaagtagtctttcatgttattaccgataagaaaacatatcctgggatgcattcgtggtttgctcttaattccatagctcctgcaatagttgaagtaaaaggtgttcaccagtttgcttggctgacaagagaaaatgttccggtactagaggctatagaaaaccatcgtggagtcagaaatcactatcatggagatcatggaacagtttccagtgcaagtgacaatcctagggtgcttgcttcaaagttgcaggctcggagccctaaatacatatccctgctgaaccatctccgtatttatttgcctgagctctttcccaacctcaacaaggtggtcttcctcgatgatgacattgttgttcagcgtgacttgtctcccctttgggcgatcaatcttgaagggaaggtgaatggagctgtggaaacatgcagaggggaagacagctgggtgatgtctaagcgtttcaggacatatttcaacttctcgcatcccgtgatagctcggagtcttgacccagatgaatgtgcttgggcatatggtatgaatatatttgatctggcagcttggaggaagacaaatatcagggatacatatcatttctggttgaaggagattttgtactgtgtacagtgttccaaaatctaaaaaagaaaccttgattcaacatttttgtgtaaatgtaaaaagtgaatatcttttttctgcc

SEQ ID NO: 30526 - DNA, 2427 bp, Zea Mays
cgaatcttgattttcccaaggggaaataatgttgaattcttatctatgtatttggatgtggctgattctggggtattgccctatgggtggactagatatgcacaattcagcctctctgtggttaatcaaattcacaacaaattcacaataagaaaagaaacacaacatcagttctctgctcgagaaagtgattggggtttcacttcatttatgccgttgggtgaactctacaaccacagtagaggttatcttgtaaatgatacttgtatagtggaagctgaagttgctgtatgtaaagttgttgactattggagttatgactctaaaaaggaaactggctatgttggtcttaaaaatcaaggtgctacctgctatatgaattctcttcttcagacgctgtaccacatcccatatttcagaaaggctgtttatcacatgcccaccactgagaatgatatgccctcaggaagcatccctttagctctacagtcactcttctataagttgcagtataatgacagcagtgtctctacaaaggagctcacaaaatcattcgggtgggacatgcatgattcatttatgcaacatgatgttcaagaattgaacagagttctttctgagaagttggaagataagatgaagggaactgttgtagagggcacaatacaacaattgtttgaagggcaccacatgaactacattgagtgcatcaatgtagatttcaaatcaacaagaaaggaatccttctatgatctccagcttgatgtcaaaggttgtcaggatgtctacgcttcatttgacaagtacgtagaagtggagcaattggaaggtgacaacaagtatcatgccgataagcatggtctgcaggtggtccactttcgttcactggagaagcccaaggaggacgattttttcctcgagatgtcaaagattttcacatatgatcaagtcgtggaaaaagtagctgaaaaacttggcgtggatgacccatcgaaaattcggcttacatcacataattgttattcgcagcagcctaagcctcagccaataaagtacagaggcgttgaacgtctactggacatgctgattcattataaccagacttctgatattctgtactatgaagtattggacataccacttccagaattacaagcgctgaagacattaaaagttacataccatcatgccacaaaagatgaggtgtcagttcacagtataagattgccaaaaaacagcactgttggcgatgtgctaaacgatatcaaaacaaaggttgagttatctcatcccaatgctgaactgagattacttgaggtcttttatcacaagatatacaaggtgtttgcaccaaatgaaaagattgaaaacattaatgatcagtactggacactgcgtgcggaggaggttccagatgaggaaaaaaaccttggtccctttgatcgattgattcatgtatatcattttacaaaagatactcaaaaccaaacgcaagttcagaactttggagaacctttttttatggttattcgtgaggatgagaccctatcttctatcaaagagcgtatacagagaaagcttaaggttccagatgaggatttctcaaagtggaagtttgcatacatttcacttggtcgtccagactattttgaagattcagatactgtagctttaaaatttcagagaaacatgtatggagcttgggagcagtatcttggactggaacatccagacacagctcctaggaaggcacacacaattaatcagaaccggcattcatttgagagacctgtaaaaatttataactaggcatgatagaaatttgagcaatgagctgccaagcaagggctaaaattgctgtcctgaaataaagcgtgccggggcatgttgctcaggtttttcgtggagctggtgagctagttcatgagactccaagtatgatcggggcggcttctcatctttccctgcttttccccggatacatataaagttgtgcagagatgaccccaccgaacaattgtctttagtagataagccagtacttcccgttagatgactttatacagtcgaatagccggcattttagtcgatctttccgttctccagttgctgttggtgctaggaggccttgagctgttgagggtacttgccctgctgtatattatgacgtagagtgtacaagtctttgttgttgacaattacacggtgttttgtaatttcagtgatacacttccaggtccttcagtacgtacttgcctggatggtgtcaatttggcattctatgttagatattgatccatctgttctaaattaaaattataaggcagtttgacttttttaagatatactgcctccgattttctattagttgtcgtttagaatagtgacacggtctccatattataacgtgtctccatattataactt

SEQ ID NO: 30527 - DNA, 2680 bp, Zea Mays
tggccgtgatcggaatcagtctacgattatctctctccgtgccattggcatcgatacagcccccttctgattgggattgctacaattcgaccatgcacatgcactcgccttcacatgctaattacataattaccaacatcccatttttacgtagtcttccaatgtaacttgcactcaaagctgctggctagtggctcgtcgaatcatcaaccgcctgcgcttgggagggggtactgacgctcaaatttgcccgcgtacttcttcttaccgctttggatgcagtgcagtacacttatgtagctagattaggtggtgcatgtttactgattcttttattatattcacaaatacgatcaaatctattgtctttatttgcccaaaacttgatattccattgtttgcttttctcagctcccttgtgacttcagctctgtcccttttcgagtagtaggtatcatggtcatgaagatggagcacgaggacaatggtgccatcggaggaactgatggcacgtggacagaggacgaccgagctctcggcgctgctgtgcttggagcagatgcctttgcatatctaacaaaaggaggtggtgccatatccgagggccttgttgccacatctttgccgggtgacttgcagaacaaactccaggagcttgttgaatccgagagccccggtaccagttggaactatgctatcttctggcagctctcacgcacaaagtctggtgatctcgtccttggatggggggatggctgctgccgtgaaccccgcgatggagagctgggagctgctgcttctgcaggcagcgaagatagcaagcagaggattattcccctggtattgatcaggtcacagatactgagatgttcttcctggcatctatgtactttgcgtttccccgtcacgctggtggccctggccaagcatttgcagcaggcatccccatctgggttcccaatagtgagcgcaaggttgtaccagccaactactgttaccgtgggttccttgcaaatgcggcaggatttaggactattgttttggtgccatttgagagtggcgtccttgaactgggctcaacgcagcacatagctgagagttctggtactgtccagacagtaaggtctgtatttgcaggaacaagtggtaataagtctgcagtgcagagacacgaggctgaaaggtcacccggtttggcgaagatctttgggaaggatttgaaccttggccggccttcagtcgggctggcggtcggtgtatctaattctaaggtggatgagaggacatgggagcagaggagtgctgttggtgggacctcattgctaccgagtgtccagaaaggtttgcagaatttcagttggagtcaggctcgtgggctgaattcccatcagcagaagtttggcaacggtgtgttgattgtgagcaataatgagggtgcacaccgcaacaacggagcagtggacagccctagcgcagcgcagtttcagcttcaaaaggcgcctcagcttcagaaactgtcggttgttcagaaaacgcctcagctagtgaaccagcagccaatgcaggcacaggtacctaggcaaattgacttcagcgccgggagcagttccaagcctggtgtgttggttacaagggcaggtgtcctggatggtgagagtgcagaggtggatggcttgtgcaaagaggaagggccaccacctgttatggaggaccgacggccaaggaagaggggaagaaaaccagcaaatgggagggaagaaccacttaaccacgtcgaggcggagcgccagaggagggagaagctcaaccagcggttctatgcgcttagagctgttgtgccaaacatatcgaaaatggacaaggcgtccctgctgggcgatgcgataacgtacatcactgacctccagaagaagctcaaagagatggagacggagagggaaaggctgttggagtcgggtatggtggacccaagggagcgggcgcctaggccagaggtggacatccaggtggtgcaggacgaggttcttgttcgtgtgatgtctccaatggagaaccatccagtcaagaaggtcttccaagcgttcgaagaggcagaggtccgtgtaggcgagtcaaaggtgacgagcaataacaacgggacggcggtgcattctttcatcatcaagtgtcctggcactgagcagcaaacgagggagaaggtgatagcggcaatgtctcgcgcgatgagcagttgagcatagcagctgtaggatcagactggcacggtagaaggtggccggtttatccaggttgcgaacaagaggcggcggcggcggctgaagcagcccgtcgattgttgataggagagttgtaggtggagagaagcaagataagattcttctgacttaagcaatgcagcagcaaccaaaaaaaaagaattggggctctagttaagcagccattctacggtaggtttcttttggttgtggtccgaccccgaccgtttagttctgatgtttttgctttggaaggatggataccgtgttcgttgtgtaagcctgatgatgcagcagaaccataaacagcaatacatgtttttcttattcttcttcttcttctcatgcgtgatttggaaattaaattcattgcagattgtcttttacatttcctttttatggcgatgatagtttagtatgttaaa

SEQ ID NO: 30528 - DNA, 2764 bp, Zea Mays
tggttgcttgggggccaacattgagtcacaaaatgcatcaggagctccatgcaagatcaaaattcgttttgagttgcatttcttatgaatcagtctgcggagaatctgtttggctatcctgcatcagaagcccttggtcaggacgccctcatgcttctggttgattctggtgatcacaatgtggtgaatgacattttccgacgtatttctatgggtgaaagttggactgggaagtttccagttaagagcaaacaaggagatagattttcagctgttgccaccaacacacctttctatgatgaagatggaagtttggtgggtatcatttgtgtttcaagtgattcccgccacttggagcagatattttgtaagcctccaacctctgcaaggcctcaatcagaatcatctaggacatcttgtgatgggagttgcagcaacactagtcgcagaatcaatttgttgaacagaagtccttttgatcctcagatacccctgcaaagcacttttgcatccaggataacgaatttggctaccaaggtcacaaataaagttcgttctcgggtcagcacagacgattatggcatagaacgggaaggtggcagtggtgagagtcattgttcggatcgtggtgcaaaggaagaaccaacatctagcggaacaaatacacctagagggaatgcaccacatggtcccttttctacagatgagaactcccctgggaaatcaacgaacccaagcagtgatgaattagaaggaaaagtaggtctgcacaagtttttgagttcaaaggcagaggcactactgaacaagaaagggatatcatggccttggaaagtgcgcgagaatgacggacctgatgaaagaaatcatgtgatattgttgcatggagaccaagagaatgttatgaatcatcagaaggtttcagattctagcatagctccagattcccaaggcgctgaacacaacctacctagcaaaaatgaggcatcaggttcctggtcctcttacaacaataacagcacaagcagtgcaagcagcacaggaagcactaatagcagtgctctctacaaagtagatcatgaagcggattgtctggattatgagatcttatgggaagaccttgtcattggagaacaaatagggcaaggctcttgtgggacagtatatcatgctttgtggtatggttcggatgtggctgttaaagttttctccaggcaagaatattcagaagatgtgatactgtcctttcgacaagaggtgtcccttatgaaaaaactgcgccatcctaacatactgctcttcatgggtgcggttacgtctccacaacgcctttgtattgtaacagagtttctccctcgaaattgctagtcaaagtgtcaccttgtaggctatgacaatgcctgaagtaccattatatattttgattctgagggagtattctccatgggtgatggatgacagcagatctatgatatccttttccttgggttgggttggttccatgttcaaaacactgtcaagcactcaaacacttctctctttttggttcatttccgtattttttcacttctgtcttttcaaatgcagtggaagcttgtttcgcttacttcaaaggagtgctaccaagttgggtgtgagacgacatgttcacatggctttagatattgcaaggggcatgaactatcttcaccattccagcccacctatcattcaccgagatttgaagtcatctaatctgttagtcgacaagaactggactgtgaaggtggcggactttggcctttcacgtctcaagcgcgaaactttcttgacaacaaaaacgggaaaaggaacaccgcaatggatggcgccagaggtgctgcgcaacgaaccttccgatgaaaagtctgatgtgtatagctatggggtgatcctatgggagctcgttactcagaagataccctgggaaaacctgaactcgatgcaggtcattggcgcagtaggttttatgaaccaaaggttggatatcccaagcgaagtagatcctcagtggagatcaattatcctgaactgttgggaaagcgacccgcagcaacggccgtcgttccaggagcttctggagaggctccgcgagctgcagaggcgttacgccatccagcagcggaacgcgaagaacagcgtcgaggagtgaagactgaagaatgcaatgcaactctcccaagcggcggcgggcttgctttgaagcattttgcgagccagcagcatgccagatctagagaagggcctgagcctcctgtactggggcctgggggctgctaaggctggaagaagtatgttctacagacgaggcgccttctgtcttcttctttttttttaaaaaaaaagaaagttcttccccatggcaattgtgactgtaattaatttctgggtcctgacagcaagggtcagtagggtagcgagtgagtagtgactgagctcgggcttgcttgctagcgcctctgggttctgattcttgacaacgcaaatgcgtactacgtggttaacagtaacatccaatccagcctccagtttctggcaagggcatgcatgatgatgtgtagattgtctgttctgataggtcagtggtgtgtacatgtgatccccaaccgaacgcattcgactgcgtcgcttcgatatctggttggtcaggttacactgctgaatacgggtgatagatccttcttccctagcaagtagcaatggctgccgaacaagaattcttatatttgagtgctcgaaattaaaa

SEQ ID NO: 30529 - DNA, 1067 bp, Zea Mays
tatgtgccacatataaaggatattgtatattctcgagaacaacagttaggcagactgctattaattgattacctataggatgtaaaattgtggtgagtggtgactacagtagtttcaggggtgctgtgtttggtgttccattctcagagtttttttagccgtctcaaatttgcagaaggcactaacatcggttgaactaacaaaaagccttgttctacttctatcatccaaagcggacattcaaaacgtggtccatcttacatggtgtccttaccagggcccctcgggcaaaataatgcttcttcctgaggatgatccaaatgccactcatatcatgattgccacggggaccggtgttgctccctaccgtggctacctacgtcgcatgttcatggaagatgtcccaactttcaaatttggtggtctggcttggctcttccttggtgttgcgaactctgacagccttctctatgacgaagagttcacaaactaccttcagcagtatccagacaatttcaggtacgacaaagcgctaagcagggagcagaagaacaagagcggcgggaagatgtacgtgcaggacaagatcgaggagtacagcgacgaaatcttcagactgctagatggcggtgcgcacatctacttctgtggtttgaaggggatgatgccggggatccaggacacgctcaagaaggtggctgagcaaagaggcgagagctgggaccagaagctgtcacagctgaaaaagaacaagcagtggcacgtcgaggtttactaggctataagatggcaaggattgtgattgtttagctactgagctgagaaactggacgtatgattgaacgactgtggctgctgcgatgtaatgtaacattgtagacttggattcataagcttctgctccaaatggtgaataaaatgaagcacgcggtttgtagctgctactaccagtatcaggacagtttctttttgctcgtttcgtataggttgattaagctatttttaagggtacatctccttgctttatgttattctgaattttcttatctgagatgcattattgaatt

SEQ ID NO: 30530 - DNA, 1871 bp, Zea Mays
gtgggtctcagggggagaactctgagagaactctaggacaacaaaccagaggaaggacactcggcggaagataatgacacacgctcgacgagacctaaagacttggaggccagagccaaggcttagtgtaggactccggttccatagtctttaggtccacccacgcataagagacttgggagctctccttccctctctcgctcgcttgtaacccatactacgagtattgagcaacaaaggtgccggtatcgtgagccgtcgaagactggatgtagggacgttttgcctgaaccagtaaaaactttgcgcccaccgagcacaccgtccagagcccagaacgcgcacatagaaattcaattgttgaaaatcggaggttcgaaacaccgacaatatggcacacagatcctgctgttgtacagattgcttttcagtacagcgtgattgaacctgtcaaggaaacatcaggcaatggatcacaaccatctgcaagttacaagttctgtctgaagagacggttgagaataagaacattgcagtaccgtccaactaataatatcagcgaaatttatgacagtgtagatccagaggttgtcctgcatatccttgttcataaggttattttagaatccttggataaaggggttagagaaggcaggcatcaagtgcatgcttggctatccctccttgcagcccggtataatcaggccctgagttctgatgtgcgaccgctgtcaagcatagacattgacttctcacagtgcccacagcttcaaacgatacctcagcttgtttttgcattgttgagaagtcctcttcttcgcttgcatgaggaaggcgtgcacccagattacaggatatatctacaatgccttttcagtgcactggagccatcatctgtagctaaagccatatatccggttttaatctcgtattcctcgcctgacaagcaagcattcccacggcacactctgagccatgctgctctaatcatgagcgagagcccaatatttcttctcgacacatttaccaaccttattgtttactattcctcaactgctgatccttcagttccttttcctccaccccatgactgccttttgagaaaaacaataaatggactgaagcaggacagatgtataacccccaagcttacattcatccatggagggaaagatgattcaacattgtttgagagctatctcattgaagagcaagatgttgatggatcgggcttaacaactggttcaggttttgtagccttccgtgagagcgtgaggaacgttgcaggagagatcatacaggaagaaattggaagttagttccagctcgattacctttttggttctgctgcagagggtatcgactaggatgttttagccttaattaatgccgtagcagttaactgaaacgtagatagccaaaatggagagacaattcaatgaataataaaaggaggccacttgatgtatagttgcttctgtcaacaactgctttaggcttgactaggcagagcagcctttctggtacagcggcactgtctgtctctatgctaaaacagacgagttttactacacaataatacaccgtcggaacctggcagactgaaatttgagagaattcaatcccttaatgctcggtttggatattggagggcaaggaattgaattgagttcaatactaaatcaaccatggtattgaaatgagatgtagtttcaattgtatcgtttgaatgttactgaattagagtttggaatcgtgcgatctaattccacgtaataccgaggggtgatgctctgtattgaaaagttgggattctagttatagttcaattatagggaattgagtctctgattctaaatctcaattccgtg

SEQ ID NO: 30531 - DNA, 2626 bp, Zea Mays
ttatcgttttgccatttgccaacccaactcccgattcccgaaggcccatttcgtcgtctctcgctccctcggtccttccttcacccatctcacccgcgacccgcccctttcccctaagccatctccttcctcctcacctcgccatggcgttcttctctcatcaccatctccagcagccacacgcgcagcagccagtgctcccttccttcaggaacgcgctaccggtgcctgtggatggccagatcccagcgcccctcaccttcttcaacccgccgcctgccttcccggagcaacccgcgcaggcacctctggtggatgcggtgggcttgacggcagctgcggggcttgggtggaggcagccgagggagcaggaactgcttggggaaaactcccagatgtcgtccattgattttctgcagacgggctcggcagtgtcgacggggttggcgctgtctctggaggaccggcgccacgtcggcggcggggctgggaactcctctggcgattcaccgctgctcctgctgcccatgctggacgatgacatctcacgcgaggtccagcggcttgacgctgatatggaccgctttattaaagctcagatctggacttctcgaggttgaggttgagatgggctacatatgtacttgtacattggctggtacttagcaacggaaaattgctttatggtggaaatacatgtgttgcttttacttaaaaaccacagcatcgagttgaataattgaaggggaggagatgaagaaaaagagggtatgggcaataatgtggaaaccaggaaagttgggaagcttggttgcgtgtgcttcagttgaagtgaacggctgaggcaatctatactggaaaaagttcaggcaaagcaatttgaggcactggcctcagttgaggacaagatactcagaaaaataagggacaaagaggcggaagtggagaccataaacaaaaggaactctgaactagaggaccagattaagcatttgggagtggaagttggtgcttggcagcatagggccaagtacaatgaaagcatgatcaatgcactcaagtacaacttggaacaggtttgtgctcaccagagcaaggatttcaaggaaggctgcggcgatagcgaggtagatgacacggcgtcctgtcgcgatggtggtgctatcaattttcaactgactccgaaggagaacagacaaccgaaggatttgacggcttgcagggtctgcaaatcaagtgaggcatccatgctcttgctgccttgtcggcatctttgtctatgcaaggagtgcgagagcaagctgagcttctgccccctgtgccagtcctccaagatacttggcatggagatatattatgcgtagaatagaatttatgtatcacatgagtatcgtacgagatactgctatgttaatacgattaatctattgccaaactttagaacctatgtaccagtaccactatgacttgccactggatcaaaagacactgccgttgatggtagatttaccgcagcaaatttctgtgagaagcccatcgttgatttgtgctcctggttaacttcttggcggagtttgtcttgtgcgactgattgttaccgtccgtctgtatttccatcacctgaacttctgaggccgtgtttcgaactcagaaaatttacccggctcctgtgctttcactgctacattgacttggcaatttggtaaatatttatgtgtatatataaatagagtgtcaaactgttttttttagataatgggaaaaaggttcccggcctacatcaaagatgacggccgtccaaaaaacagtagtactgccagaaaataaaagaagccacaagcggcaaaaagacccaagcacagttgggattgaataactagccactagttattctatttctaaagctccaaccgtgcttggcgaagatttgcatcattgagacttccagggtcctgcaggcaactttgatccttacgatgtcctcttcacgcctttggagaagcccccagaaccgacaccaataagtccctcgaaagagtacctgcaagtaagttataataggcttcttatcaaaaaccacatcatttcgacttagccacaacgcccagcagattgctatggcaccaacataaatctttgcctttgtttctttatcgaacttctgcaaccaggaggatcccatatcctgtatgctagttggttctctaataccaaaggtaaagaaaatcgttcaccaaagaaatctagcatagtgacaatcgaagaaaagatgttggatggtctcgtcatgagaacaaaacatacacttttttgattctacccagtttcttttgattaggttgtcttttgtcaagatcaccccccgtgttaggaaccagcagaatatcttaatttttagtggtactttaagtttccagatgagagactcttgacggtgtattcccctctcaatcaaggctgcatacatcgagtgagaggagaacttcccgttttggtgaaggctccaactgaaagtgtcttttgattggtttaatgaaaggcccactaccctgttaactagcgaataccaccgtcccaagttatctccatgcaatcccctgcgaaaggatacatttagcgggacagt

SEQ ID NO: 30532 - DNA, 254 bp, Zea Mays
tctcttataaatacatgcttctaatagggaaaccactccactgctcgtgttttcactttgttcctcttctcattgaagccctcgcgccatcctcgacctgcactctccaccaccaccgtccttgaccaccactaatgtcggtctctgatgcatccttccccgacaactgctcgattttctccgttgttgccatcctccaccatcttctctgttgccaccatcctccgctatcgccgtctagtgctcgatatatg

SEQ ID NO: 30533 - DNA, 1258 bp, Zea Mays
aaaatgttttagaggtattactccctgaaggtgtaataattcctacaggttttgaaacaatagggcatatagcacacttgaatttgcgagatgagcatatgccttacaagaaacttattgcttcggtggttcttgataaaaacaagccaaaaatccaaactgttgtcaataagacagatgttattcagaacaactatagaactatgcaacttgaagtcttagctggcaatggttcccttcgtacgatggtcattgagagcggccttcgttttcaagttgatcttggtacagtctattggaattctagattagccacagagaggcagaggctagttaatatctttagaaacttggacgttgtttgtgatatgttctcaggggttggtcctctagcgatttcagctgcaaaaaaggtcaaatatgtctatgcaaatgacataaaccctaatgcagtgggataccttgagagaaacatggttcttaacaaacttgaaaagaaaatagagatgtgttcaaagggattttatgcaatactaaatcagaactgcattgtgtgatgccaatgatccatgtgtacggattttctaaagctgaggatccagagcatgacttccatgagaggataaatttaacgttaggcgagaacatcgacactgttgaaatgcacagagtacggcttgttgcacccggaaaatggatgatatgtgcaacttttactcttccacagtcagtggcgtctgcacagccgaattacattacctgttgattttttgtactctctccgtcttaaaatattggcaacgactgttatgcaagcagtccttctgtgcaagcgtgcaagcaaaccatatgatccattagattacgatccaatcacagatacaaccatgtttgttagaggttttttataaagattattgagctgttggtggaagggtttaagtgttaaatgtgacatacggttggatcacgatctaatggatcaaatggtttgcttgcacgcttgcacagaaggactgcttgtatagcagtcgttgcctaaaatattagtcgttttagctcagctctggatttttatgtctatatccaaagacatgtaaaacatataaatcaaatgttatatgaatttattaattgtcgaaaatgaattttaatttgggatagagggagtactattcttactgcagcccctcgtatcttctgtactgtcgtcgaatacttcctatcagattatatagatgatgcccttgatcatctc

SEQ ID NO: 30534 - DNA, 2248 bp, Zea Mays
gctaagcctgatgtcacccagcacataacatagctaggctagaaccccgcgtcaaagcatgcagcctccaacgttgttgccgcccgggcttctgcacaaacccctccaaagggcatcaacgcgccgccgcaatgctgcgtcggccgccaccactccggctgggcacacggaaccgggcaacaacttgccacatgcgtcacactgccgcgcaccaaagccgaagcccgctgtcgctgtcggccctggcacccgcgggcaccaaagccacctgccgtcgggcgctccaccgccgtcgccaccatcttgtgcctgcccaggtcacttgttgtcgttgccatgccatcaaacgagaggagggccccgtcgccgccgccatctcggccgaccgcgtagccctgctggcgcacctcgccgggccactggacgcctctctccatccgtgcagcctcccaacgcccaagcagattcatactttgcccgctatcactgcctcatggtcaaaattctttctgttaggtctctatttctgtccctctctatctctgtcacaagctctgtaatctgtagttctgcataagactgcatctttacaaataatccaattatggaagggaatgaaatcatgaaaaggatatgctggagcaatatagctataattagaaaaatataagacacagtgatcctgcataaccgcagtacatgaatttcatcttagacggaattaacaggctctctatggtaactatggatctcaattgtattgctaattggggctattatgtactactaatgtcattgcctagttattgtcacacccttttttgtcaacttgtagtggttttctgtcgtaccaaaacattttagcagacaatgttttgtcttatttcgtgatatgggtccagagaactgtgtttgtcggtctatcacagagtatgcaagttccccatttctgatttattgaaacaacattgtgttcctctaaaaatagttcctttctgcgtcaacttcaatgcataatggtagatatgggatccttgtcaaccatgtgctttcctggaccagtttagtttgaaatatttgaaagtagttaagcacagttttctggttaattttacgtaaagggaatacgatggtccttgcaatgctgtattgatggctgcattgatgctatctgaatatttcattggccgaactttttttttagtgtggtatgcatttggaagctaacaactagaatgtctacattaataaggtatgtctttctttaaaagctaacaactagatgagatatagaaggattatggataagcttctagacaactatacatttgttattaggtactgaaagctcttttactttcctgtagttgtcaggtgatatccacgaagaggtggagactcataacagaatgctagaccgaatggggagcgacatggatacatcaaggggctttctctctggcaccgtgggcaaattcaagacggtattaagcgacatcagaaacaattattgctactatgcagttcatctgccctttgtgcccttcttgagatgattcatgtcatgtgtaaacgaacatgatacaggtgttcgagaccaaatctactggtttactacttgaccaggtagaatcatccacggtgaaagttttgtggggctgggcgtgttcaagaacattctgaaaatggacgtgctgatctggtggtgccgtgccgcgtatatatatactcatgagtagcagagtatgctgatgtgggttccgtgaacaccgcagcgtgttgggtcgaacctctctctgctacaggaaattgttgtccgttcctttggcatgatatgtgtgtatggagggagtatgtacatgtggtattaccgtactagtaaggtcctctttagaagcaattattttttagctaagagagattagcttcttagtttttaacaaactaataatttaattcttataaactaaggtatataccggtatgtttggaatcacttcaatttctataaaacagttttttaaaaaaactgggtgcatctaaacatgtagtacgtggaatctcgaccacagagatgtatctactaggtttccttgtggctgggactcgacttgtttgagcactgtgtgaggtcgacacgtgtctctcccccgcatctggcaagacggatccagatgaaaggaatgacattgtggctgcaccaagagcaaccggtataataacacttgacaaggagtattatatgctt

SEQ ID NO: 30535 - DNA, 2847 bp, Zea Mays
gtttttttttaaaaaacgagcccgaccttgctccaactccctcgattccctctccctattcgcgttccccacttccgttcgccgccgacaccgcgtgcgctctctccccccctccgtctctgtctgcgacgactgggtgggctaccgctgccgccctacccatgtgctgaggcttctgcctacctcttcgccggcgaagagcgcccagcagttgaatatttgatcagctattgacttcgctgctggcctgttttctcctttggagaccaaagaagccatggcgggccgggaggagagatatgtgaggtttcatgactggaaatcagagcaatctgtttctgttatttcagatagggtagtatcagaaaaagggcataacatctttggcttgttaaaggacagaacagcaggagccttttcattcctggggaactcttcacattctgaagccctaaacaaattaggcctaggggagaagtcaaaaacaaaagttcttgatcctcaagggccatttttgcagagatggaacaagatatttgtgatatcatgtctttttgcagtttttgtggacccattgttcttgtatgtcccagtaattgatggtggcaacaactgcctgtacttggacaagaagttagagaccacagcaagtatcctgcgctttttcacagatatcttctatttactccatatactgtttcagttcagaacaggctttattgctccctcttctagagtgttcggtcggggtgccttggttaaggacacatttgcaatagcaaagcgatatctatcaacattgttcctggtggatttcttagcggttctgcccctccctcaggtgtttgtgttggtggtgctgcctaagctccaaggtcctgaaattatgaaggcaaaaattgtactgttggttattattatttgtcaatatgtgcctcgactgctccgaataataccactttaccttcaaatcacaagatctgctggcatacttacagagacagcatgggctggtgctgctttcaaccttataatttatatgcttgccagtcatggctttggagctctttggtacattctttccatccagcgagaagacacctgttggagacaagcatgtatcaatcagactggctgtgatcctacatctttgtactgcgggtatcattcacttgcaaataattctttcttacaaaatgcgtgcccaacaaatagcactgccaatccagaccctatatttggaatctttctaccagctctccaaaatgtttcacaatcgacgagtttctttgaaaaactattctattgcttttggtgggggctacaaaatctaagttcccttggccagaacatgaaaacaagcactaatacattggagaatctgtttgctgtttttgtctcgacatcgggtttggttctatttgcactacttattggtaatgtgcagacctatttacagtcagcttctgtgcgtatcgaagaaatgagagtgaaaaggcgtgatacagagcagtggatggcacataggctactccctgagaatctaaaggatcggattatgcgccacgaacaatataggtggcaagaaacaagaggggttgacgaagagggccttcttaaaaatcttccaaaggatcttagaagagagataaagagacatctttgtttgtcacttctcatgaaggttccaatgtttgaaaacatggatgaacagctgttggatgccatgtgtgatcgtctaaagcctatgctgtacacagaaggaagctgcatcattcgcgaaggtgatccagtgaatgaaatgctcttcatcatgagaggaacactagagagtaccacaacaaatggtgggcaaactggtttcttcaactctaatgttctaaaaggtggagacttctgtggtgaagagctcctcacgtgggcccttgaccccacttcagcttcaaatcttcctggctcaactaggacagtgaagacgttgtctgaagtcgaagcttttgctctgagggctgacgacttgaagtttgttgccacacaatttaggaggctccacagcaaacaacttcagcataccttccggttttactcacagcaatggaggacctgggctgcttgcttcatacaggcagcttggcacagatactgtaggaagaagctggaagaggctttatatgagaaggagaagaggttacaagcagcaattgtaagtgatggcactacttcgctcagtctcggtgcagcgctctatgcttcacgttttgctggcaacatgatgcggatcttacggagaaatgccaccagaaaggcccgtttgcaggaaagagtacctgcaagactgttgcaaaagccagcagaacccaacttcttcgctgaagatagctgaacttgtaccctgtagcaagcagggattcatggtccaaccggtgaagtttgtgcagaagttaagattggatgctgtagatagacagatcaggtgctctaaagccgtctggtttaaatcacctaattcgcgaaaaggcctggtccgagttagattctccgttgaaataaatttgaagctgacgttaaaaaaaaaatccgcttttgctccacgttaaattctggcttccatagtggtcggactagggtgctgagataagggtattgagattttttagatctgtgtgaaaagattttctgtaacgtaatatctgaaggctgtcttatcctctgtaggttattttaaaaaaaacacgtatatttcgattgtatacaggtttcatgtattataaacactctaatttaccttgtgcatttgaaaaaagagagaagatgctgtgaatataatcgattaattgtttgttcatt

SEQ ID NO: 30536 - DNA, 4108 bp, Zea Mays
cgggccccccgcggcgccagctcacccttcttccacctccgcctcactggcacacatgctccccgacaccgcctcccgccaactcggcgttaaactaatcccaacccagcccaccagaggcacgcgaattaactaggatcaaaaccgtctcgccgctgcaataatcttttgtcaattcttaatccctcgcgtcgacagcgacagcggaaccaactcacgttgccgcggcttcctccatcgcagcagcgctctcgcagcgggagatgcggtgttgatccgtgccccgctcggatctcgggactggtgccggctctgcccaggccccaggctccaggccagctccctcgacgtttctcggcgagctcgcttgccatggagggcgacgcggacggcgtgaagtcggggaggcgcggtggcggacaggtgtgccagatctgcggcgacggcgtgggcaccacggcggagggggacgtcttcgccgcctgcgacgtctgcgggtttccggtgtgccgcccctgctacgagtacgagcgcaaggacggcacgcaggcgtgcccccagtgcaagaccaagtacaagcgccacaaggggagcccggcgatccgtggggaggaaggagacgacactgatgccgatagcgacttcaactaccctgcatctggcaatgaagaccagaagcagaagattgccgacagaatgcgcagctggcgcatgaacgctgggggcagcggggatgttggtcgccccaagtatgacagtggcgagatcgggcttaccaagtatgacagtggcgagatccctcggggatacatcccatcagtcactaacagccagatctcaggagaaatccctggtgcttcccctgaccatcatatgatgtccccaactgggaacattggcaagcgtgctccatttccctatgtgaaccattcgccaaatccgtcaagggagttctctggtagcattgggaatgttgcctggaaagagagggttgatggctggaaaatgaagcaggacaaggggacgattcccatgacgaatggcacaagcattgctccctctgagggtcggggtgttggtgatattgatgcatcaactgattacaacatggaagatgccttattgaacgacgaaactcgacagcctctatctaggaaagttccacttccttcctccaggataaatccatacaggatggtcattgtgctgcgattgattgttctaagcatcttcttgcactaccgtatcacaaatcctgtgcgcaatgcatacccattatggcttctatctgttatatgtgagatctggtttgctctttcgtggatattggatcagttccctaagtggtttccaatcaaccgggagacgtaccttgataggctggcattaaggtatgaccgggaaggtgagccatctcagttggctgctgttgacattttcgtcagtacagtcgacccaatgaaggagcctcctcttgtcactgccaataccgtgctatccattcttgctgtggattaccctgtggataaggtctcttgctatgtatctgatgatggagctgcgatgctgacatttgatgcactagctgagacttcagagtttgctagaaaatgggtaccatttgttaagaagtacaacattgaacctagagctcctgaatggtacttctcccagaaaattgattacttgaaggacaaagtgcacccttcatttgttaaagaccgccgggccatgaagagagaatatgaagaattcaaagttagggtaaatggccttgttgctaaggcacagaaagttcctgaggaaggatggatcatgcaagatggcacaccatggccaggaaacaataccagggaccatcctggaatgattcaggttttccttggtcacagtggtggccttgatactgagggcaatgagctaccccgtttggtctatgtttctcgtgaaaagcgtcctggattccagcatcacaagaaagctggtgccatgaatgctcttgttcgtgtctcagctgtgcttaccaatggacaatacatgttgaatcttgattgtgatcactacattaacaacagtaaggctctcagggaagctatgtgcttccttatggaccctaacctaggaaggagtgtctgctacgtccagtttccccagagattcgatggcattgacaggaatgatcgatatgccaacaggaacaccgtgtttttcgatattaacttgagaggtcttgatggcatccaaggaccagtttatgtcggaactggctgtgttttcaaccgaacagctctatatggttatgagcccccaattaagcagaagaagggtggtttcttgtcatcactatgtggcggtaggaagaaggcaagcaaatcaaagaagggctcggacaagaagaagtcgcagaagcatgtggacagttctgtgccagtattcaaccttgaagatatagaggagggagttgaaggcgctggatttgacgacgagaaatcacttcttatgtctcaaatgagcctggagaagagatttggccagtccgcagcgtttgttgcctccactctgatggagtatggtggtgttcctcagtccgcaactccggagtctcttctgaaagaagctatccatgttataagctgtggctatgaggacaagactgaatggggaactgagatcgggtggatctacggttctgtgacagaagacattctcaccggattcaagatgcacgcgcgaggctggcggtcgatctactgcatgcccaagcggccagctttcaaggggtctgcccccatcaatctttcggaccgtctgaaccaggtgctccggtgggctcttgggtccgtggagatcctcttcagccggcactgccccctgtggtacggctacggagggcggctcaagttcctggagagattcgcgtacatcaacaccaccatctacccgctcacgtccatcccgcttctcatctactgcatcctgcccgccatctgtctgctcaccggaaagttcatcattccagagatcagcaacttcgccagcatctggttcatctccctcttcatctcgatcttcgccacgggcatcctggagatgaggtggagcggggtgggcatcgacgagtggtggaggaacgagcagttctgggtgatcgggggcatctccgcgcacctcttcgccgtgttccagggcctgctcaaggtgctggccggcatcgacaccaacttcaccgtcacctccaaggcctcggacgaggacggcgacttcgcggagctgtacatgttcaagtggacgacgctcctgatcccgcccaccaccatcctgatcatcaacctggtcggcgtcgtcgccggcatctcctacgccatcaacagcggataccagtcgtggggcccgctcttcggcaagctcttcttcgccttctgggtcatcgtccacctgtacccgttcctcaagggcctcatgggcaggcagaaccgcaccccgaccatcgtcgtcgtctgggccatcctgctggcgtccatcttctccttgctgtgggttcgcatcgaccccttcaccacccgcgtcactggcccggatacccagacgtgtggcatcaactgctagggaagtggaaggtttgtactttgtagaaacggaggaataccacgtgccatctgttgtctgttaagttatatatatataagcagcaagtggcgttatttacagctacgtacagaccagtggatattgtttaccacaaagttttacttgtgttaatatgcattcttttgttgatataatttatactttgtggagagttgctgacagacgagttttgtatgctacgaaaaacaaagaaattactccctccgtccagtgaagcaagtcgttttagcattgcaaggcgttagagtagtaacatgagagattacaagaataccctccattaaatgtaaagattcttgtgtcacatacggatgatgtagctagtcatctcagcatttattgattttttatccatcaggcgccaaaagtagaaatgtgtacacaggcacacgcgccaaacacattaacaaaaacgaaaaacaggcacacgcgccaaacacattaacaaaaacgaaaaaca

SEQ ID NO: 30537 - DNA, 2463 bp, Zea Mays
cgggctcagccatgccctaacacaatgccgtatgtgccaaaataagggaatagaaaggtgccgtgtcatccaataattttcctcgacaaatcctaaccacacacaaaaggccctattttaaatttctgaggagaaaaactaaacagaaaaatcgaggaaaatatgctgctagcaggggccgccattcccactagggttttcggattattaggtttctagaacctttcttcgccgccccccccccccccccccccagaccccatgcacgctccgccgctggtcgcgttcgcagggggcgcctgccccgcttccgctgcctcctcgctgtcgccctggttggcctcgctgcggcccgccatcgttgctgcgccggcgaggctgctatggttccgccgcggggcactccggctggaagccaaggccgcgtggagggctaccggagggggacggggcccgcgggtcccggccaagggcgctgtgctcgcctcctatatgggtgccgaggaggtggtgggacccttgtcgctgctcgacgaggaagagctcattttgcacataagaaaggaacgggataatggaaaacttcctgcagatgttgccattaacttggaggagctgtattataattacaggaatgcagtcctgcaaaatggtgatcctaatgcatatgagatcatgctttcaaatatgacagctttgtttgatcgtgttctactggatgtacagaatccatttacctttccaccgtatcacaaagctgtgcgggaaccatttgactattacatgtttggtcagaactacattaggcctctggtagatttcaggaactcctatgttggcaacatttcccttttccatgacatggaagagaagctccaccagggccacaatgttgttttgatgtccaaccatcagacagaagcagatccagcaattatcgccttgcttcttgaaaaaaccaatccatggattagtgaaaacatagtttatgttgctggcgatagggttgttaccgatccactttgcaagccatttagcatgggaagaaatctcatttgtgtgtactcgaaaaagcatatgaatgattttccagagctaattgagatgaagaggagatcaaacactcggagcctcaaggaaatggccttgcttttacggtatcttcccttacaataacattggtggttcacagctaatttggattgcaccgagtggtggtagagatcgcccaaatccttcaacaggagagtggtacccggtatatgctcttgcctgatggtcttattcttccattttgactttgctatgcattatagcacatcttctctttcaatgtaactgcgttactaaaaggcaaatgaaacgagatggtacagacagttgtagaggttgctcacaagaattatccttttttttttgcctaagacaatgcttgagaagtccgctgcatgggtaagtatgttcccttatgtttattttatctgctatatgcaaaaacaagggcaggcgcattttgattcatccacagtggacaatatgaggaggcttctggagcatgctggtgttcctgggcacatatatccactatcattactgtgctacgaggttatgcctccaccacaacaggtcgagaaagagattggtgaacagagggtgatatccttccatggagtaggcttgtcagcaactgaagaaacaaagtatggggatattacttgtcataccaagaatgctgatgagggaagggagctattcacaaatactttgtacaactcagttgttaatcagtacaatgtcctcaaatctgctatctttagagatcgtggagcagctgtatcaaacaatgccatctcactgtcacaaccatggcgatgaatgtagctttcccagtccagattcgatactgaagttaccttttcagaagaacaggtgaactgcaattgtgcaatttttctgggaaaaactcttgaagtttaatctttctgatatcactggactttaccaatcatggtggagcttattactctaatgcagatcctcgctaagatgtctggctggtcaagggtgattggtgattctgcagatagggatcctcgtaacattgcatgccgtcgtccgcaaattactgctccctcaggttgttcagtaatgtgctggttgggcactgaggaatccatcaggttgcatccttttgtctagacgtcgatttgtgttgttgaagtggtaaacattttcatcctgggctgtatcgtcatcatgtatagataggctcgagtctctctcttttttttttggctccacaattttttggagatataaaagcggcaggagttatgacatgcccacagtcggccctccttgtagaaatcctttggatgtaacctgtctctttcttatatacatactgaaagtcaaggcagatatcccgtgtttcgagtacgtggctccgtgactacccgcgtc

SEQ ID NO: 30538 - DNA, 633 bp, Zea Mays
tcggcctcgcattcggaatataaatgggaacgttcgccgctccctgaccgcaggaccgccaggttgtagccatcatcgcgtgcagatagcagagggaaaaaaattgagatccgctccgttgattgaggtcgcaatcgcaccatcgcctaagccaactcaatgcgtctgaagatcgtgggcgcgcgccgcacctggccataccctcgcgcgacgaagactgtggctgggcgctgagaacagagatctcaggctgggcgcaggtctggggcttcacggggttcctcgggtggtggttgtggtcgtcctggtcgaagtggtgcaccaggatctcgttgatttctcgtcggggcgtggatccaggggttctcggtggtactcggcgaggagttcctgatgcgcgtgcttcggttcctggagctgtgggcgatgggaggccagggtcccgcaatgtaccgtgtgctcagttctctgctgctcgaccaccggtaaatttccgtccatgttgttcttgctcctcctctcgtcgtagtgcgtgcgctggggttgttgcttgtcggcgcttaagccttcacggcagcggaagcaccaccgtcctgccgagctgagggttgaagatatgtccgtggccgtcga

SEQ ID NO: 30539 - DNA, 2600 bp, Zea Mays
gcagcagcgcgcgattaaaaaataataaggtcaaagccgctgcgccggcaggcggcagcgaccaaccccaccaatttccgaacccaactcaaccccgaggcccgcgccctctccgcccggcgcagcggctgcgagcttgaagccgtcaccgcccccgccgccgaggcgaactcgaagctgcctccgccacggcgagctcgagccattcctgcgttgctgaaccgcccccgccgtcttccttgaagagagagagagagagacacacacacagagggagggagggagggagatttgcttcctcctcctgcgccgctccattttgaaatcgatcccgttcgtttcggttgccttcggcctcggcggttcatgaggggttcaagaatgaatccaggtgaccgtagaacgcggagcacgatgacgatagtaattgtgatgggtttatcatgcttcttttacatactaggtgcttggcagaaaagtgggacaggaaggggtgatagcatagctctgagagttaaccaagaaactgactgtacaatcttgccaaatttgcactttgagacccatcataccataagtggcgctaatccattgatcatgtccaataaaatgattgagccatgccacatccgatacagtgactatactccttgtcaagaccagaaccgagcaatggcctttcctagacaaaacatgacatacagagaaaggcattgtcctgtagagaatgagaaactgcattgtctcatcccagcaccaaaaggatatgtcacccctttctcttggcccaagagccgtgactatgttccatatgcaaatgctccgtataagagtctgacagttgagaaagctgttcagaactggatccaatatcagggagatgtgttcaaatttccaggaggaggaacaatgtttcccaatggagcgaatgcttaccttgatgaacttgcatccatcatcccactcgctgatggcactatcagaactgcacttgatactggatgtggggttgcaagcttcggagcttatctaatggacagaaatgtattaaccatgtcatttgcacccagagattcacatgaagctcaggttcaatttgcgttggagcgaggtgtccctgcagtaattggagtacttggaactataaaggtcccatacccctctagatcttttgatatggctcattgctcacgctgtttaatcccatgggagtcaaatggcggtatgtacatgatggaagtagaccgggttttgaggcctgggggttattggatactttctggacctcccatcaattggaagaaatactaccagtcatggaaaaggtctaaacaagatgcagaggaagatcaacatagaattgaaaatattgcagaaatgctttgctgggataaaatctttgagaaggatgatattgctatttggcagaaacaagggaattcatattcatgtcatcaaaaggatggtcatgctagcaagatgtgcaaagttcaagattcagatgatgtctggtataagaaattggaatcttgtataacacctcctatagaggcagcacagctaaagaagtttccagagagactatctgccattcctcccagaattctggagggtcaggtcccagacataacagaagaagtctatgaggaggataataagttgtggaagaagcatgttaatacttataagagggtgaacaagctgataggttcttcaaggtacaggaatattatggacatgaatgcaggccttggaagttttgctgcaactcttcattcttccagttcctgggtaatgaacgttgtgccctctatatcagaaaggaacactcttggtatcatatatgagcgaggtctgattggtatataccatgattggtgcgaagccttctcaacataccctaggacatacgacctgatacatggcaatgacatcttcagtttatatcagaacaagtgtgatgcagaagacattcttctggagatggataggattttacggccagagggtgcagtcatactgcgggacaatgccgatgtactgaacaaggttagaagtatggtggcaggaatgcggtggaagtccaagttactagatcatgaggatggcccgcacgttcccgagaagattctgatttcagtgaaagaatattgggttggcagcgaggaacagaacagctgataggtacagaaccatgttgatgctggatgccagcctctttccctgatgcgatcccctgatgctgttttgtcggttaatagattttgttcatactgcatacgtacagtactaaagacccttagatgatcgggacatacctggatttttgctgtgcatatatagtaatcagagcgttaagtgaactgttggcgatttgccaaggcatattgtagtgtaggcaaaagttcgtttgaaaaacatgtaggtacgagacaacttagtcgctactttgcccagagattaattatacagatgcacgcaagaagttttttgtgatttcgtatatgaacattatctgttgataatgcatgagattatttctttgagtgtttgtctgattgacctgacaagaggtcacaaggattgaattctgcttcagc

SEQ ID NO: 30540 - DNA, 4331 bp, Zea Mays
attccgaaaaaaatcactaacagaaggacggttcaggaagcattgacagatagaagatggattgctgatatcacaggatcactctcggtgggagtattattggattatcttcatctttggaatttaatttcagattttgagctgctgccagatatagaagataaacatacttttagtattgctgcaaatgggacttattctgctaaggctgcatatgatgggttgttcatcggggctgtgcatttcggtcactatgaaagagtttggaaaacttgggccccctctaaatgccacttcttcctctggttatcggtgctaaataaatgctggacaacagataggttggcaaagagaggacttgatcatccggagaagtgtccgctttgtgaccaagagtctgaatctttggatcatattttggtttcttgtgtttttgcgagagaattctggttccggctgaaggttgatgtgcattttcagactacaaaatctggctcctacacctagtacggtgtcttttacgggttggtgggagatgatagacaatggctccggagatatgattatgaagggtgtcaactcccttattgccttgggagcctggattatttggaatcatcggaatcaaattgtctttgatggaatctcccctagtgtttctgcagctctttgtcaggcaagggaggaacaacagttgtgggaaatggcaggagctaagggtctctcctttcttgccgcaaccatcaggggcacctagctgcctggtttatcgctgatgggctggttttgtttttcaggatctgtttgttctttttttgtttttttctcttcttttttctttggtttttttatcccctccggggaggtcttttgtactttggtctattttggaccctcttttccttctacttaatataatgatgtgcagttctcctgcgctttcgagaaaaaaaaacgtcatccgcggcctcaacgaatgctttgccaacattggtcttcacctttgacgtgggcgcctttccccacctttttcgatgcttgctctgagctccttcttgaagtgctcaggccatcagggcacctccattgacccctactgcccttgcggcctctatcattccgcctgctcccgctagtgcgcccttggtcttcggggcctgacctctggcttcctctcgtagtcttgtgtgctttgtggagcgtcggggggctcaggcctagggcctttaggtcccgtaggtcatgagtgggactcaggcctaggactcgactcgtcggtcgtgggtgggaggcggactggctccttcctacaccgcggctcggtgctgggcgcagttaatgtggcgtgcgtagtattgatggtgagagcagccctagggccagatgtggaatccactcgagtggctctctggcggttcgtctgatctccttgccaggcttcgcctcgtccgacctctggcgcggtgcataggggtcatctgggtgcagattcacataggcgagcttctccctatcttatctctcactcgtggtctcgtgggggcccggggatccgatccccgacactcgggatatggatcgccgacgtggggaaaggaggcgctggggtggcagctacacccgcgggaggctagggaggcgtaggccgagcgccgatggccgggtgtagggggatgccgccgaccgcaaccgagaaggggaggtctgtcaccggaggaggaggtgcggcagcggccgtaatcgcaatcgtccgcgcgatggctgcagcggtggttggtgcagtggacgttcgtgccgcttgcgtggggagggaggcgagcacatgaaaaggagaaagggagggaggcagtcgtggacgccgagaaggtgcgggcggacgcggtgacgatcgctctgggagatgcaggggaaggagagggaggggttgccggaggactgctccatgacggtggcgatggccgggggtgcgccgacggctagagtgcctggtggttagggaatgtagaggcttgataccatgttggaatagaaaaccctaaccagagttgatagtgcattaatataatagagttaggtgggtctgaggcccattacaatagaggcattacaatagagcatacagttacgctaacagtatcaaatgcctttgaaatctctagcttcaaaaggatgtatggttctttacttttatgtagggtctgagcaagctgctgcacaagtaagaaattgttgtgaatattcctcctaacaaaggcgctctggttgttagaccagcttaggcagcagggtgccaagcgataagcaaaaatcttggttaccaactttgcaaagcttgagttttaggacttgagctttacaagatgagtttacagcttggacttgatcagatcccatctgaggaaaaggatctccagttttggcacttgaattatcaccattgtcgaatagccaccctaaaatcaaagtatttaatttcttctgtgactgctaaaaggttgaaataacttttctaaaagaaaattgcttgtccatgggagacccctgggcattttttagtttataagttagcaaattacatcctgattggtgattggctaggaaaactagctaaatcagtttccagggaggtaaccacaaattgctgagtcctggatttgagcacaggtggccttcctctcaactgggaagtactttctaatttccttttcagatgtagatgtaatatttccaagaagtacaacccttttccttttttccttgcaccaaaccttttgtaactttgttcccagataccgggttctcggtcttgttagaagtatattactaaacaatctatctgcctacactgcattgttcagcagatgctggattagataaaatgtgattttaacaagtactccctatgttccagtttattaggtggtagtgcatttttgagaaagggcagattgttaggcggcatacatagcaaggcattgcattataaattcctgtggaagaaacacagccgttttatccgacccgatccaacaagtgaatgcaatgcaccagatcagtgtggcacctggcgtgaattaaatcttgctcacactctgcatcaacatgggaaataaggactttgtatacatcaggatcatcgagtccaaaatgtgttgttactcttatgttggagattgctccaagtttttggggcagatggaagagaaggcactcaaattttgacaaaagcatcccttttgctttgctcagccaagtagcaggtataagagagtacttcgcagccaatccagccttgacatctgagctgccttcaacagtagtgaagtcaaaagcatctgaaactttgatcatccagagtgaacatgaagattctgaacttggtgatgaattttatgatgcacttactagaggtgaatccttcgaagatggggatagtgatgatgatgatgatgccacaactccaaaggctagaaaagtaaagttgaagaatgtgtcatgggctattgcaggcttggctttaaagacaactaaagctttggttgagacaagtgaattggttacaaattctagtccagttactgttgaccccagccacttccatggcacccttcatagagcgaaaactcaaaatgatcaaaattcttggagtgcacctggtggggagaagtttatgatcagagggaagacttacttaacagattatcacaaggaagctgacaagatgtggtcttttgagatgggttaagaaattagtgaacgaattgcctagctggaaggcttctctcaatcttgctggaaggactgctatggttgttggcggtgatccacttctagagctacttgcggtcgattggttcaaagttaatgaacgctttgattcagttgccttacatcccaaaagccttgtgcaatcagaagctgcaaagaaacttcctttcatattggttataaatttgcaggtgccagcgaaaccaaattataacttggttatgtactacgctgcagagagaccagtgaacaaagattctttgttgggtagattcattgatggaactgatgcataccgagatgccagatttaaacttataccaagcattgttgagggttattggatggttaagcgtgctgtaggaacaaaagcttgccttctgggcaaagcagtaacgtgcaattatcttcgccaggataactttctggagatagatgttgacatcggttcatcatccgttgcccggagcattattggtctagtattgggatatgtcacaagcatagttgttgatcttgctattcttattgagaactgctctgtgaatttagcaaggaaatga

SEQ ID NO: 30541 - DNA, 5051 bp, Zea Mays
aaatagctaaacccaaatcgataccaaacccagcccggaacgcacgccccccgccgccatcgccggcggccagccactacaagcgcggtgtccggaacctgtactgtactaccaaccccaacagcctggactctgatgagccccagttcatggcctgccatctctcccccctcttcaatctccgactcttgctgctgctcggcgctgtcctcggaaacgccgtccttgtccgcgccggcggggcggaggcgtcagatcgggctgagccggacccgtactcgatcctgacgtggcacgactactcgccgccgtcgcccccactcccgcccccggacccggcgtcgtcgacggcgacctgtgagggagacctccacgggaagggggacttccgcacgcactgcgaggtcttcgaggaggtggaactgggcgacgatatctacatcacggggaacggcagcctcgtgctcctctctggcgcctccctgacctgcgagaaggtcgggtgcgttatatctgccaatctctccggcgaggtgcacctcagccgcggcgtgcgcgtcagagccggcagggtctcgttggttgccaccaacatcacagtcgccgacacggtcgttgtgaacaccaccgcgctcgctggcgccccccctgaccggaccagtggcgttcccacagggacgcacggcgacggtggcgggcacggtggccgtggcgccagctgcttcgtcaaggaagggcagactcaggaggattcatggggtggtgatgcctatgcatggtctgacctcgaacacccttggagctacgggagcaaagggggctcgaccagtgttgagaaggactacggtggtgccggtggtggcatcgtgtggctgtttgctgatgatctggtcatgaatggcacagtgctcgccgccggtggggatagcaatgagaagggtggaggtggttctgggggaagcatctttataagggctgcatcgatgtatggtggtggcaagatcagtgcctctgggggtgatggtttggctgggggaggtggagggcgagtttctattaacgtttttagtagacatgatgacacccagatttttgttcatgggggaaggagttcaggctgtccagataatgcaggagctgctggaactctttatgaagcagtaccaaagagtcttattgtcagcaacaacaatttgagtacacagacagatactcttcttttagagtttccaaatcaaccactgtggacaaatgtttttgtaagaaatcgtgccaaagttgctgtccccttgctctggagtcgcgttcaggtccaagggcaacttagccttctttctggtgctattctaacttttggtctcactggttatccatactcggagtttgaactgatggctgaggagcttcttatgagtgactcaataattaaggtgttcggtgctttgagaatgtctgtaaagatgctcctaatgtggaactccagaatggaaattgatggcggtggagattcgatagttgcaacttctttgttagatgctagcaacctgatagttctgaaggaatcatctgtgatacactctaatgctaatcttggagtccgtggccaaggtgtcctgaatttgtctggggacggagacacaattgaggcacaacgccttattctatcgctgttctacagcatacaagttggacctggttctgttttacggggcccacttgtaaacagaagtagcgatgatgtggccccaaagctgaattgtgaagcagatagctgtcctgtggaaataatacatccaccagaagattgcaatctaaattcttcattgtcgtttacccttcaggtatgccgtgttgaagatattgatgtatggggtgtcgtacaaggaactgtaattcatttcaatagggcaagaagtgtcactgtgcatacatctgggaccatcagcgcaacaggctttggctgtcgatctggagtaggacaagggaaaatgttaagaagcggtgtatgtggtggtggtggacatggtggcaaaggtgggaatggtttttataagggagaccttgctgagggtggagctatctatggcaatgctgatctaccctgtgaacttggcagcggcagtgggaatgactccacagagttgtccacagctggcgggggtataatagtgatgggctcatgggattattctttgccaagtcttgccctctatggttcagtagaatcaaatggtggcagctatgctagtggctctgttggaggacctggtggtggttctgggggcacaattcttctatttgtgcacactttgtccttagctgaaagctctgtcctttcaagtgttggtggcttcggaagtactggtagtggtggaggtggagggggaaggattcattttcattggtctaacattcctactggagatgaatatgtgcctgttgcagctgttaagggatcaatacttacaagtggaggagtcagcaaagggttaggatattccggtggcaatggaacggtcacaggaaaagcttgcccaaagggtctttatggtacattttgcaaggaatgccctttgggaacatacaaaaatgttactggatcttctaaatctttatgctttccatgccctccgggtgaactccctcatcgtgctatatacacaaatgttcgaggaggtgctgctgaaactccatgtccatacagatgcgtgtctgacagatatcgcatgcctcactgttatacagctctggaggagttaatatatacttttgggggaccttggctatttggtctatttctttcaggcctccttatcttgttagctcttgttttaagtgttgctcgtatgaagtttgttggcactgatgagttacctgggccggcaccaactcatcaagggtcccaaattgatcattcctttcccttcctagaatcactaaatgaggtcattgaaactaatagggctgaagagtcacaaggtcatgtacacaggatgtatttcatgggtcccaacaccttcagtgaaccttggcatctcccacacagtccgccagaacaaataacagagatcgtatatgaagatgcatttaatagatttgtcgatgagataaacacccttgcagcttatcaatggtgggaaggatctatttacagtatcctctgtatacttgcctaccccctggcttggtcatggcagcagtggcgtaggagaaagaaattacagagacttcgtgaatttgttcgctctgaatatgatcattcatgcttaaagtcttgccgttcacgtgcactctacgaaggcctcaaggtttccaatgtccctgatctttggaggtgatggaagttacatggctccgttttcacttaatagtgacagtgtgcttactagtcttatgagccaggctgttccctcatggatatggcaccgtcttgtagctggattgaatgcacagctgcgtttggtccgtggtggaaatctgaaagtaacgtttcttccggtcatcaactggcttgaatctcatgcaaatccctctttagctgagaatggtatccgtgttgatcttgcctggttccaagctacagcattagggtactgccaacttggtcttcttgtttatgctgttgaaggagaagctgcacttaccgaacctgatggaagccctagagtaaaaatagagcaacacacacccacacagaacatgctcgctgatactcaactaagtcagtccaggattaaggatgctctaatgcgcaaaaggatcactggtggagttctcaatagtaatagcttaaggacactaaaagacaggagagatttgttttacccattttctcatatcttgcacaattcgaaaccagttgggcatcaggatcttgttggtttggtaatctcaatactgcttcttgcagatttcagcttagttttgcttacttttctccagctgtattcatattctatggtcgatgttctcttggttttgtttattctaccgcttgggattttgtcgccttttcctgccggtataaatgctctatttagtcatggaccgaggcggtcagcaggccttgctcgtgtgtatgcattgtggaacataacttcactggtcaatgttgttgtggctttcatatgtggttttgtacattataagttatcaaccaaaacacacccgagcgtgcagccctggaacctgggaacggatgaaagcggttggtggctcttcccaaccggactcatgctgttgaaatgcattcaagcaaggcttgttgattggcacgttgctaatttagagattcaagaccgtgcggtatatagcaatgacccaaacatattttggcagtcatgacccctgttgtaactgagggtccttctgggaagctttttacaactcgattttttgggagttgataaaaggaagagtgcgggcaaaggcctttctttattgaccaggcaaaagaaggaactacagaggttatatagatgcgtacttccgcatcccccgctgatcatgtgcagttgcaaacggtgttctgttgtatatataaaaggtgttcttgatccattctttgtaggatttagacaccatagagtttgtttataagcaatgtgaaagctaacctaaagagacatggggggatgtggatttgttgttcttttgctaccatgccctggcccttgatgtttgttgagatgggcagaggggcaactcaagtcatcgagatgcaaacgcctcttgttgtatgcgatcagatgggtaaaacaattatattattaacatgttccatggtcttcgctgacagcaaggctggtaaagctgtgagaaatcggtgtggtctgggtgatgtgccgtttgcagctttgcaattcatcgagggatgcaaaaaccttctgacatatctgacgctgtgtcacttgcagacctgtagtggtggatggatggctaagtgggtcacctaaacaaaaccgggtgctatgtactcggcagagaatgtcctcgacgatggatggacaactttaggggctgtttggaactggttttaagtctaaaaccac

SEQ ID NO: 30542 - DNA, 1541 bp, Zea Mays
attttacctgaggtggttttctcaggtgacttgtgtagggagttaatctgagaattcatgtaaattatattaaaaggtagcaatgtggcgccgctgttgctgcaattgccaagtggatgaatccgaccagcatgaaaatgggcatgtcaaggccacaatcaacaacattgatggggcaataatggggttgaaagattctactactggaaaagtcgagccgcaggatgctgctccccaaattgatatccctgttctatccttggatgaactgatagaaaaaactgatgactttggttcaacggctttgataggtgaaggttcttatgggagagtgtactatgcgattcttgataatggaacaaaaatggcagtaaagaaacttgattctactgaaaatgaacccactgctgaattcttgacccaggtttcattggtttcaagattgaaacatgaaaactttgttgacatgttggggtactgtatggagcgtaatcttcgcatagtagcctatgaattcgccaccatgggttctctgcatgatgtactacatggaagaaaaggagttcaaggtgctcaacctggcctggcgcttgattggatgcagcgagtgcaaattgctgttgatgcggcaaaaggacttgaatatcttcatgagaaagttcagccttccattgtccatagggatattagatcaagtaatatcctcttgtttgaagatttcaaggcaaagatagcagactttaatctctcaaatcaggctccagatatggctgcccggttgcattcaactcgtgtcttgggaacctttggatatcatgctccagagtatgcaatgaccggtcaactaacccagaaaagtgatgtatatagcttcggagtagttcttttggagcttttgacaggtagaaagccagtagaccatacaatgcctagagggcagcagagcctagtaacttgggctaccccaaggttaactgaagacaaggtgaagcagtgtgtagatccacggttgatgggggaatatccggcgaaaggactcgctaagcttgctgctgtagcagctttgtgtgtgcaatatgaagctgaattcgcccaaatatgagcattgtggttaaggctctgtctccactactcgtaacaaagcagactccatcacctgttgttgacagttgacgtacaaaattaacctaagttgcaaatatgagcggcaacagttgggacactacggacatttgatcggttcacctcagtcacagatttcaaacactaactgcatggagatggagggcatctttagtactgcattaacaactttgcatctgcggttctacagcatgtgcaaggcaacaatattccttttcatctctcagtaaatgccagtatcaaggagactactgaaatattcagtgatcaacattgagacttttttttttttgcaaagatgcggaatggtaaaagacccttcttttggtgtcacaaacagcaatgggatctcccagtatacatgttcgactcagaaaccgtaacggtaaaaaaattcc

SEQ ID NO: 30543 - DNA, 1517 bp, Zea Mays
ggcaaccatgcggcagccgccccgcggaccacgcagattagagcagcccgcagcagcgaattaaagttacagcgggtcgtttgcgagcacacaaggatctctagctctgccatggtggtaactggtattctgggcgggctgctctaaccatcaaagcgtagcgcacaccacttgctcgacaaaagattttcagaatccgattatcctctacgacagcacaaggtgtgacaaaccgcactgccatgcaatgcagattcaaggaatctttcaacatatattcctctctccaggctttcattataaatagaggccaactgggttttgcacttcatacaaccccataccttcagagcttacaaggagtagcagagctcagaagagcattcgtattcagcacatagtgcgccttcttgaaagaactgtacaggagatcacacaatgagctattatggcagcagctcttctggtggacgaagcagtaggagagtcgactatgggaggacatatgtggtgaggccaaagggaaggcacctagccaccattgtgtggctccatggcataggtgacaatggtgctagctggtcccagctcctggattctcttcctctaccaaatatcaagtggatatgccccactgctgcaacccggcctgtcgcggcttttggtggattcccctgcacagcatggtttgacgttgaggacacatctatagatggccgagacgacattgagggactggatgcttcagctgcacacattgcaaatctgctgtcgtctgagccgtctgatgtgaagcttgggattggcggtttcagcatgggcgccgccgttgcccttcactcagcagcatgctatgctcatggcaaattcacaagtggcattccctatccaatcgcactcaacgcagtcatcagtttgagtggctggctcccttgctcaaggaccctgaggagcaagatggagggttcacatattgctgtaagaagggctggctccttgcccatcctgcttagtcatggaagagtggatgaagttgtcgtctacagggatggcgagagatcagctgaggttctgaggaactcaggattctcatttctgactttcaagccctacaacgggttgggccattatacgatccctgaagaactggacgacctctgcaagtggcttagttcgtcgcttggcctcggccgatctcgctaaaagaatagttttttttttttggcgtatgcgcaatgggtttggtgacagcatatattttgaggggaggtttggtttgatagcttgtaaaacacttgatgctagctgctctcttcgcatgtggcttttgtttccgtcgtcctaatttacgtactctatgtctctatgtaatgcggtactttgttgtctgatgtttgctaataaaaagaaaatgccgttgaggcctctgatcaatggaaacagcatttgtactgtatccaggcagcaaaacaacatttgtactcatcactgcagaaaacagaaaatctggagaggtc

SEQ ID NO: 30544 - DNA, 4293 bp, Zea Mays
ggggatatggcaacttcatctgtgacaagaggggctgaaaaaaacaggacttatgggtctcatctcctcaggggcatgccttgtatattgtctttatagctgctggtgttttcgtcgcaggatggatagaggtatcatgctggattctcactggggaacgccagactgctgtcatcagatcaaaatacgttcatgttttgctaaatcaagacatgagtttttttgatacatatggtaacaacggagatattgttagtcaagtgctcagtgatgtattgctcattcagtcagctataagcgagaaagtggggaactacatacataatatggctacatttgttggtggtctcattgttggccttctgaattgttggcaaatagcacttctaactcttgccactggacccttgattgttgcagctggaggaatatctaacatattccttcatagactggctgaaaacattcaagatgcatattccgaagcggctagtattggtgaacaggccatctcatacatccggacactgtatgcttttacaaatgaaactcttgcaaagtactcctatgctacctcacttcaagccacacttagatatggaattttgattagccttgtccaaggaattggtcttggctttacatatggactcgccatttgctcttgtgctttgcaactttgggttggaagacatctgatccatcgtggaaaagctgatggtggtgaagttgtggtagctttattctctgtaattctgagcggccttggtttgaatcaagcagctacaaacttctattcattcgaccaagggcgcattgctgcttatagactatatgagatgattagtcgttcaacttccagcaccaatcaagaagggacaaccttaccccaggtgcaagggaatattgagtttcgaaatgtgtactttagctacctgtctcgtcctgaaatcccaatattaagtggtttcttcctcactgtaccggcgagaaaaactgtggcacttgttggtagaaatggctcggggaaaagcagtataattcctctgatggagagattctatgacccaacattaggtgaagttcttttggatggggaaaacataaaaaatttgaaagtagaatggttaagaagccaaattggtctggtgacacaagaaccagccttattgagtttgagcattcgggaaaatattgcttatggaagatctgctacctttgatcagatagaagaggcagcaaaaacagcccatgcccatgggttcatcagttcacttgaaaaggggtacgaaacccaggttggtcgagctggtctagcactcactgatgaacagaaaatcaaaatttctattgctcgtgctgtgctttcgaatccatccattcttttgcttgatgaggtcaccggaggacttgattttgaagctgagaaggctgtacaagaagcattagatgttctgatgttgggaaggtcaaccattataattgctagacgtctttgcctcattaaaaatgctgattatatagctgtaatggaggagggccatcttgttgaaatggggacacatgatgaacttctaaacttggatggcctttatgctgaacttttaaggtgtgaggaagcaacaaaacttcccaaaaggatgcctaccaagaacagcagggaacataagtcgctccaatctgaggatgcattggtgagccaatactttcaagaatcctcctctcctaagatggcaaaatcaccatcactacaaaggacacatggtatgcttcaattttggcgatcagatgccaacagaaactctcatgattcaccaaaggatctaagtccaccttctgaacaaactatggacaatggaatacctatggttgcaattgaaactgaaaggacaccgtccattaagagacagaatagttttgaaatgaaattacctgatcttcctaaagttgatgtacatcctatacagcggcagtcatctaagaattcagaacctgactcacccatatctcctcttttgacttctgatcctaagaacgagcggtcacattcacaaacttttagcagaccgcagagtgaacaagatgatacgagttctgaacgtagtgaactggatgaggttcagcaccagaaacctccatctttttggcgtcttgcaacacttagtatcgctgaatggccttatgctcttttagatagaaatccgtgatatgcgccatgaagtgaacagatggtgtttattcatagtgggcatgggtgttattacagtgctagtcaactggctgcaacatttctattttggaataatgggggagaaaatgactgagcgcataagaaggatgatgttctcagcaatgctacgcaatgaagttggatggtttgacaaagatgaaaacaatgctgatacactgtccatgcgcctcgcaaatgatgctacatttgtccgtgctgcgttcagtaaccggctttccatatttatacaagatactgctgcagtatctgtggctctccttattggaatgttgttgggatggcgggtggcacttgttgcacttgcaactttgccagtccttgtcatatctgctattgcacagaaattgtggcttgctggtttctcaaaaggaatccaggaaatgcatagaaaggcttcgttagtacttgaagatgcagtccggaacatatacactgtagtagcattctgtgctggcgataagatcatggaactctacagactacatcttgggaagatactaaaacaaagtcttgtgcaaggattggctataggctttggttttggtctctcccagttcctcctttttgcctgcaatgccttgcttctttggtacactgcaatttcagttgaccgacaacgtctgacaatagccacaggactaaaagagtacattctgttttcgtttgcatcattcgcgttggtggagccatttggactggcaccttacattcttaaaaggagaaaatctcttacgtcagtctttgaaattattgaccgggagccaaaaattgatcctgatgataccaccggcttgaaaccacccaatgtctacggaagcattgaattcaagagtgttgatttttcttatcctgttcgccctgacattcttgtcttgagtaattttaatcttaaagtgagtggtgggcaaacacttgcggtggttggggtctcaggatcagggaaaagcaccattatttctttgattgagagattctatgaccctgtttctggccaagttctgctggatggtcgagatctgaaatcatttaaccttagatggttgcgtagccacatgggcctgattcagcaagatccagttattttctcaacgacgataagagaaaacattatttacgcaaggcacatcgcaacagaggctgagataaaggaagctgcaaggatagcaaatgctcaccatttcatcagcagcttgccacatggatatgacacccatgtgggaatgagaggggtcgatctaacacctgggcaaaagcaacggattgccattgctagggtggttttgaagaatgcacctatactgttgttggatgaggccagctctgcaatcgagtctgaatcaagtagagtggtacaagaagctctcgacactctggttatgggtaacaagacaacgattctcattgcgcacagggcagcaatgatgaagcatgtggataacattgttgtcctaaatggtggtaggatagttgagcagggcacacatgactctctgatggatcagaacggtctatatgttaggttgatgcaaccccattttggcaagggccttcgccagcatcggctagtgtaattattattgagcttgttaggtgtaaattatcctagggcatgatcaggtttacttccgctcttggtgcagccactcagggcccgttttggcacatgaaaaatgctgggaagttgccgccttgctggtgttgttctgagtaagcggaatgcagacctgatcttgacaaaaaaaacctagcttggagattcaggtaagtaactgttggaactgtagggcacaactcattctggaaatagttagcaagtttggatggcattgtaattgttgtaatatgagttgaaacattctttcagaggctcgtgcttgtgatctctcgcatctgtaatgttagtgttttgatcatttaatgtgtgtatattgttcgattcttggtcggtccgagtcttgtagccgtgatgaaaagctttttacatggaaattctgagcttggcgttattttcgtccacgagaccattcagactacgagttgca

SEQ ID NO: 30545 - DNA, 1126 bp, Zea Mays
cgcaggcagtcgctctcgcgcggcggctctccccgcctcgttcgcccctaccgcgccatcaacgtgcctccccgccgcccctgtcctccccatgcccgccgctcccacccgagatggttagcgcccctcctccttccggtcccttcccctgcctcggccggccagccatggattcaccaagcgggctctggtggcggccggcgccgtcgtcgtgtcctccattcccgtcaaccccctcgatgtcgccaagatatgtttaccagacgaattgatatctaggctatttatgtggttactaattttgactcctctaagacatatttacacagggttggtcgttatgggagatatgggcaccttggtttggcagtgaacttgaccacttacaaagattgtttcaacttatatagtattgataaaaaaaacttggaacggaaattaagacaatacccccacaaattgacctgtttgtatactgccaatgatgatagcgacagcttcatgagcgtcagtggaggaggaggagaggcccatgtcggtggagctggaacccatcgccagcgagcagcagcttaactaggtccttggagaggcgtagcagctccagctcctcatcgtcctgctctgcttttctctgcggtaaattgctggcttaaatgcatgctgcttgaaccctataatcagatagaccatcccgaatgcaagtcaaggcctgatagtggtctttctgcaattacagagctggaccctggttatataacaggatcagtaagagttaatggcccagtgacggattcaaggtatcctgctcaccaacagatcccacaagcatacggttaccgccaaatgcctgcaaggttggacagtaccaacccatcacaggccatgggaggttacacgctgcagtcacagaaggaaacattatttgaagagttgccattttgaagagttactcgaatccaatattttgctcttttgaattccttggtgtacactggcaaatattagcatatttgaagagttgccatttcgatcatcatcttcatttgtactttttgggtcagatctaataaagcatcagcattaaatttacaatgatcacctaaatccatggtttttattgcct

SEQ ID NO: 30546 - DNA, 2607 bp, Zea Mays
agggccgggtagtttcttccgcacatagggtgtgccggtgtagtgtcggggaagctcttagagctccatttccttatagtgatagtacacggtagcataggtggagggggtgtgaggtgtgtgtggttggagtggggctaacaattgagcctgccgcgcacaatcaatggccgcgctcgagtccaacaagaagctgcgcctccttctcgtgcccttcttcgccaccagtcacataggcccgttcaccgacttcgccgtccgtctagccacagccaacccggacgccgtcgagctcactctcgccgtcaccccggcgaacgtccacgtggttcgctcggccctcgggcggtacggcgccgaggcgggcggcgtggtcaagattgccacctacccgttcccgcgcgtggacggcctcgctccgggcgtggagaacctctcggccgccggggacgacgggtggcgcattgatgccgtcgccgtcgacgaggcctcgacgcgaccggcgcaggaggcgctcatcagggaacagtcccctgacgccgtcatcaccgacgtccacttcatctggaacaacgccgtggccggcgagctcggcgtgccgtgcgttacgttcagcgtcgttggcatcttctcgacgctcgtcatgtaccacctcggccgtgacgtcgtcatcagagatggccaggaggtgaccgtccctgggttgccgcttgccggggccggagatacggatccccgtatccgagttgccggagttcctgagacgccggcaggagcacgacggggtcaggcggtgccatgtggagatgggcaggtgcttcggcgtcaccctcaactcgttcgtggatctggagcagccatactgcgacatgtgcgtgagcagcggatacctgaagcgcgcctacttcgtcgggcccctctcgctgccgttaccaccggccggagcaagcaccagagattcgccatgcctcgcgtggctcgacaccaagccgaggttttcagtggtgtacgtatgcttcggcaccttcgctgccatctcggaggaccagctccgggaactggcgcttgggctagaagcttcaaagaagccattcctgtgggtggtgagggcggacggatggacgccgccggaggggtgggaggagcgcgtcggagagagggggatgctagtgagagggtgggcgccgcagacggcgatactgtcccatccagcggttggcgcgttcctgacgcactgcgggtcgagctcgctgctggaggcggcggcggccggcgtgccgatgctgacgtggccgctggtgttcgaccagttcatcgaggagagactggtgacggaggtcctcaagatcggggagagggtgtggagcgggacacggagcacgagatacgaggagcaaaaggtcgtggcatggcagcagaggtagtggcgcgagcggtggcaaggttcttggagccgggtggcaccggcgaggcggcgaggagcaaggcgggggtgctcgctgcgaaggcgcgctcggctgtggcggagggtggctcgtcattctgtgatctgcgccgtctcgtcaatgacctgatcgaagcaagaacggctgccggaaccaacgcctgagttacaaaaatcacgacaaggctctccactcgctttcctgcagagcatcagggcgaaatgtcagtggcagagtcaatatgcagaggatccactccggttcaaatgggatttttttctcataaataaatgtaagtaaagttaatcgacaaaaatcgctggaattctaaagtgagacttcgacaaaaaccgctatgcactcaagattctcgatgtaatcgatgtacaataaaattattaatcgatgtaggactaaatattacccttgtgttgtaaccagagcaacaaaaaatatttgttatttttgtacccaagtttaaattaaggccatgatcagtggcggagctccgtaaaaataacgttccgggccactctacaaatataacgatatactacatgtcttttaatttttcacactttaggggtagaaacatttaaaacaattcagtgtaactgtggcagatagggaaagcgaatcagacattcaggaacaattactcacaatagaggagaatcacgaacacatggcagcaggcagtcaacactcagcacacagcgctcgccgctcaggtggtcactgcccatttgctagggaggcgctccgccctcgcctatgaataaaaaagaaagggaatcaggttgagtaagttgtatagtttgagagaagatgtaatggcaggggcggatttgggcggtggcgcgcgccagtgcaggccgcgcgcgtcattgctacaggctcgcagggacgctggaggcagactgacggaggtggaggtcggactggcgatggtggaatcctgagtcagagcccgcccagccggctcgaaggttgctgccttgtgcccttgccggattcgtagagcctgaaggcgtggagagcgatagaggactgaatggaggcggcgcgccactggcaacataggaaacgcaaccggcaggtttgcgaaataattggaagagcttatgttctcgtgacttgagcgactcagggagactgccag

SEQ ID NO: 30547 - DNA, 1456 bp, Zea Mays
ctaagaagcccaagcccagctgaccaagagaggtagctgagcgaagcatccggtgtgttccctcgccatccgccgccgccgccatgccgggcttcgctcagcgtctcgcgggcatcccgtggcggagcatcgcgaggcaaggcctctcccgcgtgttcctggtggcgaaggcctactgcgtgatccacgtcgtcaacgaccacctctgctcggtgaccttagtgcggggcgccagcatgctgccgtccctgaacctggcgggcgacgcggtggcggtggacagggtcagcgtgaggctcggccgggtcgcgccgggggacatcgtgctgatgatctcccctgaggacccgcgcaaatcggtcgtcaagcgcgtcgtcgggatgcagggggactccgtcacctaccttgtcgaccccggcaaaagcgactcctccagaaccgtcgtggtaccgcaagatcatgtctgggtgcagggtgacaatatctttgcttctaacgattcgaggcaatttggagctgtgccttatgggctgattacagggaagatcttttgccgggtttggccgccagagagttttggcgcaattgatgacgcaacgaagcagtcttaacgctgaggaggagccgaggaggtactgagagcacatggacccatattgtttgctcgcccccagagattctataatagccaactgcaggggggcccttccttgagctcgagagctttcgacgacctaccgcagcgcatttctacagcgaagcaaagagcgttgtgtgtcttgattgatgtcccgtgtttttacagttttggtgtgacaagttctgaaacccgtgtttttacaactacactacaacttcacatgcttattcgaaacatttgaactgatttgtcagtcctcgttttgcagaagggcgtgtctgtttgtttatccatgtccatgtcaaaacacacgacgattattgttcagcatgtccatgtcaaaacatacatcgatcttgaggttattatgccatatactatatataacactgtaataaagtcatccatccggcctctacgtcgacgcggcggcggcggcggtggcgctgggctccggtgctgctgccgccgctagctggaaccgatggtgctgctgctgcagcagaagcagcgacgacttgcactgggcgcacatgcagatctgctgggtggtgcagaagccgccgacgtagcccttgtcctggcagcgggcgatgcagagcagtggcgcgtcgcggcactccgggacgatgctgcggaacagcgggcacatgcccttgccacctgagggtgacggcaaaataaggaaggagaacatgatcagtagtagggcatcagttgcagccatgacgaccaccttggaagaagccatggcactggttgtagcttccgcttccgatctgcaggcggaacgaataatcggtttcaggctttcag

SEQ ID NO: 30548 - DNA, 1300 bp, Zea Mays
atctccacctatcaccttcgattcctcctaacctcgccggtccacctgcaaccgtgacggttcttgttcttcttcccacccagcgtgcgctccctcttcctcttccccttctctctcggcgacgactgggtggccgtagctgcctccatacgcctggtgccctggtcttcttcgggccattcgccggccgcgagcaccaccaaaagggagagcttcccaggtagagctgtttctccgtactctagcagatggcaaggataaagcctaagcaattgctaatccaaagcaaaacaaagaaggctccatctcgaatcagctactctactatcatcacatggaacttgattgtcatattggttgtgctatctctctatgctacctacagccattggcatcaaaggtctgcccaagacttcgaaatggagcttcatgaagctgagcttgctgtgagaccggaggatccaaaaatgataagtagaccaagatatgcggtaatgaacaccgcaaaaggcccaattactatagaaatatacaaagatgcttctgctgacgttgtggatagatttatcaacttgtgcaagagtaatcatttcaaaggaatgccatttcggcatatcataaaaaattttgtaattcaaggaggtgattttgattttgatggagcttcccaagaatggataacgaaagctaaagctagtggaaaaaatgatctcagtccaaaacatgaggcatttatgattgggactgcaaagaatcctaataccaaaggatttgatttgtttatcacgacggctccaattcctgacttgaatgacaagcttgttgtatttgggcgagttatcaagggagaggacatcgttcaggagattgaagaagtcgacactgatgagcattaccagccaaaggccgccataggcatcatcgatatcgtgctaaaacaggagccttgagcctggatgcacatgatgacgttaaccacatgccgacggacttttctgtagttggaaaatctatctcatcgagttggtttttgttttggtgccttattatgtgttgttgcgtggaaagcagttgtgacgcttgttccaggagtcgttgcagcagcgtttgtgtataaaatatattcacagggtttttggctgtcagcatgcgcgagcatatgctgctacaccttgtatcgtggttgtggtaacagtaagcaggctattctctgctattgctaccagtaatcggtttgggccttacgatttgcgaatgaatccaataaaatcagcgcacgtgcttctggtcaaaaaaagag

SEQ ID NO: 30549 - DNA, 1887 bp, Zea Mays
cccaaagccaaagggcaaaggcccaaaaacccagccggccagagccagtcccccaccccccagcagccatggagttcggcttccgcgcaggaaacagcacgcagcgccgcccttcccccgatcgacgcgtcacagcacagcaagccggacccttccacggcgaccacccgccgccctcgccgttgcagtgggaggctgcggcccggcgcgagcggatcaaacgcgaggtggagcgccggctcatcgaggaggaggtccgcctggagctcgcccttgagcgcgcccgcctccacggtggttttggccccgccccgttcctcgggaccgacggctccgtcgtgccggtgccgcctccacctccacctccaggccggttctccagggccgacggcccatcgatgacgccggcaatgtcgtgggacagccctcggcggctcgcgagatttgagcaaccgatgctcctcagtgagacgggaacgtggtccctgctgccgaagccgaggcatacgctccggctgcgcgagatcgcgcccagcgagagctccgaggtcagggagcaccattgccgttcaatgcccatgcatgctgcttgcttgttcgtattcttcttcgacattttggttgttcatattcttttcggcatttggcattaaaggcgcctagcgctactgcattaccacttttcaaatttctttccttttttttggtttgatctcttattgcacttccgttttactctcgatcgctttagaagcgcaagcgcttgcttttttcttgtcatttaaaggccaatggtagtagtcactttctgtaataactgattacaatctagaaggaaacgttgcccatagatcaaatgggagcttgaacgctgaagccaaataacagatctgatctggtgaacttgtatggaggaccagagaagaccgagtaaactattccatgtggttctttcatcagcaacaaaggcttctggcgtgaagaggaaagcagcagctgcgatttccgcaacaacgactgaacaacaaccaacgggagtacaagacccgagttccgggcaatggagctgcgcaatctgccaggtgagcgcgaccagcgaggccaacctgaacgagcacctccaagggaaaaagcacagggcaaagctggcccgatgcggagcgaccaaggcgacgacggatcctcctcctaacagaagcggcgatggcgcagtagcagtagcagcaggcccgagcgacgcgccgaagaggatccagatcctggtcgacggggaggcgcaccaggtcgtccagaggagcagctgcgtgtggtgcgagcgctgcagggtcggctgcaccaacgccgccgccatggtcgaccatctgcggggcaagaggcacagcctgtcgaacaaggtctggacggcgataaaggccgtgaggaggagcagctaatacggcgataaaggccgtgaccgtgaggaggaggcacaatcttgtcgaatacggttgagcagggcctgtgttgagctttggaaagaaagggcacagacactagttgtttgacaactaatgaagtgtgggttttcatagaccctcttaatttagcagcggaaagaaagacggtatattccttgcttgttatcacttatcagacaatcacttattccctaatcccgaacctcgcgtgtgggggctaatcgttgggagtgtgtgtgtgtgtttttggatgggctttttccttgtgatgtttatgcggcagggtgtgttcctcctgctcatgtagctttcaggtctgatgctttttatggttttggatggctgcgggagtggtagcttgtggcatgcatctcttgcgtgctcgctgcctcaagatctttcagacctgaaaacaaaacaaaaacaaaac

SEQ ID NO: 30550 - DNA, 3442 bp, Zea Mays
atggcgagcgggggaggggggattcgggcgacgacttcggggaggatgaagtcgcgagggtggggagattcaagcgacgactttgggacaccggctattgcgctgaggcgtgggggcgactgtagtggcacggcgagttcagactccagcgccgtcttcttcgcggtcgccttttgcgctccatcccctgggctttccgtcacggcggccgcagccatggtggagatgcggcagcggaggaagccgctggtgctcgcctccacgcaggcgctcctcgactcgcttccgggggatcgcccgccgccaccgccgcagaagccggtgcgccttaaggccggcgtcctccgattcccctccggaggtggtggcgccgagttcggggagctcgcgtctttcgtcggcatccctgcccctgctctccgacggctcgcggtcgtcacgggtactcctgatgtggaaagcgcacagtggttaggcatgttgctaaccatcttggtctgcatgtggtcgagtgtagctgtcatgatctgatgacatcatcagaaagtggggcacctgctgcacttgcaactgcctttaaagaagctcagaagtattctccttgtataatacttcttcgccactttgatgcaattgggaatgcatcctcaaacgaaggtccacagtctgagcaatctgggattgcatcgaacattgaatctgtcattaagcagtacattggacaacgttgggttgctaaggattcactgccaggaaaagatgtaaatgggagctcatacctcgtggagcctgaatgtgtaagctctcttcaaatcatactagttgcaactgcggacagttctgaaggaatgcaacagtcaattagaagatgcttccgctatgagatcgacatgaagactatgaatgaagaacagagaaacgaactgatatctgagacacttcaaggcattcctaaagttgctgatgagagtatttgtgacaagttcataaaagatttagcagcgcaaacgtcaggtttcatgcccagggacatacttgcattggtcgcagatgctggtgtgtcttttgcgcataaaattgcagcagggaaagatagcaaagcaatcagtaagcatacggaggtccttccagaaagctcttctgccactcaaaatgaggaacaccatttcagcaaagaagatattatgtcttccttggaacgagccaagaaacggaatcgtgctgcactgggcacacccaaagttcctaatgtcaaatgggaagatgttggtgggctagaggatgtgaaaaaggttattctagatactattcagttgcctctgatgtacaagcacctgttttcttctaaattgcgcaagcgatcaggtgtcctgctatatggacctccaggaacagggaagactttactcgcgaaagcagtagcaactgaatgctcattgaactttcttagcgtcaaaggtccagaactgataaacatgtatgttggagaatcagagaaaaatgttcgggatatttttgagaaggctaggtctgcacgcccatgtgtcattttctttgatgagcttgattcccttgctcctgcacgaggatcctcagcagattctggcggtgtcatggacagggttgtttcccagttacttgtggagatcgatgggttgagtgacaacagccaggcctgaccttcttgattctgcccttcttcgccctggtcggttcgacaagcttctttatgtcggtgtaaatactgaggcatcatacagggaaaggatccttaaagcacagacacgcaagtataagctgcacaagaacgtttctctcttgtcagttgcgcagcgttgtccaccaaacttcactggtgctgatatttacgcgctgtgtgcggatgcatggtttcatgcagcaaagcgatcagttgaaacattcgaaatcgatccttcaagaagtaatgaagccagtgccgaagaagtcatcgtcgagatcgacgattttatcacggtgttaggagatatcgcaccgtcgctctctctggacgagctacaaaactacgaacagttgaggcagaagatcgaaggaccttctagatgaagttgggtttccactccctgctgacattcttaaactgctaacacaccaaaacattccctgtcttacattttcgttcgtacacaagttttcctccctgaaaacttgggcacttctatatccattcctgatttatacaatcacatccttgtagcagcatctgtattgacatcagaatgacattttctctgaagagaaacatcctgtcattctttgttagcagctccgcaactattctgaatgagcccgtgaagtcaagcactcaaagccttacctgggaaacaaaatgctattcctgacctgaaggaagcatccaccaatacagctagtttgggtacacacgctgaaccagctagttcgcctgggagaggcctctgtctcgtttagatgccatcgtctagaagttgtatcggaaaaattataagcgaatgttgcaatgaacagagttccttgtactgctgtgatttgtcattggtcaaagagaactaactgcagcgtttgtctacctacaatacttgtttttttgttgttgctatcttgtagtgccagcagcgatgcctccttgttggtgctcggcaagtcggctggtgtgagcaaaatccgtacgtcgtcgtctccagtggtgtcattctaaactggatctgctgctctcgagaccgaacaactgcaacaaactcaggcagggactcagcatctacacatcctgttctacggtacggtgattgtgacacaaatcggctgcatgggaaccatactagctgccaagaaagatgaaagtgttttctccgacccaacctacaatgtgtctgttctttttgggaagagagatgagccactcctactagcttgcgcacgtcaacttattgagcacataagtggctcagcccggtcattggtgatttctctgggtctgaaagatcattctcagggaacgctgaaggatattactgtagctgtgatgattgaatagctgatgagctgggcatggggttggctcgatggttggcatattcagccccatcgataaagatactgtttagcattgcgcaagaggagccatcgtttataccatgcactaaattctggtagttttgtagttggaccttctatctacttggattaacaaaaggtggttttaagctggtgtcaaaatttgagtgtcaactttcacgctaaacaaaaggcactgtacactggtaaagcacttctgaggcgaatcatgcttttcgaggacaatttcggctatccgtgctggggctgccactgtggagctctgtgcgtactcctttgccgtctaggactagctaggagagctactgtactcgccactcacatcacggctttagaccaactccagcaa

SEQ ID NO: 30551 - DNA, 1972 bp, Zea Mays
catgagtagggtaacttgaatttgatcacacaagcattggaagcagttgggcgtaagatgagagttctaccagacccttctacagttcatttccacctacccggtgatctctctgtccttgtgcataggaagtatgaagacttcatcaacgaactggtcagcaaattccctcacgagaaagaagggatccttaaattctacgatacatgctggacgatcttcaattcactaaattcgttggagctgaagtctctagaggaacccctttatctttttcggcaatttttccagaagcctcgggaatgcttaactctagcttattatttgccacagaatgctggggatatcgctcgcaagttcataaaagatcaggagctactctccttcatagatgccgagtgttttattgtgagcacagtcaatgccttgcaaacacccatgataaatgcaagcatggtaagttcaatcttaatcttctggatcttcatttcaaattcatttggatttctgttatcttaatgccaatataacaggtcttgtgcgataggcactttggagggattaattatccagttggtggcgttggtggtattgcaatatccctggcagatggccttgttgaaaagggcagcgaaatccgttacaaggcgaatgtaaccaacgttattcttgaaaatggaaaggctgttggggtgaggttatcaaatgggaaggagttctttgctaaaacagtgatatcaaatgccaccagatgggacacgtttggaaaactcgtgaaagaggaacttccagaagaggagaaaaactttcaaaagaattacgttaaggcaccatcattcctttcaattcatatgggtgtcaaagcgtcagttctgcctgctggcactgactgccaccattttatacttgaggataattggaataatttggaaaagccttatggaagcatatttttaagtatccctacagttcttgatccatcattagctcccgaaggacatcatatacttcatatatttactacagcaggcatagaagattgggagggtctttctaggaaggaatatgaagagaaaaaagaggtggtggccaatgagattataagaaggcttgaaaagaagttgtttcctggtcttcaagattcaatagtcctcaaagaggtaggctcaccaaaaacacaccgaagatttcttgctcgaaatgacggtacatatggaccaatgccacggggtaaaccgaagggattactggctatgcctttcaatactacctcaatagatggcctttactgtgtcggtgacagctgtttccccgggcaaggtgtcatagctgtagcattctcagggatcatgtgtgctcaccgagttgctgcagatattggactagagcagaagtctccagttctagatgctggtcttcttgggctactcagatggctgagaacacttgcataggacggtatattagacaaagtgggaaaatggacctcatcttctttcaaaaggctgatgtttaactagagttcggattctgcactatcatctgagtggccgggttctgtcatgggtgtgccgtgtacaatcgaggctgggctagcagcatgtggtcgcccatcatgagcacctgcagataattgtgctgggtttatatagtagtaatcctaattggcaacccaagtgtctgaagctgcgcgtgcttgacacggtacggtgcgctcccgcgcatatagaaaacaaattgtcaattgcgatgttgcatcacttaggtacaagttacatggtatgccaaacagtgtaattgttctccaactagattcttcaaagacactttctcaattgtaccaggatacaggttgcacggcatagtgaattgtgtcaaaaattttggatcacaatgatgtagcagctcatggtacagattaaatcagataatcagttagcaagattcccggtgagcgtcgtgccaattggat

SEQ ID NO: 30552 - DNA, 1237 bp, Zea Mays
acctaaaccttgctaccatataaaccttttcactgctccagccgccgccgccgccgtttcttcgtcttcctcgcagcgccgccgctccatcttccgctgatccgctcgctcccgcctctcgccacgcaggcggcggcgctcaggcccgtgatttcagcgacggcgtcagcggcttcccctcccgtctcttcccagtcgcctcgcgccctcgcctccggtcctccgcacaccggccggtgaccctgcatccaccatgactggtgtcagcactggattgttgacgggcttgaggagggtcatggaacagcaaaggatttcaaccgctttctgcagacaatcacgagtttcgagctctactgtttctttctctgacctcgatgagaagggtgacatggaatatgatgataactctccaaattcaaagagggagttacgaccccaaggtgtagatcccaataagggctgggaattccgtggtgtgcacagggccatcatctgtggcaaagttggacaagtccctgtgcaaaaaattttaaggaatgggcatacagtaaccgtttttactgttggaactggtggcatgtttgaccagagggtaattgggcctaaggatttgccaaagccagctcagtggcaccgcatagctgtccataatgactacttaagtgcttatgctgttcagaagctggtgaagaattctgctgtctatgttgagggtgatattgaaaccagggtctacaatgacagtgttaatgatcaagtcaaaaacatacctgagatatgtgttcgacgtgatggcaagattcaattggttaaatctggggacagtgctgctaacatatcattagatgaactaagagaaggactgttctagctatagtgaaagatgtcaggagtatgcttctggcttgagtgtgttttgctggcaccgggcaggctatcagctcatctgcattgtgtccagatgagatgctctgtgctgcggttgttttgctgaatgcttggagcatggtatccttgaactgaagtggcgcttgagaattggaggagttttggtttgacatgagaaaggctggcatggttttcccttcactcacaccgggaacgcagaagcctgcagttctcttccctgcctaaaacactagtaaaatgacaacgcgaggctccatgatgttgatgtccttgcccgcgagtagatgcgcaccaatagttcgcaccctgttctcacatcctcaac

SEQ ID NO: 30553 - DNA, 1745 bp, Zea Mays
taaaaatataaaggagccgcttctctacagccggatgtatttgcttctcccgtacacaacctgctccattcttggcgagcgttcaggcgaaagaggaaaaagagaggagtgcaccgcgagtgtacagctcgaagatccacttccaagtgcttccttttaggataatcttatataccttcaagcaaatagacaatcggaggaacttcacaaagatggaaattactccaatatcacaactacgtccaggaaagttaaattatgctttacatgtgcgaatatctagaatgtgggagtttagaggcacaaatgaacagaacgacatcaaacaccttgaccttgttctcatcgatcaaaagggaaattcaatatatgcagagattccaccagatgcaattgctgtcttaaaaagccacatctacacgaaaaaaagattgtatacatatccaaaataacaattgaacgagctaaactgggattcagagttgttgacaatccttatatggtaaagctcaacaagagaaccattgtgcttgaagataaggatcaaattcaaggttttcctaaatatacattctcactaacacccttagataagttggaccaatacaaaaacaagaccgatcgttttatagatgtcattgctaagatcagtggagtatcaaatgtagcaaaggttcctacaacctcaggagatcagcaaatgaggagagttgtattattagaagaccttaagggaaacatgattgagctatcactatcaggaaaaagagctttggaatttgacggagatcaagttttagatgtgggtcagcaacatcatgttattgcaatatttgtaggaaccttagtcaaactttacaaaggtgaatatacattcttgagtggaacatcagcatgccggtggtacatcaacgaaaatgacattgctgaaatcaaggctttccagaaaagtttgccaagtgaacctgtacctatcaaaaagacctatctccaaaatgatgatgcaactcacaaatttgaggagaaaagtctggaacagctcaagcatgtagaccctttccttgacatgggacaaagatatcagtgcacagctactataattggtatcacagaaaaccaaacatggtgttacaaagcatgcaagatctgtaactcagcaatcattcaaaaggaaaatggttataaatgcacaaaggaaggatgtccatctacacaatttgaatggaagtacaagataccattcattgcaagtgaccacacctataatctagagtttatgttctttgaaaaaaagggaatggagcttataggaaagagtgcatcgactcttcgaaaacaatatgaaccaaaggagataccaccggatataacatcttggataggttataaattcacttttgttgttagagtcctatcaaagaaaagtgtcaagactattgatccatcctttgaagtgcttatgataaaagaaaaataccagaaggaacctattatatcatttatcagctcaagtggagttgtaccagcagaatcatcttcctctacaatggcagaatacaaggaattaccattgctagtgccaattacctccaaagacatagaaaaaaaggagcgatccacttcacaaccagaacacaccgaagaaactcaagatatggacattgaaccatctggcatttgggaagaatctcagatttcaaacaaaagaagctttggagacccaaactatgacaaacaagcttcct

SEQ ID NO: 30554 - DNA, 1847 bp, Zea Mays
ggagtatatatgcaccgtattcttcggtacgacgcttgacctggacgacgcctctagctagctagctagctagcaaaccgaccccatggcagacgagtggtggagctgcacgcgtgctgccgacgacgacgacgacgccggtggctcgccctgctccacagccccggcaacaacggaccagctcgacgctgccgacgagccggcggcgacgagcactgcctcgatcgatttccggcggccaacctcattattgcacgtcgtccgccacgctgccgtcccgccatcatcccccttaatcctcgccgatccaccccatcatatcgacgactggacgcaagcctacttgtgcgggagagcgccgctcgcggcggcggcggcggcagaggcgagcacaagcctcagcgcgctgctccagctccacggcggcgacgctgctggccgccacttcctgctcgcccagcacctccacggtgacgctgctgacagcgcggcggcgcacgtggcagcagcgtcgcagagctcggccctgtacgccgccgccggcaaccagccgtactcctccagctacggcggcggcgcgccggcggcaggagcgctgatggcccagcagccgccgttccctcatcaggacgaattcgaattctcatccgccagcctctttgttggctcctcgtcgtcgacgcgggattccgccggcgtgccggcggcagcggcgcggcggcccgccgtgacgacgacgaagccgcttctcttgcaggccttggagcaaaaggctttcgcgttccactcccatcataaggaacgtacacgacaacacgacgcttcctcggcgacgacagcaagtgctcccggctcgcctgcgccggcgaagaagccccgggtcgtcgcgacgccgtctcctttgccgaccttcaaggtgtgtgcacatggactgctcgcaccgcacagaccgggcagctagctctagctgtgacgcatgcaacctaaagatagtattatcatcatcatcttgcaccttggattattcggacacatcttttggtttccagctcaacatgcaatccaaacaagtagttattcgatcttgttagctatgataatgatcggtgatcagctgtactactacgattgccttcgatttgatccttgtccgagcgcaggtgaggaaagagaagctcggggacagaatcactgcgctccagcagctagtctcgccttttggaaagacggatactgcatcggttcttcacgaggccatcgaatacatcaggttcctgcatgaccaagtagcttccctgagctctccctacctcgggtgtgggcggcccgtagtgcagcagatacagcaacgacgacaggcgaaggacgacggcggcgccgcggcgaaggaggacctgcgaagccgagggctgtgccttgtcccggtggcgagcactacgacttatgcagtggccgctggtggcgagacggcgccggagttctggctccctaactttgggggcacactacggtagggacagagacagagacatgaatatagtagcgtggacatggagatcttggtagctagctaggtctcgtaggcatgtatttgtagctaataaggccgtattctcatgtctgatgcaaaagcaaatgaataaacctgaccagtcgatcacactagtctctaagggtgtttagtttgctggaatgaactggagaaacacaatgggaagaggggaacaaataatatgcggaaaaaaataagaccacaaccacatatatacatgcacttgcttgcatgtatgtggtgtgtacacatgtacacgacctggaaagtattcggacgggcaataagaacttaa

SEQ ID NO: 30555 - DNA, 2722 bp, Zea Mays
ttctttcattcagctctgatggcttcgttccattgcaaaccacctcccgttctgatttctgcgggcggaattccataaggccctcccccctcccctatcctcctccccttgccactccaattcctctgcaaaattttctcatggcagccgacgtttccatccgcactcgatccgcctcaaccacccgctaattcctcctagttctagacttctagtctcctctctctctctctctctctctctctcctgcgccgactcatcttcatcctcgtctcacctccctgctgctgctgacgctgctgccggcaagatcaaatcgttcaaaagggtttttctttttctttttgggcgatttcgtgctcaaattgacatcttctaaccagtccaatgcacttttcgtacccgtgtacaagaccctggatttcggcgaattctagatggatcatgtgttttaggtgattggtgctttcgacctcattagtgccttttgttcaattgctggacccaaggagcagagttctgtcgacatggcatctccaagaggaaggatgtcatttccccttcgttcctttctgatgatctgcctcatggctcagctgggagcttccaatgttgtactcatggcgaacaacactaccctgtcgttcgacgacgtcgaggcaatttttactccagcagtgaaaggttcaggtgtaaatggtgtcctttatgctgtggaacctatggatgcatgcagtccattgaaaacaaaagcgataggaggctctgtctcaccatttgcgttggttataagaggcggttgccatttcgatgacaaagttagaaatgctcagaatgctggattcaaggctgctgtagtatatgatactgaagacaacggtgtccttgtttcaatggctggaagctcgtctggagtccacatatatgccgtgtttgtctctaaagcgtcaggggaggagctgaagaaatattcaggccaaactgacgcagagttgtggataataccaacatacgcgaactcggcttggtcaatcatggcaatttcatttatatcactgcttgttatgtctgctgtcctagccgcgtgtttctttgcgaggagacaccagataagacgggacagggctcgacttccccaaactcgggagttccatggaatgaacagccggttagttaaagcaatgccaagtcttattttcacgaaagtgcaagaagacgactgcacatcagcaacatgcgccatttgcttggaagactacagtgctggagaaaagctaagggttctaccttgtcgacacaagttccacgcagcctgtgtggacctatggctcacctcctggagaacattctgccccgtatgcaagcgggacgcgaatgctggaacaccagacccccctgtatcagagtcgacgcctttgctctcatcatccgccattcgcttaccagaaccaaccgcttcggcttccttccggtctacagtggcagcagcagcgtctccccccaggccaatcagccggcatccgtcaccatcacggtccatatcccgcaagcactccgtttcgggttccagcatccctggcacccctatccccaggtttcatgcaagctcatcatctcctacctgcacaagtggaagcagtttggacctcgcaaacatgccgtcgtctccatggcctcgcgcttcgcaccttgcatctgctcactcttcgtgcggtggccgcctgtccccgccgatccacatcaggaatacctctgcagcgcacgtctcgcgctctgcctatggatctcccagccgttacgtaggctcgtcgcacatgtcccgtggatctccgagttgctactaccttggatcttcttcagggcagcagcatccttacctgaggcactgcaccttgtcaggcacgagcctgttcaccatggtgccccaatcaccgcaacagaaccagctgcagcacggtggagactcggaaaaagatctgtcagctgctgcaccattccgtcagctctactacctgcagcattgtccagattctggcacgtcgtctcagtcgcttccagggtgctgattcttcattcttgctgcaaaattcaccattttaacattgatggtggctccagtaaagctcccggccgtgaggaatcttacatggcaccgaattgacatgtggatttgagctcctcagttcaccatgatgatgagagaaaaaaggtgcgacagaattgcttgtaagaagagagaattgcaccccccagaatgtgtggcttcatcttgaagaagcaaatgcccatgtcgggtttcaccagcgtttagcgtgtactgatacagctctgtagtaattctagttgctgtttgtctatcgaggtttgagccggtagcattccttcctctcttttttgttttcctaattttgaattagttatatgacagacaaggttttcaagaaaagaaataacaagttttacccctgcatttttacagagaggtatgttgaactcaggatctttgccttgcctcgatgggatggttttttaccactgtgttgtttatggtcagtgaaatgtgcatgaagcctcgatggcacttgttctcccgttcagtatgaactacttagtaagtcgctagcagactagcaaattcactataggaaatttaaatttatgggggagttgctctgatgaggcggaaagattgttggtgccaagaaacgcagcagcagatcga

SEQ ID NO: 30556 - DNA, 2441 bp, Zea Mays
gccgttccccaacctctggcgtagtcttgttcatcttcgatctcctccatctcccttcatcctctctctcgctgtttgaggagaactgcctgcccctgctccctcttccgctcctccccgcgccccgctcgccatccccagacttcatttcaggccgggatggacgactacgcccgggagatgatggagctcaagacgctcgtcacccgcaccctcgagaagaagggcgtcctcgccaagattagggctgagctaagagcaagcgtgtttgaagccattgaagaggaggatcgggtggagaatgatgatggagggaaccctgctttgcttggtagctgtaatgaccgagctaagcaactgcatgcttcaccttcaggtaggttactaactgcacttgtatgcgaatacttggagtgggcgcaactaagtcacacaatgaaagtttacttgccagagtgtaacctgcccaaggacttctggaagaatgaactgaaagacttctctaacaaaagtggagctgaagggagcaggagtgctgaaagtggtccaatgcttttagatgttctcgaaggttatctgaaatatgaggtttatctcttgcatgatcattaacagaagcaaaaatcatccttttgtttctttatgtttcccaataaagaaaaaaggggaaagtttctggtgtagtgtgcccaattcttttgtccctagaaaactgtgtagtcctgtatggattaaggtaacaaatctctagctatagctgccactatagtcagttctagctgttttaggcactacaccatttgtacccccattcatcttaccctgttttagcctgctatagccaggtattagccttatgggaactctgcaactagtatggatcctctgacgcgttatgttttgtatgcagaaaagatagtatattactatattgagctggagcaataatccttcatattattggtgtcttgcttaatcaaactgtccaaaaattggattgtctgccaaaactacaatacgcatcaaggcgttaccttagaacaaaaagtaggtgttgttattctggaagattaaggagataggtttatcaagatcaagcacatcttcacaatttgtaatttttctaaaagctgaaacattttggcaatgtagataatgattcttggaataacaagaatggatatacattgatatgctcttttcaagaatggatacactgcatgcatgtgatttatatttacaatgcatcatcattatcattgtactgagatctgcttacatgtgatttttcaatctcaacttattgatggaaggcctgtactcaaggcctccttttgatggtctgtgatgcttggggtatgagctgcatttatgctgctttctgcctatgacctttaggccctgtttgtttaccctctagattatataatgcagcttaaataagagacaaacaaacaacacaaattattaggtggattatataatctacatacctagattatgataatccataggcaggtcattaggtgcttatataatccataggcaggtcattaggtgcttatataatccatgaccataagttagattatataatcctggaaggaaacaaacaggaccttagttcactgcacacacaaaacttgtttttttccagcttgactttcactgtcctcgagcaagtaaagttgctttttcctattatacttcattaataacatcttttattattaacctccaaatatagtcaacatgctctagcttaaattttttggttttcttcagcatgctttggtcatctaattgtgttgttttggtcagaatttgtctcaaacaaggatgggcggcaggaggatgatgagttcagaatctgatccatcactaaatgttgaacatcggagcatgaggagggcaccattatcgtcagctgggaacctgcctcctatggggaggccaatctcttcgtcgcagcaggcatcagatcgcagagggggatcttcagcttccaacacaaggaaagatgagtacaactggagatacgataccaccgatgatatatctgaagaggtgctacgggcatcgactgctctagaaagtgttcagctagaccgcaaatctcggaatctgccaacatcttggaggcattcaggggatggcgccgagtaacaacaaggctttggagctggttgcttgacttgaccctgtatcatgtaatttgtatgccaatcatttgcagtgatacgatgcttggattgctgctatcttagagaagtggtaaactggttatgcgtgtttgtcttgtaacgaacaaaacaactttagtgttagtttcatgttgcaattttcaaagctctcatgttggaactgcgtggactagtttcatcgtcataaagctcattttattcccgtagaacattatttaatcatcactcgcttcatca

SEQ ID NO: 30557 - DNA, 1548 bp, Zea Mays
gccgtctcggcaacccgcaccctatactagggcaccgaaacccccaaccatcgttcccaggttgccaatccgagcgcagccaaacccaaaccctcctccctcccggctctcgacgggcgacggcgatggccgccgcgacagagaagacggctgaggacatccgccgcgagctccaggagctccagcgtcagcaccgcgagatcaccgagcgcctgcgcgacccccgtggccttcgccgcggcgcccccggccctggtcctggacccggggccccccgcccgctccgcggcttcgcgagacccgctgtgggtccggaatcgggggatcaacctccgcagaagcgtcggctgctatcagccgtagttaaggtggatggggctgaaaataacgaggaaggcacaaaggatgcggatgcggaggggcatgggacaggttcaggtgccactgaaggcagtgccgggaggggtttcaacaatggcgggttcagaagggatggtggcttgcggatgcagaggagagtggactataattcgctgccagagccagctccaagggagcttcccaggaatgaggacccgaatttggtgagaagaaataagaggatgctggggcagcttcttgtcggtacattagagaaatttcaacaagaagataaaaaactatctaactccgaggcttttctgcgtagatcagagactcagcgaaaggctgagcaaaaggtccgcgaagaaagtgaaaggctgcgacagaaggaacgtgagcaaattgcagagaagcgtaagcgtgatatgacgcttcgcgctcgtgtagctgctaaggcggaagaaaagaggttggagctgttgtacattcagtggactgagcaccataaaaggctgtccaatttcttaaggtattcgaagaatggaaatctatgcgcagggatgagctgactcggttccaaaagcaagttgaggagcaatatctctcaaatgtggagaggcagctggagaggatccagaatgcccggaacgctcgaaaggcgaacgggcatgctaacatgcaagaaatggacaaggagctggacacacacagggcggagcatggtccgaagactcggcgagttcctgaggagggcggtaatgatgacgacgaagacgcagaggacatggctgcggaagacgaggtgatggatgaagttctgggcatcaacgatgggatcaacgaggacccatccaagccgtccgaagaagctactactgaaggtggtgagcctgcacccgaggaagcacaataggattctttgttcacacaagctaggcacatagccgtacgtaccattccgtatgcttagttgccgtattgttgggaactgtttgtgcgtgtatttctgttagacgttccccgctggtttaggctgtgttttatattgctgttttgtctttttgaatgttgagaccatacaactgtcgatcattatctcataattgttgtaaaaatactataattgataccttgatttggacgtcggtggcgttaaacgtttcgggttctgttcttcactacccg

SEQ ID NO: 30558 - DNA, 1996 bp, Zea Mays
ggggttttggtgtgatgcgacgagatgtcatcgggatgaggaacatggtggtgaccttaatcgagcaataaattcgcatttcaatgatggagacagcatattgaatgggatcagtcaaaacaccatgcccactagtcatgatgatatgatggacctggatggaccccttgataatacatttcaaagatctttgttcccagagaattttcgtgacccttttgctctaatggatccaaattttcagcaccaattttttgacagggttggctccactgatggtgtcactcgtggaccgctagtttcacaccctagagaggtgagggagattcctatagaagttaaggatagtgatcctcaaacaagtccatctggccaggcccctgttattgaggatgttactggacatgagtcttcaaatggccttgaagttcatgaaactatcataattgatgatgaggacagcggattgttatctgcgccatctgctccacatgctagtgttcctagcaatacatcttctgagcccactgctcctccactggttcatgttaatgactatgatgatgacatagaagaggaaatgattagggcagcaattgaagcttcaaagaaggattctgaaggactggcaaatatagcagagcaaggagaccagcatcaagagggagtgaatttgggggaacattcttctgataaagcagtcatgagaaccacagatggaatagttgagaggcaagtactagcttcaggaaaggctggaacatctaggcaaccaatagatgaagagagcttccaagaggagactgaagatgtagaagaacaaccgctagttagacgtcgttctcggcgtgccccctctgagaacaccgagctagcacaaatgccgcacccaggagctagccctgttctgaacaatcaccagtctagtggaggtgatttcccatctgagtggggtggcatttcttctgaggaacatgatgaagctgttatgcttgaggctgcaatgttcggcggagtttttggaagaccaatgcatcctttctccatgccttctcacagaagctctacttattatccccaaataactcattcttcatcaccagcattagctgaacagcggttattaagagagcagcaggacgatgagtaccttgcgtcactacaagctgatcaagaaaaagagttgaaggccttacaggatgctgagctccatcgcctagaagaaacaactacaagagaagttgctcttaagaaacagaagcaagagcaggaggaaaggcgtaaaaagcaacttgaggaagaggagctagagtccagtctcgcttccaagcaagcatcattaccatcagaaccgcctccagacgcagagggtgccgtgacagttgtagtccgcatgcctgatggcagtcgacaggggcgttgctttctcaaaactgataaacttaagttcctatttgatttcttagacattgggaggatttgcaagccagggacctacagattggtgaggacatacccgaggcgcacgtttacgagcagtgagggggacgtatcgttcagtgatcttggcttaacaagcaagcaggaagccctatttctagaacagatcacagagtagaggataagtgtttaggcagcatggttatagacaccacagctggagccggagaattttttttacattttatacttgcagcttttgctagtaaaaactcggtctgtgaaaatggttgggttggtcgaagaaaggcgtcacgttacctatacaatgtggacagctacgcatggccgttcattcgcacgagtctcagagtggctctgtacatactgtcggttctgtgaatcaaagcaatgttgcgtatatataagcaaactgcgcagcaacgggagatgatgcgaaacggccgtcagagtttgctgctttcgcatcactggtcactggtgtctcagagacagaactggctgaacgtgtattgaaaaaactgagaaaaatgaa

SEQ ID NO: 30559 - DNA, 1427 bp, Zea Mays
aaaaggcccatggggctttcaatttagcgggtgctcccatctttcgttaggataagaggaaccctagtccctagcaacgcctacagcgtcacggaacaccggcgaaccaaacctcggagaaaccctagcaaggccgcttgcccctctcaggcgcgacacagcatcggcgactagcgatgacaggatatcgcagccgcagtccgagccgaagctacagcccacggaggcggtacagccggagccctcctaggcgcaagcgctacgacgatccacgcgaccgctaccgctgggccggggccggcggaggcggggaccgacgtggttacggtcggccgttggcgcagtccggtctcctcatccgtaatatctccctcacagccaggccagaagatattcgagctacatttgagcaattcggccctatcaaggatgtttacctgccaaggaatttccacacgagggaacttcgtggttttggatttgtcaaattccgctaccctgaggatgctgcagttgccaagcgtgagatgcatcatcaagtcattggtgggcgagaaatttcaatagtttatgctgaggagaatcgaaaaacgccacaagaaatgcgcatgagaacaagaactagtggtaggtacatggatgaaagatacacaagactgtcaagatctccaaggtctcgttcccactcttattcaccaccgccttctccagttaggcgtgacttcagtcaacaaagaatatagagtatctaaaagaccaaaagacaaccataatgtttggagattaaaagccaaagtgaaagtaccatggcttccagggttgagcatgtgaaaggcattattgttaaagataaagtggtgctgtcagtcaagagtttaatgataatcttggctaagatacctgacggaaagagtatgttgaagttgagccagcgccttaatgcattgcacaattgcatgtttggatcaaagtgggtagcttttattgatatggggcaggggcagggagcgcccggatagttattcccctcagtactcgcactctccacgccctcgggacagcaggcaccacaggtcagatggtcgctctccaactccaagcctagatgaccacaaacctaaggcgacaccagtcaatggtggacatggtccagcagttgcatccagatagtatgatgccattatggatgccttgaattgtgttcggaggctggagactgcagactatcttttcaccaatcttctctaagagatgagtagggttgtagtaaacagatacttggtagttgtattacaggtgatggtttcggttatgagtccaatggccaaaatatcgtccgaggaaaaaatggtgaaatcagggtttatatgatctcgaggatggggacaaacgcatcccggcgcgcctcgatggtaacacccagtttg

SEQ ID NO: 30560 - DNA, 2330 bp, Zea Mays
ccggtggcttctcattcattgttgattgattgatcctccccgcctcactcctttgtctcctcgcctcgtgctcgctcgctcccctcgccctggcgaggagggcagcagaaaccctagcggctcaggccgggcgggggttagatgctccaaggttcgagagggaagggtaggttagtggtgcgccatcgactatgggctgcgtcttcggccgggcggctgcgtcgtcctctgcagcgccgaagaagaagtggggcaaggggaggtcgtccccgcagcccgaagcggggtcgccctccgcagtcgccgccaccgacggggacgggaggccgcggcggcggctcgggggccgcagggcgtcgggacccaggcagggttgcgtccccgctgctgccgcggcggagcagctcgccgccggttggccaccgtggctcgtcgcagtcgccggggaggccctccgcggctgggcgccgcgccgcgccgacacgttcgagaagcttaataaggatcgggcacgtacagcaacgtgtaccgggcgagggacaccgtctctggccggatcgtcgctcttaaaaaggtccgcttcgataacctcgagccagaaagcgtcaagtttatggcccgggaaatactgatcctaaggagactcgaccaccccaacatcatcaaattagagggcttggtcacctccaggatgtcatgcagcctttaccttgtcttcgagtacatggagcatgatcttgctggtcttgcggcaagttgtgatgtcaagttcacgttgcctcagataaaatgttacatacagcagctgttgtcagggcttgagcattgtcatgacaataatgtattgcaccgggatatcaaggggtcaaacttgttgttggataataatgggattcttaagattgcggattttgggctggcaacattctttgatccacgacataaacgaccaatgacgagccgagtggtcacgctatggtaccgtccaccagaattgttacttggtgccactgagtatagtgtaggtgttgatttgtggagtgctggatgcattcttgcagagctcctgtatggaaagcccataatgcctgggcgcactgaggtggaacagttgcacaagattttcaagctatgtggttccccttctgaggagtactggaagaagtctaaattgccacacgcaacaatattcaaacctcaacaaccctataaacgttgcatcagggagacatttaaagattttcctacatcggctctgccattggttgaaactctgcttgcaattgatccagctgagcgacaaactgcctcagctgcattacacagtgattttttttcaaccgagccttatgcttgtaacccttcaagtctgccaacatatccaccaagcaaggagatggatgccaagttaagagacgaggaggctagaagactacgagcggctgcaaaggccaagggagaacagaaaaggactcgaccacgtgatcgatctcggagggctggaccagcaccagaagctaatgcagagattcaagcaaacttagacaggcgacgaatgataactcatgcaaatgcaaagagtaaaagtgagaagtttcctcctccgcatcaggatggaggtacgggtaatccgcttggatcctatcatcatatggagcctatgttcgagcaccaggatgcttccttcagtacagtagtccccatagagaaggggacctcacaaacatggtccgggccgttgtttgatccagcagctctcgggcagtcgaggcggaagaagcaaactaccctagatgctaaggctgctgcttactcaaagcagctccaaaaggaaaagggagggatacgagcccgataacaaaatgtcgttttcctggtgagcatgtggagggaccgtgggaaaggttcatcgcctacggatgaattttcttgttttgttcctctggtggttggaaacaggcaacaatgcgctgctgtagggtgaagtcttccggattgtgtacatgtcatgtggtagcgtttccaagtactgtttagatgcttctgaacaagctgccgtcacccggacgggactttaggggtttgagactcgtatttgtgctctttatggcaattcagttgcccatgtgtatatatggagcaattctttcttgtgtatgtacagagacggcggtagctttgatttcttaataatgaatcaagtgtgatggcgaccttcctcacgtaacagtggtccagtaattgttggttgttaaacttgctgcggtggattgcttcgccttgtgattctcaacaagaaggcaatgttctttcagttttcttgtctgtag

SEQ ID NO: 30561 - DNA, 4325 bp, Zea Mays
aagcaaagcattcaagaaccggatttcccttgttgtttcggaagcagttaatggtcgagaggggccacaacctccagccgttgcagttcttgcgttgagttggattgggttgccaagccccgccaaataaaacaaaagggcttcctgtaatcctgcgctgcaccgatggtgatagcgtcgggagccgttgacaggggccacctgtccccgattgctcccctgtcagagtcgccgtcgtcctcatcattcttctcccaggatctcgtccccactgagaggcaagttggattctggaaatcgtcagagtcaatggtcgatcacaaagggagcaagcctattttcacttctccactcgataaggcccatcccataggctcaagtcctgcaggtggtctggaacatcaacgaggtcaagccttcaaggggaagctgggcatgcttaaccttggtaatttggtggaccaacaagaaaatgctcctggcataccttcgatttcttggggtgatgtcctcagtacctccaggtccagtcttggcttgtctacaggagggacggcttttgttgaaccacccagtgctgatcaacatgtgcaagactatggagactgcttttcatccagctccttcactgaagtcttcggtagaaaatcaagattgatggcaagtggcgtttatggccaatcagctggtgcaaatgattccggttatgacggagatgaacctctagggtccatgaaagaaatggaagctcaaactattggtgatctccttcctgatgacgatgacctgatgtcgggaattattgatggctttgaatacaccggcttgtctaaccaggatgatgccgatgaagatatattctacactggaggaggtttggagctagagcatgatgattccaacaacgtcgacaaatttcgtgatgtgtccttcaagattcaactttctgagaagcactctatcgataaacaccattccagagctcttattgtaaaaaatattaatccaggcatcgagggttctgatttaagggctctgtttcagcaatatggggacgtacagacattcgacacatcctgcaagagccatggaattgttacagtgtcttactatgacattagagctgcacaggacgcagtgagagcagtccataacaaacctctggggctgatgaaacttgatgttcaattttcccttcctaaggaaaatgttccaaacaaagatcccaacaatggaacactggtggtatctcttattgactcttccatctccagccatgatcttctccaaaaatttagtgtttatggcgatgtcaaggagatttacaagtctcctacaagctgcaataagaaatttgtagaattctatgatatcagagcagcacaagaagcactgaatgacctcaacaagggtgaaatatcatgctcacaaatcaaagttgagcatagcttttctggaggagcaggatcttgcttcgcagagcaatattcaggagaacagaagcaaaatgccgtagctcaccaacttaagaactctccacctgggaccattgggaagttagatactaagagttgggacagcagcactgttcataatttatattctccagttagaccgcaacacgataaatcacaacatggcttctctgtgaatcctcctcagaagttgtcatcgcctatcagaattgaatctacacagcagcatagtaatcaaactgcttttggtgaacatagtggatctcttggtcatggcaactttggaggtgggctgcaagccttccacccgcactcactgccagagtgtcacaatggtatttgcaatggctataactccatgacattaaatgcaaggaattctaacttcagatttactgaaggaatagactacaataatcacaaagttgaccacagtgaccttcatggtcattcctctgatcaaaatgaagcaattagagttgctggaattggaagttgcccccttcatggacatcactatacctggagtaactcaaatggttttcctcaaagcccctctgctccaatgatgtggcctaactttcagcaaccagtgcatatgcattgctaccctgctatgcctcctcacatccggcgcagtgctgcccatcctatggaccaacatcacttgggttcagctccaaacagtgttggtggttttgcaaatgcacactcttttcatccaggatcccttgaaagcgtagggtttcctggcagccctcagctgtatccatcagatctctctgtatttgcatctgccagaggaaattacagggagaccatgttctctgccataagtgccgggtttccatcaattcagcaaattcttcatgcgaccaacggaaggaatcctatgatgcacgtctccacctcatatgacgccactaatgatcgcataaggagccgcaggcatgatggaaatgctgcccagtctgaaaacaagaagcagtttgagctggaccttgaccgcatagctaagggtgaagactcgcgcaccacactgatgataaaaaacattcctaacaagtacaccagtaagctgcttttggctgtcattgatgagaatcaccgaggaacttatgatttcatctaccttccaattgattttaagaataaatgtaacgtgggatatgcattcatcaatatgacggatccacagcagatagttccattttacaagacattcaacggcaagaaatgggagaagttcaatagtgagaaagtggcatcacttgcgtacgccagaatccagggaaggaacgctttgattgctcatttccagaattctagcctgatgaatgaagagaaatggtgccgccctatgcttttccacaaagatggcccgaacgcaggagaccaggaaccattccctgtgggtaacaatgttcgttctcggtccgggaggaacagaccacttagcagtggttcggagactaccaaagaggcaagtccatcaacctctcctaactgaagagaagccggctcccgatattccaactcaggacaggcaggcggtatttgctcactaactggaggctgaagggcatgtaataaatcatccccagttttgctgcttctttttcttttggtcctcgtcagcaaggtgacctgacttgctgagtgtgactagctaacgagaattctgcactgcatgagcctgctgaagattcaccttaaagtaactatgccttggttttgccataccattgacgtcaacggctacaggtaatggagaagacctggagtggtagagggaggtgtgtttcaggcgggtgaaaattcaagttgtacagttgaactcaccaggattggaaaatggtcatcaattcaaatttgagttgtttttcttagggttcttcttgctatgtttgatctcgtttatgtgcgtgtcatgtgtccacggtgtgagcccaaatgtttgaatgccttgtctttgtgcaatttctctcaaacctcagattctggtgtgctggttcattccatgtcctcttttgtttttcaaattcaagatttattacatcataaacatgttacaaagatggggggtcatgttgccccgaacaatccaagtttcaaaacacatgctagatattacaggttggagaatgaagcccctagagaaaaggcatggatttggggtagttgcccgtcttgctttttttttgcaagaacatcagctatcttgtttctctctaggaacctgttgtgccaaaatcatggcgtaagccaacacctggctgccagttaacaaaattgcatctcgcagatcgagtgcagcagctaccttgaaattaaataggaattgcatcctggaagaaagaagcatggggaatacctgtagcaggtcggtctcccccaaaccaaaagaaatggctgcaacactgcgcacagcaaaggttccacacccaaaaaagagggcgcccagcacccactaccttcagcatgctctgccacggcttctggtcctcctcgctggactgtcatcagctcccgtggcattcacactgctccgagtcaccctgcggccgctgctcacagcagggctgccgttgccgtcatcatgcatatcaccactcttcctggtccgtttcataggagtgacgcacacatcaacctcttccactgcagcactgctcttcaccctcttgccaccagtctcagcatcagccttgtgcttcgtctgtttcgcagcagcatcttcatcagccgtgcgcttcttcggctgtttcgcagcagcatcttcaactaacacatccaccacttcagccgcgcccatctttgactttttatcatcttttgcaccctccattt

SEQ ID NO: 30562 - DNA, 2113 bp, Zea Mays
agaaaagcctggttaaaaacgcatccaacaggctagctttctacctctcttctccatccggctcgtcatctactcccctcgctaggcatctttgccgagggcgtacggctcgccatttccttttatcgcgcccaactgccctcccgccgtcacggcaaattccagctcccgcgaccgcgacattgcaccctcgccaccgcgaccagcccgtgcctccacattcatccgtcgccatgtacaaacctgtacggccccattcgttgaacaagtgaagaaactggattgtggaatgctcctctttctcagtgttcgccaggaaggatagatccggaggcgcatcgtacgggtggagatttggaccaatccactgtaggattgatgcaccggcgtttgcttcctcctacaagcttcgaaggcctaatgtcagcaaatctgtcccatgccaatcgaataaacagggatgaatcctacacagggaggcaatcctttggatttcaaaatgtagttgatctaattcatgcatatgctgccaaagctgttactgaacaactagaccaaaatgagaaccttgtatcagtcaatgcagatgtctgcaatttctgggaaaaggatgttatgccgatgcttttctgtaggagttgcagatttttttttaaaaaaaaaacttcagccgaaacaggatgttatatcgaaacattgaattagcagtggatcgtgttcagaaagttgggttcattgtagggatcagcttccaggggttggttcgttgcaggatcaattgccaacctaccactgagtctaaatttagagtctgttggttacccacccttcaggaagttctatattttataaagccatctccaaaactctaaaattagctaggaattatagctatgctgttggagttgctctcagttccttacaccagttgtttctttaattcaggatgcccagaacttgaagaagatgaagcgcaacagcaaaattggaaaagaaattgttgcggcgtaggtgttgctggacactgtgaacttgcactatcattttaacagcttgcatcaagaagggtggcccaaacccttcatccaacacaactttatcagctatactagagaaagcaagggaacttgatgtccctagagaaattttggagcgcaacatcaaaagggcatcagaaaagggacaagatacttacacagaaaaggtttatgaggtctatggttttggtggagtgggtatggtcgttgaagttctaactgacaaaattacaagatcagttgctgacattagaaacgtggtgaaagactgcggagcaaaattggctgatcctggatctgttacctttagattcagacaagctcgagtggtgaacataaaagttactgatgcagataaggaccaactgctcaccgttgcgttagatgctggtgctgatgacgtccttgaaccaaattttgatgatgatgactctgaagaagaagcagaaaggttctacaagatagttactacatcagaaaactacccagttttgctatcgaagcttcaagaagaaggattgaagtttgaaactgataatggctacgaacttgttcctctgaacccaattgaggtggacgacgaggccgtggaactaaacaaggaacttgtttcaaatttgctagagcttgatgacgttgatgccgtctatacagaccaaaaatgagtgaattcatgagctacagctctcaattcaagacgcgctcggccaatggactttgttcgagtatattcacttttcattgatgggaaaaaaatgttaggtctttttatgaagcctggttgagcaccatcggctctacccaaaaacttaacctagttatccagcatctttttgatactttggcatttcgcaagctcatgtctataccttggtttcttcccagcccatcgtgttgggatggtttgatacatgttcagaaagcagatgtgagaaaccatagtaaaataatacgttgatgctgatccatttttgggtcttgttaaattgcaatggaaatgctatgattttggtaagcattgaaatgaaaatgctttggctctctgaataaatgaatgtgctcttcgctcctataag

SEQ ID NO: 30563 - DNA, 1881 bp, Zea Mays
tgatcattgtggtttatggttcacattggaatttatgtgttgttcgtgcttgatgaattttctccaaaggaacaagggagacaatgagaggcgatgttgaagctatcgatcccgggaataaagctgctgcggaaccggtgggagatgtagctgcgctatcgtcaaggctggctaggaggctactacatggatcatggtgccctcctcggtgccaggggatatgcttggatcagagtaggggtaggtgagggtgaggattgtccatttatcgcctacaatttcttcaataccattgatatttaagtcatctcatcgagcttctttatatattattccgcaacttaatctattttcttgtcccaaaaatcatcaccacatctagttaccttatgttgttttgatttgttggtcgctgctccttggagaacattcatgctatggacacaaactcaggtggacgtggtgttcgacaattcaaaacatacctattacatatattggaaaaggaaaccccaggcgtttcaaagttagagtttcacagcttgcagcgaatttgggttctttttaatttgttgctttagtattgaattaacgtatgatcattgtggtttatggttcgcattggaatttatgtgttgttcgtgcttgatgaattttctccaaaagaacaagggagacaataagaggcgatgttgaagctgccgatcccgggaataaagctgctgcggaaccggtgggagatgtagctgctgcggaacacgaaagttttgcattatttaagttttaatcaaggaaatggtccaagggtgcatcactggaataagctcgagaccacaagtgtcatatctcctctaatctttactctctcaggttccagttgaatatgttcattgctacaatgaagccgttttgttgtttgctgtccgccgccgtattcggggtcttcgcctgcctctatgggctcagggcggacaggggcctacaagatctcctcgggccaaggaatcgttcccctccggcgacctccctcctccctttcgtctcaggccttccactgtatctccatcaaagcgaaggatcagaggctactccgttaggaggagaggaaaggaattgtgagccttgtgttggagaagtcgaagactgagagtatatggtggctccattggtgtccatgttaatggctggcgtgttctagagcaactcggggttgtcgtagagcttagggagacttgccaaccttagggagacttgccaaccttgtcatcgcgtaccatgccaacagaatgcttagcttttacgcaccagcgcgtgacgccatgtgggagcaaagttgggaaaatggatattggcggtggtcgagaggtcactcttattggaagtctagaaatgccaaaggatgacatatggcttgtcacagctatcctatctggtctgattgaataatgtgcgaagatataagtcattggctatcaatttttgtgaatcagatatttcttggcctcctatcttcgcctcaggcagctgggagtggttttatactcgctgatgacatcaagtcttaggtgcttccattgatcaataactcagggaaatatggagggatcatgatgtggttcaagtactatgatgatcaagatggctacaattcttgagtgaagagtgatgtttaggttgttgcctgtggtgtgtcacaatatctgtgtgttacttgtgtgtatgtgagaaattatgtgactctggagtctggatagtgcaataagtattactcaagtatatgattgaatcttctgtcatactattcaaattatgtcatattgtatcttttaaggtatgtaaacatccacttttagcgatgctaacaaaagaatagaacaacaa

SEQ ID NO: 30564 - DNA, 2052 bp, Zea Mays
acgccggtacgccagacgccacgcccatttcttctccacgaagcctttgaagtcccaaatcaactcccgcagacgcctccaaacacccagaccagaccaccgtcggccgtcgctagcctgcgcaacatctccaggtccagggtccaggccacagctcgagcccgacgaccgacgcctagacgcggctgggcggtcggcctcgcctcgtctcccccctccacgcctcctttctcctgctccgcgtctcgatctcgcctcccccgccgcgtggcgcgacccggccaggtatcgcccaccctgcgctgcggccatggataacttgatcaccctcgtcaacaagctgcagagggcctgcacggctctcggagaccacggagaggagagtgcactcccgacgctctgggactcgctgccggccatcgccgtcgttggaggacagagctctggtaaatcctctgtgttggagagcgtggttgggaaggatttcttaccgaggggttcaggcattgtaacccggcggccgctggtactgcagctccacagaattgatggtgacagggaatacgccgagtttatgcaccttccaagaaagagatttacagattttgctgccgtgaggaaggagatagctgatgaaaccgacagagaaacaggccgttcaaagcaaatatcacctgtccctatccatttaagcatattttctccatatgttgtgaatcttactcttattgatcttcctgggcttactaaagtagccgttgagggccaaccggagaatattgttcaggacattgaaaacatggttcgctcatatattgaaaagccaaattgtataattctggctgtttccccagccaatcaggaccttgctacttctgatgcaatcaagatatcacgggaagttgatcccaaaggtgaaaggacctttggtgttctcacaaaaattgatctgatggacaagggtaccgatgctgttgatatactggaaggaagatcttaccgtctccaaacaccatgggttggtgttgttaatcgatcccaacaagatatcaacaagaatgtggacatgattgctgctaggcgtagagagcgagagtattttgcaactacaccagaatataagcacatggcttctaggatgggatctgaatatttaggaaagatgctttcaaagcatttggaacaagttatcaaatcaaggatcccggggatccaatctcttataacaaagacaattgcagagctggaaactgaacttaatcgacttggaaaacccattgctaatgatgctggggggaagctgtacacgatcatggaaatttgtcgtatgtttgacagtatctacaaagagcatctggacggagtgcgccctggcggagaaaaagtttaccacgtcttcgacaatcaatttcctgtagctattaaacggttgcagtttgataagcaactctctatggaaaatgtaaagaagcttataacagaagctgatggataccagcctcacttaatagctccagaacaaggatatcgacgccttatagaatcttgtcttattagtatcagaggtcctgccgaggcagctgttgatgcggtacatgcaattctgaaggacctcgtccgcaaggctatcaatgaaacacatgagctgaagcagtttcccacccttcgtgtggaagtaggcaatgcagcttttgagtcattggatagaatgagggatgaaagcaagaaaaatacattaaagctagttgacatggaatgcagctacttgacagtagatttcttcaggaagcttccccaggatgttgagaggggtggaaatccaagccactctatttttgatagatataatgactcttatcttagacgaattggacaaactgttctgtcatatgttaatatggtgtgttcgaccttgaggaactccatcccaaaatctattgtttattgccaagtgcgagaggccaagcgctcgctgctcgatcacttcttcactgaactgggagcaagagagtctttaccacatgcaatatgcaagaccccactcatgtgaag

SEQ ID NO: 30565 - DNA, 1844 bp, Zea Mays
acgtgtcgctcgacctgcgcgacagcggcgtcagagaccgaagccttggaatgtttccggccgtccacgcagcgtttcccccgtgctccgtgtatgtctgcctccctcccccgctccgcgcgggcgagctgagcgcctgagccccataataaataggcggccagccacgtagcagcaccggccggacgcgacgcaatgcaacacgaagaagtgtgcgatactactacctgcggtgaaggcaatggtcgaggaggtgaggaagaactcgagatggaggggcactcgttgatgaggatgaagaggagggatcacttgctgctcactgacggcgccggcgccggcgccggggcggggcctcttgcggtgcagacgccgatggagcccatggagttcctgtcgcggtcgtggagcgtgtcggcgtcggagatctccaaggtgctggctggcggcgtcggcgggaggcggagctccaacttcgtcgtcgaccgcctgtccgggatgctcatgccggagacgctcgcgctcgcagcctcctcctcctccgccggcaccaacaacatcagcccccgcaagcgcaccctcaggagcaggagcgcgatctccgcgcaccaggtccaccacacggtccacgcgatcggcaagtggttccaccactgggacgcgggcagcagcaaggtggacaaggcccgcgccgagcgggcgcgcgtgcacgccgcggtctccgtggcgagcgtggcggccgcggtcgccgccgtggccgtggccgcgggcgcgagccccgaggtggacgtcaccgacgacggcgccaggatggggagcgcgctggcgtccgcgacgcagctgctggcgtcgcactgcgtcgaggccgccgagctcgcgggggccgaccacgaccaggtggcgtccgccgtggagaccgcggtcgacgtgcggagcccaggggatctgctcaccctcaccgccgcagcggccacagctctcagaggggccgcggcgatgcggcacagggcgcagcgggaggcgaggagcagggcggccgtagcgccgtacgacaaggcctgcagctaccgcgcggacgtctggtgcaaggaaggcgcgctcctcaaacgcaaccgcaaaggcgctctgcactggaagcaggtggccgtgtacatcagcaagaagtcgcaggtgatagtgaagctgaagagcaagcacatcggcggcgccttctccaagaagaagaaaggcgtcgtctacggcgtctacgacgacatcccggcgtggccggcgcgcgagggcgtcgccgcgcaaagctcggcgccggagacgtgccacttcgggctgaggacggcgcatggcctgctcgagttccagtgcgaaagcagggcacagaggcgggactgggtggaggcggtgaaggacctgatccggcaggtggccggcgggactgctctgctcgagcactccttcgagtcgctaaggctgagcgcgtcttgatttaagtttggccgtgtagtctggcatgtaaatccgcctccatttgtccaatcggtagggagaaatcgaggtgcaaatttgcagaataatgtgcagagatgtagttttttgctttttcctgggaaggtaatatgaagcgcttagagtgctggtgtatgtaacgacgtgtgtctcaaaactatctcaccttgtttaacttgaaaatagcaagccaacttaaaagagagagccacccatcagactagtttttttgggggtgattggacattttgcttagttgggtgtgcttaataaactgtaggattccagacaaccctaatttgttagacatcggccaaccctgggctggatgtatcatctttttt

SEQ ID NO: 30566 - DNA, 6006 bp, Zea Mays
cttgactatacgcagtagtagataaatactactactgaatttgtcccccatttgttatagtctcaccacctctccacccttcgaaattgaaatcaaatcaaagcagcccaccaccctcgattcattcaccaccacctctccacactttgaaatcaactcaatcaaagcagcccctcctccagtcctccccaacaatcgaattccggtgcgaattggagccctcagccctcccgcgcatctagggttttgcccatggaccccgacgccggcggggctggggccgggggccgggcgggcttcgagcgggcgtgccggctgcccaacaccgtccactccgaggtcctgccgtcgctgccgctccccaccctcccgcgcgagctcggcttcgacgcgctccgcgacgacgagcccctcgccgcgcccgaccgccccgacatgatcatgcaggccgccaacatcgcccgcatcctcgccgacaccgacgtctcccacctgggcttcaccgcggcggacaacgtcgaagtggatcccagccggtgctcctggctctggagggaggtgctcaagcacaaccccgacgccttcaaggtcaaggcgcccgggccgtcttctcaaggtccatttggaggcccaggataccacaatcaagaacgtgagaagcactttgaacatcttacacctaatatgagcaaaacacgaaatggatctgcattttctcaggatgaaattaactcacacagagagcattttcgtaatgaactgaccccagattcagttgcttcaaagaagccaaaagtaaggaagaaagaaattaacaattctgtttcaacttctccccacagcattcctaataatcaagaagttattgctaccttctgtgaggcggtggaggatttctgtggaaaagctgaaattcctgacgatggtgatggtggtgactggttgtcaatcccacttgacgatgttaaggttcttgtgaatgaaattacatctgttcgatccaaaaggatattgcatgaggttcctatggatacagttacaaggttattagacgtgattgaccgtcagattcgatgttctcaaggtttgtcgatagatgtgaaggaaaattctgacgcctttgatgctgaacctctggttttctctgctttggagtccagtcatgctgcgttggcaattatgacccaccatgatatgccaaagcaactgtatcgggaagaacttattgagcgtattatcgatttctcaaggcatcagatcacagattgtatggcagcaagtaacccaacctttcgagctctctacaaaccagctggaaatgttgcaaatgatggagatgatgatgaaggtgatttggaaaatggacaagttagcaaaaggagacgtactgctactaatttgagcatgagaaaatcttcaaacagagtttctgcttctgtttattctgctgtgcagaaactatgcttgatattgggttttcttaaggaactgctcacaacagtgcgcttgtcagatagttgtattctgcaattagcgaaaacatgctttactacattcttggtggataatatgcagctattacaattgaaagcgattggggttatttgcacggtgttttcatcatacacacagcacaggagttacttggttgatgaaacacttcaccttcttcgtaagttgcagttttccaagaatgccgttagaacctaccatctagcagatgaagaccaaaagcaaatccagatgataacagcactgttagttcacttggttcagtttagtgctattgttcctgatagcttaaagggaacagttgattggaccactatcgttgatgcctctagtgatgctgattattatccaattcaatgccatgaagcggcaacagaggcttgttgtcgtttttggactgatgtccttcaacgttttactgctgctaaatctcaagatatgtcggaaaccaaagggataatagacaatcttgttcaggatttcctaacgatactaaacttgccggagtatccagctgctgcttctattcttgaggttctctgcgtgttgctgcttcagaatgctggattgaaatctaaggacattaatgctcggtgctttgctattgatcttcttggtggtattgcatcaagattaaagcgtgattctgtcgtctgtagtgaagaaaagctttggatattgcaagatttcactgataaaggcagtgacggctcaatttttttgaaaaacaagtgttgcgtttgtcttggtggaagaggcataaatatagcctgtaatgaatgtggaagatgtttccattcagattgtatgggggctggtagtcaggataacttacagcgtgatagtgtctgccccttgtgtttttgcaaacaacagctcaatgtgctacagtcgtactgccagtcacaaattaaagaaaatggcaaaaaaactgctgcctctgccagtaagaaatctgctaaaccaactgaggtgtcagcagtggaaattgttcaacaaatactactgagttatctccaagaagctggttcacaagatgatgggaacctgtttactcgatggttctatctgtgcatctggaacaaagatgaccaacattctcaggagaagatcatttactatcttgctagattaaaatccaaggagattctgcgagattctggcaatggtctggcaatttccagagattcagcaaagaaaatttgcttggcacttggtcagaagaactcattttgtaggggttttgataaaattcttgcccttcttttggctagtttgagagaaaattctcctgtaataagagcaaaagcattacgtgcggtcagctgtatagttgaagctgatcctgaggtcttgggtgacaaacgtgtccaatatgctgttgaagggagattttgtgattcagctatttctgttcgtgaagctgcccttgaacttgttgggaggcatattgcttcacatcctgatgtgggcctgaagtatatagaaaaagttgctgagcggataaaggacactggagtcagcgttcgcaagcgtgcaatcaaaattataagggatctttgtgcttcaaatccgaacacggacacaactcatgcctttgtggagataatttctcgtgttaatgatgaggagtccagtgtacaggatcttgtatgtaaaacattttatgaactatggtttgaagaaccaactgggagtcataagcacttggttgctgatggaagttcagttccaatggagatagctaaaaagactgagcaaattgttgacatgttgaggaagatgcccaatcaccaacccctgattaccatcataaaacgtaacttgactcttgatttcctccctcagtcaaccaaggctgcagggattaactcatccatggtggcatcaattcggaagcgttgtgaattgatatgcaaacgcttattagaaagaatattgcaggttgaggagggagctgctaatgagatggaaatccacacactaccttatattgttgccttgcaagcattctgtattgttgatcccacactctgcattccagtaactgatccttctaagtttgttgtgacactgcaaccataccttaatattcaggttgacaataaatcatctgcccagttgcttgaaagtattatttttgtgattgatgctgttcttccactcataaggaagccaccacaaaatgttgttgaagaacttgagaaggatctgaaacatatgatagttcgccattcgtatttgacagttgtacatgcctgtatcaagtgcctttgtgctctgagcaagtcagcaggtagaggtccaggattagtggaaaaccttgttaatattttctacaagcatctgtgtggagctaattcagatagtcagctgttgggtcgatcactgttttgtcttggactcctccttcggtatggttatcaattgatgctaacatctgaaaatcagcttgattttcccaagatcatcaacttgctccagagaaaatatcttctcaaggatgatttcagcttgaaggttcgagctttgcagactttgggatacatacttattgcgaagcctgaatttatgctacaaaaggatatgttgaatctcatagagacagcactctcttctgaggttgattatagattcaagattcaaggacttcaaaacctctacgagtatcttagagatgctgaaagccaacttactgctgagagtactgcgaaacctcctgggcagtgtgaaataaatggcagaagtgaagtgcctgttgctgctggtgctggagacaccaacatatgtggtggtattatccaattgtattggagttctattcttgaaaggtgcttggatacaaatgatcaagttcgccagagtgcacttaagattgttgaagttgtacttcgtcagggtttagtccaccctattacctgtgtacctcaccttatagcacttgaaatggacccgctggaggggaattcgaagttggctcatcatctcttgatgaatatgaatgaaaagtacccttcattttttgaaagtcgcttgggtgatggactgcaattgtcatttaaattctttgaatccatagtcagcaaccataagatgtccgcaaacataaaatcaaatccaattgcatttgtcaaacctggcatatctagaatataccgtcttatccgttcaaatcgaaattctagaaacaaatttgtccactcgatagttcggaaattcgagtctgatagccggagtcgcagcacagttagctttcttgtatactgtgctgaagttctcgcctctctgcctttcacatgctctgatgaaccactttacttgatctatgatataaatcgagctattcaccttagagctggaggagtcgagggcaatttgaaaaggtggacttctatgtctcagtctcaagagatggcgggtatgccaaccttgccaggagagagtcatgttgtcatgcaagaagagcctggcggatattatgataacatgggagatgccactgaaagggtgaatgacaatccttgcagtacttcagatgtggacattgccaaagttcagggagattgccatgatgcaatagccctccagctacttctgaaattgaagagacatttgaaagttgtttatggtttagatgatgcccgctgtcaggcattttccctgaaggagcccccgaaatctggagaaacattctccaggcagaatgtttcttttaatattggcaacactaacctcagtctgccgagctgcctgcaggacgcagcctctgtttaccaggatttcaagacagtgcttcgcgaagattccatggactttgctgtgttcgtcccttcagtccagactaggaagcgcccaaccccaagaaatacaacgagcccaaccccaagaagtatgacgagagtcaggagaacggctgccccgagtgttacaaaagcccgtggtggtgcacgtggcgacgattccgacgataccgatgacgacgactggaccgggggtccaagagtgctagacttcagtgggggcggccgcgtgacaaggcagagggtccaagtatgatgtttcttttttgcgtgcgtgcgtgtgtacattatagggaagggaaacctatagcaggcttagcagctgacacgagagagttaggggttgaattttaggtttcaggtcgtttattttagggtacatagaagcagaaaggaaaggaagatagccttttacttagatgtcattaatttggagcactccttttcttgctctgcccctgtcctgtttgtaatttccgtggggcttcggcaaaaaactgacaaaataggttgtgctccggtttctgatctctgattcaatgggaaatggaattattccttttgctttgcctgtgtaagcagttagcgcctactccgtctgttccaatatacaatttgttttagcattttatttttgtgtctatatttattcgtttggctttaatccgtatcggtttctatagatgtttttgtc

SEQ ID NO: 30567 - DNA, 4620 bp, Zea Mays
cttgccttaaattgtgcttcaacaggtggtacagctgtgtagcaggtctctgtggtgcttcggaactaaaaaatatgtgaaagatggagtaaaacttatacacacatataaagtggagtttcatttgtaaatataaacgacactgcttctatcgaaaatacatcataacagttatgtagcaatctgaatgtacatcgacttgttttatagcatataactttgtcgtatgtagcataaatgtaagttcgaaaatacataacactggccataaactgtttagattgtgaaacttataaagcatagaacgttgtcgaatgtagcatacatgtatgtgcaactatgcataacatggcgttgtttattgcataaactggtgagactgtgaagcatgactgtacaaagagatatttccagtatagaacggtgataattgtatcataaacttgagacaaaaaagcataatgtatgggcataaaacggtgataattgtatcataaatgtatgggcaacaatgcataacacgatgttgtttactgcataaactggtcacacagtgaagcttatgactgtatagcggtgataattatatcataaacttgagagaaaataagcataacacgaggttgttgacagcataaaatttaaacgacactgcacatcatataaagtggagtttcatttgtaaatataaacgacagtgcttctatctatgtaccatatataaggcaaattaaattgataaaaaatatgataaacgcataaaaaatactgaacaatgtccaaattgttcttattctttgcgtatcttgcccttgtcagctcttgtcaatgcttgaataatattcttatcaaaatatttgatgcgtggtgttccacgtttattctgaggtgcagctgaatcatgaagatgattcaaataatacagttgcaaaagcataacatgaatcgttgtgagacataacaaaacataatctaaatgtatatgaattttgcataaaaaatatggctacatataaaagacaaaaaagtgatatgcttacaagaatgatgatggaacatccgtaaattgttgtagaaacatttgtaacgctcctagtatgtcacttcttggcagtttggcataaatcattgaatattagttggtaccagtctatctcgtggaaacgatacatttcctcagttaaaagaacctcatggttagttattccccagctggcagtagggaacaacaacctattgcacagtatcaggaagaaggatctaatgcttagatcatcgtcaaaccctttccttagacgatcttacgatgtcttatgtttccgtttacgaaacagtaatccacgtgtcggtccatgggccttcgcgttgatttcgcccagcagattacgtgtatcgggcccacgaatccagcaaccaagcacgcagtttttccagctctcctcacccgtaacgctcgcggcggccgaaccctagctttatcgccgccatctgcttcttctccactgcggttgccgaaccctagagattctccccccgtcgcccgaacgtcgtcgcattcaccttctccaccgcatagagggagacgatgtcgccttgttcttcttcaccggtgagggacccagaatcgcagagaaggtggcgctgcccccttgttcttctccaccgcagagaacgagccgcatttgatccaccgcggcgccgaaccctaggcaatccacccgccgtcgcgagcaccgtctccaacgctgagtccgacccgccgtcaacttcagcgtcccctacgcattgaccaagccgcacgtcgccttgggcttctccactgcagagggtcccgaaatcggccggccttcaggcacctccacacacgggtaagtcctcaagcgccaactcttacatttgcatatttacacaatctgaatcgtaaatcggtttcacattattagtaactcaattgtttcatttatcaaaaaacaattcagcataaattcattgttaaatggatacacaaatttatactcttcaacgtctcacacgtttatgcactaaacaataccgtgttatgctattttgttgacaaaattatgatatatacgtcaacatgttatgccataaacatctcgccgtacatttagggccagtacgcacgaaatagccagcttatacattaattggatgttgcatatgagcagaatttttattgctccattacgttttttatgtatatgtgttgtttgatttggcaggaacatcatacatgaagaacgtagaccgacctccatctaatccaaagcggattataattcagtctactcaagagtgctttagtgtcgacataccccgtgttccggcgaaaactgttagacacaaaccaatgcaggctggtgatgaggacgataactttatgccattatcgaagaagcggaaggagctcaaaattacaaaggagacggtgcaacttattttggggttaccaaatgctggtggagaaacggcattaggcattgatgaagctgttgctgcaaacaatttaagggctaaacttggtttatcaaaagaagattttagtgttgcagctcttcaagatcgtttaaggaaagggtttgacgatgatctaagcagcagatccttcttcctgatactgtgcaataggttgttgttccctactgccagctggggaataactaaccatgaggttcttttaactgaggaaatgtatcgtttccacgagatagactggtaccagctaatattcaatgatttatgccaaactgccaagaagtgacatactaggagcgttacaaatgtttctacaacaatttacggatgttccatcatcattcttgtaagcatgtcactttttgtcttttatatgtagccatatttttttatgcaaaattcatatacatttagattatattttgttatgtctcacaatgattcatgttatgcttttgcagctgtattatttggatcatcttcatgattcagctacacctcagaataaacgtggaacaccacgcatcaaatattttgataggaatattattcaagcattgacaagagctgacaagggcaagatacgccaaggacaagaaccatttgtacattgttcggtatttttttatgcgtttatcatattttttttatcaatttaatttgtcttatatatggtatatggatagaagcagtgtcgtttatatttacaaatgaaactccactttatatgatgtgcagtgtcatttaaattttatgttgtcaacaatctcgtgttatgcttgttttctctcaagtttatgatataattatcaccgctgtacagtcataaacttcactgtgtgaccagtttatgcagtaaacaacgtcgtgttatgcattgttgcccatacttttataatacaattatcactgttttatgcttgttttgtctcaagtttatgatacaattatcaccgttttatactggaaacatctctttgtacagtcatgcttcacaggctgaccagtttatacaataaacaacgccatgttatgcatagttgcacatatatgtatgctacattcgacaatgttctatgctttataagtttcacaatctgaacaattcaacgctatgttttgaacatgtgttatgtatccttggatttccagctaccctttcagcattctttccttccattgaacaattcaaccatttacaattcttacgctccctatatttcttcaacgaaaatccaacctcgtatgcatattgactataaaaattatacgcctcgtccacgttactaaatgtcataccgactttaggtatcaatcttatatcaatattgtccggctgcgcacaaaaatttaacgtttacgattcaatagcgattaaatctaacgtaatataggtacaacattaaaaaaagtatgtaagaaaataatagtatcataattgggagaacttacatggctttgaagaatatgaggtgtatcctgttcatgcgccccaatatgtctcatgggaatgtgcttatctgcgccgaccacgtctaccgattttgtgtgctcatcaatatgtcaaggtgccctcaatgtcgcggggggagtaacagatacaccctctgtgtaactggtgatcgcagacgctacaggatgcatgtccattgaaatagacgtacatgttgatctatgcacagacgctacaggttgcatgtcatcgccagcgccgatgctggacattttctcgccgttaatcgccacccggtgctctcccttccgccgccgttaaccgccgccaatatcaaagatacgaacgtggacgagcggctgtaaattagaatttgtttcctcccgtaactgtgcctttatttacgcgaacgtggagcacgtctttccttatctcaaagcggtggagatttaaatgttgcatggtttatactatcatgttacacagcgttatgcagtcgtaaacggtgtgcacatggtaatatttgttcccgtgattcgtggcacaaaagattccttctatacatgatttatgcacattactacatatttttatgcgtgcgtaaaacgcctgtcacgtatcatccgggattcatggctatcatatgcatgactgacgcagcttgcgtacag

SEQ ID NO: 30568 - DNA, 2082 bp, Zea Mays
ctttctgcttctcccgtattgccgtgccctcctccctctccctgctcgctctctccctctcgtcgctttctttcctggtcgcgccgcccttcatcaggtctcctccgccttagccggtgaagagcgaccaggcccaataaataatcaccatggctcatcaaaagcgtgaaggcagctacgccgatgatgatagtacatccaagcgcatcaaaggcaccgacactgcttctgaaacgggggacagtgtagagtctagtgtttcacagcaaatggatgctgaagctaggaggacctgccaaaaggaaagcgaagcaccatcggacaaatgcgtttcagatggggaatgcgctgcaaactctaaggttttgggtgagcagaagatggtattgactgttgtcgaggctgatgcggcggacgacaagggttgcaggcacactatggaggacgcctgggtggtgctccccaatgctggtgcagaatccccaggaagcttgaggtgcgtacattttgcgatttatgacgggcatggtggtcgcttggcggcagattatgcacagaagcatttgcatcagaatgtcatcgctgcaggattaccacgtgagttgatggatattaaagctgcaaagaaggctgtaattgaaggtttccgtagaactgatgaatctttactgcaagaaagtactaagggaaattggcaagatggtgcaacagctgtatgcgtttggatcctgggacagacggttgtagttgcgaatgttggagatgctaaagcagtattggctcgttctatttcaactgagggtgaaggtgtggttgatgagaccaaaagtcaactaaaggctattgttttgacaagagaacataaagccatcttttcacaggagcgctcccgaatccagaaggctggaggttctgttggctctaatggaagattacaaggtcgtattgaagtatcaagagctttcggtgatcgccagtttaagaaggtttgctgatataagtatatttggtcgctacttaagtctgctcttttgtatctgtttatttggaaaaggtatggtgtttgattacctagttgaatatttcagcatcaataataaatggaggcattattttatgctgaaaataaagtacattttgagtgcaatgtacagaaacgattacaaagtctatttcctttggctatgcattctgttgatctagaccaaccagtgaagcgtccgatgacctttgctttgtatgctaaaaatgggggttttcctgattttgtgattgtatctactgttaagggcagtcctggtgcagtggtgagaactgtttcactgagtcaccaggtcgcggattcgaagcagcttttctgcacttgtggaaggcttgcctctgtttatccttttccagaccccactcatgtgcgagcctctcacactgggtctgccccctttatctactattaagaaataatataactgctgcttgaaacctttatagtcgataatgaggaactttgttagcttagttgtgttagaaagtaaacggcgacacgtagtgtccatgacgtgcgtctgtgtaccgcgctgtggtggtgtcgtgtgcatgtctgcatgcaagtgagctagctcgggctgattggtgttgggttagaaagagtccaggttgattggtgctagtcaagaaagagtccaggctgatttggagtggtttgcatggcgctgattcacatggtggaagccacatcgtccagatgaggaagtgggtcacggtgattgctgcacgagtcccgtggatcatggcacgaaggccggcatggaggcaagctccaagtctataagtagcgttgtacttctccatggtttctttgccaagtgcagtgagtaaaggagccaagataaaggtgagtttgacatcgtggcgttcatcaacggaaaacagtgtgcctgttgtgcttctgtctcttgccaagtgtgttggcgtgtctgtgttcaagtggttcctggacgaagccatcatttggtatgagagccgaagatgacgactttgttgaagaactcaggatcccgtgatctctgttcttaaggcgtcgcc

SEQ ID NO: 30569 - DNA, 857 bp, Zea Mays
gttgtccctgttcgtccctccaaattagacggataatatcgtcctccgcgggacaaggcacctcacgagcccttctcgtcctcagatctagcgccgcctccttcaccctgctgctggccgcctggccggcgagctcctcagcgtgcaagatcaggaagaagacaaaaaacgttatagtgaagaggaggggttgattgctgcattcaaaagtgtcggggataccttatccaatgctactgagaaggttgccacaggggacactgatgtgccagatgatctttttatagtttgataaacctttcaggttttgagcagacccacatatctctgtatttcaattatctggtggcgcaccctcacattgctagagccttcaacaagttgtcattcgaccacaagttaatctgggctcgcaatttcgtcagtgaaaagttcctaggagtgtgagggcagttggtaggtaggcttggagggttcttttgcttgaaccacattgaacaatgaactgcgatctatgtgtaaccaggagtgtgagggcagttagtagataggcttggacggttcttttgcttgaactacatcaaacaatgaaatgtcgtctaagtatgtcagcggattttgcttgaacatgcagattttgtggaagccttaaacttgatattatgtgtaatgctaggacacattattatgtattgtgtggaattaataatatgtgtgttttgtagacttaatattagttgtaacatatcatgagatgggggcaatggctgcaaacattttttatgctctgttctcgaaccaaacagaggacaggaccaatccatccccagttataccgctaaccaaacaaaaaacaa

SEQ ID NO: 30570 - DNA, 744 bp, Zea Mays
caaaacctcttttgcctcattgcaggggatgtttcgaagcacaaggttgagcatgccgtaagtcgtacctccacaacctttgtatctctggtttctcacctattctggcttcacaccttcctttttcacttggatgcatcttatatatcatggtcaactgtccagtcacctaggcattgccagttaggtgattctgcttctacagctcgcagttcctaaatgtggattccaaaaacgcatgccattacttacgaatactgcggatctgtagttgtagtcccaatcagtgagcagcttctggtttacacatcaaactgatacactttctcaatacgtatgcagctgaggaagatgtgcaaggagggcgcatattggggcactgttgctggagtttatgtgggcatggtgtacggcgtggaaagggtccgtggccgcagtgactggaagaacgcgatgatcgggggcgccttgtccggcgccctgatctccggcgccagcaacagcgacagaggcaaggtcgtcaaggacgccatcaccgccggcgcggtcgccacagccgtcgagttcatcaactgcattacctagccgagcaaggagcaactgcatttgcagtgccattgtcgtgcaaaatatgaataaagtacttgccatgtccagctcataaaccactccacaccttcagtcttcgtttctgaccggcggttttgctttgtgtgaatgccctgtgagtgagagcaagaattc

SEQ ID NO: 30571 - DNA, 995 bp, Zea Mays
acctaacccttcggccttcgttgcggacccgccactcacttcttctctcgaccgcatcttttctccgcgccgccgctcgcctgcacttctacgtgtgaaccgcgtccgcgcctatggcctgcccgtgcccagctgccccctctccacacgagcctctctaggcgtcaagcgtgccattaagcaaccgtggcccccacccctcctcggctctctgcgtgagcacaagcacgtctctgtagcccatgttcaacggaagcgaaagcccattaattccactgaagaaaacatagaatgtgcatcataatgtcacagaaggcctaaaatgttgtagtgtgcggccattgctcacgaggaggcagagtgccgtgttgccgagtgccgctggaccacatacgattgttgatggtaaagaagttgtgaactttgcatcagcaaactacctcggtttaattggcaacgaaaagattattgattcttgcatcagttcattggagaaatatggtgttggttcttgtggtccacgtggcttttatggaacaattgatgtccatcttgactgtgagtcaaagatagctaaatttttggggactccagactccattctttattcatatgggatttctacaatattcagtgtgatacctgccttctgtaagaaagaagatatcatagtcgcttaactgtacatgggtagtttgatgtgattgcggtgacgagggtgttgactgtttggtgaaatgcttgggacaaagtggccaacaagaatggagtcatggaacatcgacaggaggggtgcggcagcagcaaccgatgtatcccttggacaatctggttttgacaagatgcaaatcaatccgctgtacactgtattccgcacttgcacagattgtttggttaattacaagattatctcagtgttttgattggtacacttatgtatgaaatattgattggtactcatctatattatatgaattatattattattaaatata

SEQ ID NO: 30572 - DNA, 521 bp, Zea Mays
  misc_feature (1)..(2): n is a, c, g, or t
nngtttgctaggcgtctgattctgcattgttagctgaattagaaaacctggacatgaaagaagaaattgaaggacgagagcacagcgggagcgaggacaagttctcagtgatcttgtcaagcgacgacagcgctgctgctgcaggctttgctgtggcctgtgggcattggcatccgcgagcttctccacgagcgtcggcgtctccagagcagctcgcctctcgtccgcgcggcatccatcactcaccctacggcggcaatgttgatcgaccccagtcagctttgcttttccagtggcagtacgtatatggtcattatgaagctagctactggtcatcacagtgtggttagcggctgctattactgctattactgctattgctctgtctctgttctctaataacgatggtcctttttggtcccactcgcacatgggcatgtgagcctgtattgacccccacagacctgactgacacctgctaccggctcgtatttgtatttttccgcgtatatggacaggag

SEQ ID NO: 30573 - DNA, 277 bp, Zea Mays
gtggaagtcttacaaaataaaagataaatatagatcgaactaaagtccatccttggcaccacaaagtcaactgggagacgccacctagatggaatcgaacacctcgctatgtggctcctcttgaaccacctgttcttctcctgtggggggtgtgagacagcaagggtgagctcacacatgttcatcactcaacaagttgtggggaataatgtgacatgaactcaccaaaggtcggagttcatgtgatgtgtaaagctgatcaacagtaggggttaaa

SEQ ID NO: 30574 - DNA, 2104 bp, Zea Mays
atggcgggaactccccagtttcagtccccgcacttcccgcctccctctccccctctcggtcccaccttcgtccctccggcgatgaactcaggcggacgcggcggcaagcggcggggtcccccgcccctcgctccctccggtgcggcggcgaagagggtcaatcccagccccggcacgccgcatgtgcctcctcccgcgtcggcggcggccgccgtggaggaggacatgatggacgaggacgtgttcctggatgagtccatcctggcggaggacgaggcggcgctgctgatgctccagcgcgacgaggcactcgcgtcccgcctcgcgcggtggaagcgccccgcaatacccaccgacctcgccgccggatgctcccgcactgtcgcttttcagcagttggaaatagattatgttattggtgagagccacaaagaattactccccagctcatctggttcagcagccatactcaggatttttggtgtcaccagagaaggccacagcttatgctgtcaggtgcatggatttgagccatatttctatattggctgtccttcagggatgggtcctgatgatatatcacgctttcatcaaacactagaggggaggatgaaggagtcaaatagaagcagcaatgttccaaggttcgtgaagagagttgagcttgtgcagaagcagacaattatgcattaccaaacacaacaatctcaacctttcctcaagatagtagtcgctctgcctaccatggttgctagctgtcgtggtatcctggaaaggggcataacaattgaaggccttggttcaaagagttttctgacatatgaaagcaacattctttttgcccttcgtttcatgattgattgcaatattgttggtggcaactggattgagcttcctgctgggaaatacaggaaagcagcctgtatcatgtcctattttatgtctattcttaacacaactaacagatactcagatctggtaagccatgcggctgaaggagaatattctaagatggccccgtttcgcatattaagttttgatattgaatgtgctggtcgcaaaggtcatttcccagaaccaactcatgatcctgttattcagatagctaatttggttacacatcaaggagaagaccaaccttttgtacggaatgtcatgactcttaaatcctgctctcccattgtgggagtcgaggttatgtcatttgatgcagagagagatattctacttgcatggagggatttcatacgtgaagtggatcctgatatcataattggatacaacatttgcaaatttgacatgccctatcttattgagagggctgaggttctcaagatagcggagtttccaatacttggccgaatcagaaatagtcgtgttcgtgtccgtgatacgaccttttcctcgagaaagaagatgttcatcattcaattatatctgatcttcaaaatggaaacccagagacacgaaggcgacttgcagtttattgcttgaaggatgcttatcttcctcaaagactgttagataaattgatgtatatctataattatgtggaaatggcgagggtcactggtgttcccatttcgtttctactttcgaggggacaaagtattaaggtcctctcgcaactactcaggaaagcaaaacagaaaaaccttgttataccaaatataaagggtcaagggtctgggcaagatacctttgaaggtgcaactgttttggaggcaagggctggattttatgagaagcccatcgcaactttggactttgcttctttgtatccatccatcatgatggcatataacctttgctactgtactttggaggcccgtaaactcaacttacctccagaattcgtcaataaaaccccatctggtgaaatatttgtaaaaccagaactacagaagggtatacttcctgagatccttgaagaactattagcagctcggaaaagggcaaaagcagatttaaaggaagcgaaggacccactcgaaagggctgttcttgatggtcgtcaacttgcactgaaaataagtgcaaactcagtttatggtttcactggagcaactgttgctattttgatgtcaagattcttgcactgaag

SEQ ID NO: 30575 - DNA, 2092 bp, Zea Mays
aaattaatttttccgattagtccacaagtcaatggctaatttgtcttcttccattcttcttctcctttccttcactctctggcttcccgatctcttctctctctctctcgtctctcacatctccagcccttcgccctcttctcggcccgacctcgacggtgttccaccatctcctaccctcttcttttcccgcccgcgccatccctttctccgctgtagccactgcaagccccgcgcgacgcacacggcagtggtccacgtcgaccaaatcgtccacagcatcgcgttctcctcggcgagggtctgtagcctgccggcgaggagctcgcagcgaagatccgtgcaagccaccctccagatcgtcacaggttctcctcttactcctctatctcttacgtcgcatggggggctcggcgggtcgtggctgtgcggtgggcgaattcgccgccccgattcgccgccggagatgtcctcgcgccacaaccaactgccgggtaggcgaggggatgcgtccctccatttgagataccatttgtggtagatgaggctataggtgaggggatgcacccccttcatttgtgggagagggagctgattttgagtatttatttacctaagtagtagaaaatttagattttgggtattgagttaaataagttgaatgattaatctgttggagccctctcggttacctgctgtttttttcggtattgggggttgatttgaataatctgttggagatgcactatttgtgttcggatctgactatatgcatgataacttcaaagtttatgaaaaatattgggtttatatgtggacatccatgtcctattccgacactaggattgagaaatgagaagttggtccttgcttctgatctggcaggggaactttccctttcctcaaaattataatgcttaggctttgctgccttgtttattgttgatcacaaaagttgtttcttaaacatatccattgccatacatggtttcgttcattggttgtggtaaagacactacaggggtttagcccttgtcattgccagagtgcacagtgtagatctgttatttccttgaattagcctaacatgttattttgtagtaatacatgcttcttggtcatataaatctgaacactgaagaataatgtcgataagaagatttaacccttgtcattactatttaccaacatgtacgtactgtatatgcttatgtgcatgctgtttccttcatatttggttcacagttgcataaagtgttgtgttacacgtgcttttgggttgtgcaaatttgatccctgaacataaatcttagtgattgccaatcaaattttgcaacctgcacagctatgaatgactgcgacaaccaccattttcgccacaattcagcggatgcattgggttgttgggcattgatgattctatgcaggctatgcagcatgtagcagccagacaacaaccatgagtctcgcttgtcttgtatgccatggcatgagcagcccctcgcactctcttagaagctactcggtgtcaagctcagaggaggaaagccggtgtggagctgttgttgcctgcttagctcgaagagtaacaccagctggaacctctactagcgttgggacatcgaaagtgaccccctttccacccgtggtgagtgatcaagttggtacagagggcgctcctcgacttcaacgcagccgtgctgtgtccagggaccttgttagagactggaacttcgacgaagtaatcgtcgcaaattagagtagccctcaacagtcgtcagctggactctgtgctctacttatcaggcaggagattccttcattcgatgtaaaattttcatagtagacgtctggaagtccatgccaatacttgatgaggaaatgctcgagagggatggtacctttcaggagcaatatttggactgttgcagttatatgtggtcacgtacctgtgtaggtaggataaatgttttgagtgtgttttcctaattttcagacgtgtataagttgtcatgtacctttatgtatattatgaatgaatccaacttcagatctcgatctaatattcaaacggaagtaatattttggtgta

SEQ ID NO: 30576 - DNA, 1558 bp, Zea Mays
agtatctgaagttctctgtgagatacgctcgagttcaacaacagatacgagcatagagtttccctatcacaagttaagacattaggatgctcaaaactagacataaaacattgaattgaaatctctaattttagtaaagaaatagttaccactctatcaaggattggagcagcctcaatttgggacccgtgccgagcagctatgtcgaaagctgtgtcttcgtcgtctgacgattcttgctcggcgtagtctgctgctgtccactgtcccttcagcttgcacctagtcacacccgaataccaaatcaaatacctccggaagttgtagtttgtgtgcgcctggtcattctcatagttcagatccccctgctggtcccattcatcaatgtaatcacgatggtgcgtctcgaagtccgtgaccttcttctgtctctgtctgtcgaacctgcaaaagttagaaccatatattagcgactaactgatatttcaattattagttagaataacaagtgcatgtagtaactcacttatgaagttgtattgaagtcgagaatggctccaccggaaactcctggcgcaatccgaactgtcgagcaactctgtgggggcaagtggtactcaacagcataaaaacatatgaggggacacctcatgaggtagaggttctcgtctattgagcacatgctgctcaactgtatgctggcgaaatatggatcaagatacggttgccaagtcacctgcaaaagttttagaaagcccatgtaagcacgctggtgtcgtgtgataaaagtagaaaggacatgtaaaaagaaaaaaggagacaactgaccatcgaaggagtaagtgcgtcgagctcgtttgagtactccacgtaagcacgctggtgtcgtgtgaatggctcctcgacctggtcccagcggtaagcagccgtgggcttaagccgatgtccggctaccacgaaccactcacgaggaggaaactctctgggtcgcccgactggtatgtgtgcccacatccacagctgtagtaggtagacacatccacctaagctggccgtcctcgacgaacgacgacaagcctcgcaaagttgcctgtacaggaaggccaacactgctgaagcccagctgtaacctccggtcgtatcccagtcagtcaggcagggcagaaacatccatgacgcgctgtcgcctgttgagtctggaaaaagaactgaaccaaagagatggagaatccaagctcgacaatggtatccaaccgtctgctcatctgcaccaggtggacactgcccaaagctctgcctaagccaggtcagtgggactccggtgttgtggctacctcgtagctcatccggaagcagtctcccaagaaaggcctccaccctctgcctccaaccgcctggtgatgcctaaccggtcactggacgacccataatgctgagaccaagaatcttctggcaatcttcaagcgtcacagtcatctcaccgcagggaaggtggaaagtgtgagtctctggccgccacctattggaagacaaaagaatacaaaaatcattagtatgc

SEQ ID NO: 30577 - DNA, 357 bp, Zea Mays
taggataaaggcggagggaattggcaagagccagatctgaagccaatatatagaagatttgtcattaatccttagcctaatccttatcatatttcgcttatatttaactgcttgtatatattgtaggctaaagcagctgccaagaaagccaaagctatgaagaaatcttaaaggctaccaggaagcgaagcaccttcagctccgtgaacaaaaacttctgctaatattgtaacagaaccttttaattgcagttctaacatgagtctgtaattaaacatttgatgaaacaatgaccaaatgttgttgaatgtgtaaatattaatatgacttgtgtgagcaatacttttgccactatta

SEQ ID NO: 30578 - DNA, 843 bp, Zea Mays
acccaacagaaacgcgcagctttcctaacgcgcgcagagccgccttctcaacctcctcccggacggcacgctctccgcagcttcctcgccatctcatccacccataccgcgtgcagcttcttcaacctctccctccctccgatatctcgtctcccatcctacggcggagccctcggggacaaccacgagtgcctaagatcccgtcctctgcgttgaccatcgagggatcgccatggcgttgagggcgtcccccgtgtcgcatcgcatggcgccgaccgccgagggccgaggcagcgccactgccgctgttcgcgcggaggaggatggcccgtggggtgtaagtggccatggcgtccaccaccatcaacaggtgagcacagtggatccctcgcctctcgctgtcttcctgacctacagttcgaggcaagtcgcggcgccgtcgaccccttcgcgggtgccagagttactggacttggattatgcctcagcagttagcagttattcagtgtgtgatcgtgcaaggatctgctgacagaaagcagttggcgatggagcaactgctgtaagagagaagtgatcaggatccatatggccggccttggattgtccagccgtcttccatgtcgccccgcacaccatctttagattgttttgccagtgctggtgcgcagggagccgtaactgcaggtcatttcggaagatgccattctttggacattgaaaagaagcatgttaatttgatagatgagtagtcacaaaagctaatatccagtgggtagtttgatggaaaggaactagacagggcatctgagttgggccaggaagctgaaatgtcttttactg

SEQ ID NO: 30579 - DNA, 1200 bp, Zea Mays
gaccacgcccccggtcgtgcatcatcatcatcgctcgcgtcttcgagttcgaggacatggagaggccgcgttgctactctccgcttgccctgcacctcctcctctgcctcttctcgctccgcgcctgttccgccgcgtccatcacagccggcacccccgacgagtcggagctgtgggggtacgtcgaggtccggccaaaggcgcacctgttctggtggtactacaagagcccgcagaagacgtcgacgccgtccaagccatggcccacggtcctctggctgcagggcggcccgggcgcgtccggggtcgggctcggcaacttcctggagatggggccgctggacgtggacctgaagccgcgcaactcgacgtggctccacaaggccgacctcatctttgtggacaacccggtcggcacagggtacagctacgtggaggacgacagcctgttcgtgaccagcgactggcagcaggccgcggacatgacgacggtggtcagggcgctggcgaaggaggtgcccaccctggcgagcagcccgctgttcctggtcgccgagtcctacggcggcaagtacgccgccacgctcggcgcgtccattgccagggccgtccgcgctggcgagctcaacgtcacgctcggaggtgtggcggttggagatagctggatctcgccggaggatttcacgctttcctacacaccgctgcttctgagcgtgtcgaggctggacgacaacgccggcgacgaagcaaacaagaaggcggagacggtgaaggagcaaatcgtggcggggcagtgggccgcctcgcagaagtcatggggcagcctgctagatttcatcgacacaaagagcggcaacgtcgacgtttacaatttcatgctcgactccggcatggacccggtggcactgcccgtgggttcttcatcactgatgagcagcttgcaggcgatgaagtactcgacgtacggccaggactcccagcctggctccaacaccattgacggcatcatgaatggggtcatcaagcaaaagctcaagataatccccaagaacttcacgtggggggagcaatccgactcggtctacaacgcgctggtcaacgatttcatgaaaccgaagatcgatgagattgatgagctgctgtcttatggcattaatgtgacggtgtacaatggccaggatttcaacgatgcatctggat

SEQ ID NO: 30580 - DNA, 1497 bp, Zea Mays
tatgttttcccatataaaaaccacctcatgaggcactccttatcaacctgagaaggccaaaagggtatcaaaagacttaaggtcagacaagagggtgtttgagtttgtcaacaggaagcattccaacacaagttcaggctttgggaacagagtaaagaggccactggaaaacacaggccacaaagcagcagatgtatcaccaacatcagggtccgagtgagctcttcaccacgaggacatcctttccaatggagcagcatccgtttttgcgtggaggaaatgcccaaggagattctgggctggttctctcaactgacgctaaaccaaggctgaaatggacacctgagttacatcagcgatttgtagatgcagtcaatcaattaggtggagaagagaaagctactccaaaaacagtcatgaggctcatgggaattccaggactcaccttgtaccatttgaaaagccatctccagaaatacaggctcagcaagaacctccaagctcaagcaaatgccagtacatcgaagaatggactattcaaattggtgaagcactgcagatgcaaatccaggttcaaagacagttaaatgaacaacttgaggtgcaaaggcatctacaactacgaattgaagcccaagggaaatatcttcaggcagttttggagcaggcacaagagacacttggaaaacagaatttgggccctgcaaacctggaagatgcaaaaataaaaatatcagagttagtttcacaagtatcaaatgaatgcttcagtaatgcaattacagatgtaaaagaaagttcaagtgtgcatagattagagcccatacaaattgagtttgttgaaagttcaacaaatagttatttgtctgttgctgaaggattcatcaaggagcacaaactacagcaccatggagtactaaaagcatatgatgatagttcattattttgcagaaaaagatctcatgaacatgagacacagtttgccctcaacagaagcctaagcgaacataggatggctcatttgcagaatgaggaaggataccataaagcagagtttgggtatgaaagtgacacagagatggcgcatgagtatactgcacctcaaaagaatggtagatgtagtaccaccagttcggcatccggaagcaaagtagatgcagagaagctatatctggaagaacaaaagtgtgcaagacaggcagttgaataccccagagaaagcaagctagtagattttgagcatccgtgttcagtgaacaaacttgatctgaacacccacaatgtcgatgacacaaatcaagcttacagacattttgacctgaatggcttcagctggggctgataatatgtaagatgatagaagtgaagaaatgaagttacaaataatttcttccaacattgatttcaccattgaagtatggatacatgatcaaatgtacgtcaagaggtatcacttatgtttttagtatagagtacagaaatggtattcactctggg

SEQ ID NO: 30581 - DNA, 1376 bp, Zea Mays
ttttcttccctcgtccccgcgtgtgcctttatccctacagcaacgacttggggcgaccaacgccacaactccacaaggtccgcatacccctttcccccgcgccctttatccctgcagcaacgacttggggtgacgagcaccacaagtattcgtgctgctttggtctttgcgtcctggagcattaatttcccttctgatttgggtagaggatgatgcttctcgccaagctcggggcgccgagcgttccagggaagcgtcgagttgaagaagatgctataagttgcagaatagaaacataccatggttgtgtcatggacagaaggaaactgctgttggtccctgcgattagtatggccattgcctcctttcagtacacttttgtcaagggaatagcaaaagctgaatttgctgatatgcctgcacttcgcggtaaagattatggaaagacaaaaatgcggtatccagattacactgaaacggaatcaggcctccagtacaaggacttgcgggttggtgatggcccttctccaaaaaaaggggagactgttgttgttgattgggatggctatacaattgggtactatggtcgtatctttgaagctcgaaacaagaccaaaggaggttcatttgagggtggtgacaaagacttcttcaagttcaaagttggatcaggacaggtcataccagcttttgaggaggctatatcaggcatggccccaggaggtgttaggaggatcattgtaccaccggatcttggatacccagataatgactacaacaagttgggtccaaaaccaacgacattctcgggacaaagagctcttgattttgttctacgtaatcaaggcttaatagataaaactctcctgtttgacatcgagcttctcaagataattccaaatcagtagtgtgagattctaatgattacctttgaagaaaaaagctcatgttattcaggtccgtcgaagatcagcagtaaatatgccattgtgtgcatctgcggtttctacagaagctctattagatacgtctgtgatcatacctcgactgctgagcaaatagagaatgaccaaatggcgaattgttgaaatgaaggcattctagttggaaatgttgtaaataccccaaatattgcctgtctgtcgtaatagttcatttgggacgtctggggggtgcatggtttcttttggtgattggtcgccccagacaaatcagaactctctactttaccagaaggtaccatccaaacaggatttcaatccagttttagtgaatgttcaatatgttttagtaaataatgtaaaaacggctttttattgctccaaatatgtaattcaggtttctaattttaaatcccatttaagaaatattttgcg

SEQ ID NO: 30582 - DNA, 1452 bp, Zea Mays
ttgaaagtctggtccctggtgaggcggttcgaccagccacagctcttcaagcccttcgtgagccggtgtgagatgaaggggaacatcgagatcggtagcgtcagggaggtcaacgtcaagtccgggctgccggccacaagaagcacggagaggctcgagctgttagacgacgacgagcgcattctcagcgtcaggttcgttggaggcgatcacaggctgcaggtatgctctgttcttcatctatctatattctgtgctgcccatgcgagatattttgcccaccacctcaaatgcgtcctggagttcctctgccagatgcatcttgatgtgctgccctgcgacgatgccatcctcgagtgatagccccccaacaaactcttgtcgtctatctaaccagaaaacaagcagcggttgttgttgttgttatgtaccgggtgatgtttgcatgctctcaactccaagcatggcactgacttgccatcctttgaccttacatgccaagttcatcgcatgagcacctgtcactcgctgtcgcttgtcgtgctccgtccgtttgccctcactcgtcatcagccagcgatagcaacaagtggcccatggtcacaactcacatgcgttgcacctggataatggacgatggacgccacctggatataagtttatccggccctgacccccttgggttggttgcaagaacgccagcgtgtgtgaaagctgacgactagtctaattcatcgatctgctgcatctcaccttccttttcctttgcccgcagaactactcctccatcctcaccgtccacccggaggtcatcgacggccggccagggacgctcgtcatcgagtccttcgtcgtcgacgtccccgacggcaacaccaaggacgagacctgctacttcgtggaggcgctgctcaagtgcaacctccggtcactcgcggaggtgtccgagggccaggtcatcatggaccagacggagccccttgaccggtgaataatgagtcggaccattatattgcattgcattctgtgtacgcgtagacctgttctccaatgcatggagcccctaggttcttggaaaactgctatgccgcgttcaaagtcaagttctttttccccctccttgcgattgtgtttttctgttcttctccggcgttgtatgtcgcggagggagaagtgcagagtatgatgtgcttgatgaaaattgaaagaaaaaaaaaagaatttagaactgtgaggccctgggacatcttcattctcagatcaatatgtggacttgagggtttaatttctctgtaattagattgctccatcttgattcctttctttcctccgtgtgtgtatgtgtgtgttttgtaaatacatgtcccaagtgtgtacttagggtacgtttagttggattgacaggacgggacgagatgagacgatctctcaaataaggttgtttggttcagg

SEQ ID NO: 30583 - DNA, 1986 bp, Zea Mays
aactaacctctcctagggtttacgagcattgtggctcctcacttccgcgccgccacccccttcaggtaaggaagaggaggagggcaggatgtcgcaccgtaagttcgagcacccgaggcacggctccctcggcttccttcccaggaagcgctcctcccgccaccgcggcaaggtgaagtcattccccagggatgaccccaagaagccttgccatctcactgccttccttggctacaaggctggcatgactcacattgtccgtgaggttgagaagccaggatccagtatgtccacccccttcttttttattaatcaattaagttgatcacatagtccagttttttgatatctgaaaaatgaactgtaacaacacaactatttcttcacaggtttctgaccagcagtttttagttttttatgaatttgtgggcacttaactttagatgataagccacacaactatttcttcacaggcccatagacttactcaaaacaacagttttttctgtttgaatatccacaactgcttgcacccatgaatctcaagtacatggataccatttcactccattattgtaactgctcttcctacttgatttcttcagaactccataagaaggaaacttgtgaggctgttaccatcattgaaacccctcctcttgtcattgttgggctcgtggcatatgtgaagactcctcgtggcctccgcacactcaactctgtttgggcccaacatcttagcgaagaagtgaggagaaggttctacaagaactggtgcaagagcaagaagaaggctttcacaaagtatgctctcaaatatgaaaatgatgctggcaagaaggaaattcagctgcagcttgagaagatgaagaaatatgcttctgttatccgtgtcattgctcatacccagattaggaagatgaagggtttgaaacagaagaaggctcacctgatggagattcaggtcaatggtggtaccattgctgacaaggtggactacggctacaaattttttgagaaagaggtccctgttgatgctgtcttccagaaggatgagatgattgacatcattggtgtgaccaaaggtaaaggttatgagggcgtggtcactcgttggggtgtcacccgccttccccgcaaaacccacaggggtctccgcaaggttgcttgtatcggtgcatggcatcctgctagggtctcctatacagttgcccgtgctggtcagaacgggtaccaccaccgcaccgagatgaacaagaaagtttacaagatcggcaaggctggacaagagacccacgatgcctccacagagtttgacaggaccgagaaggacatcactcccatgggtggcttcccccactatggtatcgtgaagggtgactacctgatgatcaagggatgctgtgtgggtccaaagaagagggtggtgaccctccgccagtccctcctgaagcagacttcccggctggcgctggaggagatcaagctcaagttcatcgacacatcgtccaaatttgggcatggtcgcttccagactaccgatgagaagcagaggttctttggtaagctcaaggcgtaaggtgctgcggtgcagcgacaagtcccatttgtcaaaatcatcaaactgtgaaacttttgtttgttaccttgctgtaccaagttttgtagcaggatgatttgggagcatgttctggtcttctgtggattgttctacgcttcagaactgcagcgacattgcaagtgttttggtgtttgatcatcaacgtaactatttatattaattatgtttgctagtgtttaagaatatagtttagacggtgcaacgtggatttggatgaagacatcgtggtgatcaagaaattcatcttaaagtagtacagtagaagatttattgaagacttacgtagatcatgtaagagttcacacaagaagaaacacgaaattttttgagttaaaatacttctcgttggatttcggcaaaaaata

SEQ ID NO: 30584 - DNA, 1061 bp, Zea Mays
gcaccggcctccaagaccaagacatataccggccggcaggtcggtcggctgctagctgcagcttcctccagatttcttcctcgatatggtggacaagaagccgcaaccagcagagaaccagcgggaaccaccaccagatcatgcaggtagcaaagagaccaacaagcaggacgtggctgcttggaagccgaaagcgagtcccaagcatgagggcaacaagcctccggccacagacgtacctcctcaaaaacagccgccgtatgggtaccctcacccgggttggggcggtggtgagggtggctactatggcggcggcggcggcggctatcctccaccgccataccaagcaggcggctatcacggcgggggcggctatggcggggcgcacatggggtggccagcgccagcacctcccgccggtgcttatgctggctatggagcataccacggcggatacggcggcggccatggcggtgctggtagttacgcgggcaacggcaagtacacgctccgaaacgagggcaagtttaagcactacgctcacctccatggcaaattctaactacaagcatatatatataccatgacgcagtacgtacacgcccggcctgatgcatatatgcatgcatggatggctaatacgtgcatacgtgcctactgattaaataaagtttgttacgctgcacatctgcatgcatggtgcagtacgtacacccttagctagtgtgatatgcatgtttaccagctacctactgtactcctcaattagcagcgtgatatataattatataccccttcttcatatcctagctagctacgaagacctagctctatcttgcaagatgcatgtaagcaagtatgtatgtaattatgtactctcgtcctcgttcttttttatttgtcgcgttttagtttaaaaataaactagcggacgacaaatattcaagaatggaggaagtatatatacgtatgtaaaccaatctctagcgttctgctcgtaataagatacccatcttttttatgtatcaatcgctgaataataattatactgatgctgactg

SEQ ID NO: 30585 - DNA, 1696 bp, Zea Mays
ctgcctccggcaacccgccccgcccgcggccgcatccctcccgcatcccgcggccgcaccatcaacggcgcaacagccgcatccagtccctcccgcatcaacagcgtcgcagccagtccctcccgattcgcgcttaatccccgcatccagtccctcccgcatccagtccctcccgcggtgcaatccagacgcaaacaactccattgaccccgattcgcgtacatgctctctcacagcaatccctgctctctcctcgccaacgcctctcgataaactccatggaagcttgtaggtactgatcagagggccaggtgctatccacgaatgatagtgtaatgtctaggaacgatagctgatttggaaaacctgcaaagtctattcacaacagcgaggtcatattttcatattgattttctgtacctgggactttggagaggggaacacgttccaaaaccggagcgtttcatcaccagccccagtaactatggtctgttggtatgacctcgctgaggttgttgccctcaccgagagcatcggcaagccgctcgccgaggtgctcaaggagctcgggaagagggttccagactcccttgtgaagacccgcatcgaggatgatggcttcactatcaaattttatttcgcttgtgggcaagtgaaatcatatgagagggcaataatctccgtggagcaactgaatgctattcttagacaggcttctaaaaccaaggaaaaggaagatctcaggaagatagataactggcaatatattagttgtgtcaccctatgggttcggtttctgtgttgtcactataaggattacaatctccatcccttattttctcaagttcttcaattgctctttgactgcctagaattaagagaagtttctcagaaagaacaaacacaaagaacaaagatcaacttttcgtctttgttgaaggtgccaaagaacctgctgaaaccaagggattttcaagaggagtgtattctttcagcgattcagattctatcagcacattttgcccagtggagttaccatgtttccttcctagaagtagccaccattcctcttgtcctcttgaagaggctacatgagcagacaacagttgaatcacttcgccatcctattaagtgtttgatagaccaggtgacggagaacaaggattttatagaaaggaaaagagaggttgtatccttttcaccaaatgataaggcgtcagttgatagcttccttcagtcaattgcttcacatttactattcaacatctggcctgctgagtttgctgaaaaacatattactgttgaatgcaggaggagaagtccacacagaatgtcggacagggacgccgtggcccccgcgggcggcggtgaccggaaggcggccaagctcgggagctggagcagcatgagcagcaactacggcaacaagaagcggaagagcagcagcagcagcttcgggaggagatccacatccacctgcgaggaaaggcagggggtcttccgcatgctcatgagctggaaccaggagagccggttcagcaacaagatcaagacgacgacgagcaaagaaagatgaacgaaacgaagtgttcttagcttggtgtgattattcggggggttgcttgctggagggtttttgttcgtttagtgtctagccttagcttacttattacttttgttagtactctactagcag

SEQ ID NO: 30586 - DNA, 300 bp, Zea Mays
taacggcccgccaaccctggaatcggttcagccagaggtagggtccagcggccgaaagagcaccgcacatcgcgcggtgtccggtgcgcccccggcggcccttgaaaatctggaggaccgaataccatccacgcccggtcgtactcataaccgcatcaggtctccaaggtgaacagcctctggccaatggaacaatgtaggcaagggaagccggcaaaacggatccgtaacttcgggaaaaggattggctctgagggttgggctcgggggtcccggccccgaacccgtcggctgttggcg

SEQ ID NO: 30587 - DNA, 946 bp, Zea Mays
atcggccaaccgattgccactgactccggccatcggcgattgtccctcggtttttctttaacgatttccgatttgattccatggccggctggaccgattccagcgcatccctcctcctcgtgatgcccgctccccaaggacctgtgcctgcggcagcgggaggagatcaggacgctcaaatacgtcatcctattcctgcacgtggagccggagccagagctcgaccgccgcctttgggacgatatttccatgctcaccgaccagatccagtgcctcacgcaggagctcgccgctcaggttaaggccgagaagcactcagcaaggtcgtgctttgacgaggatggatactgatcttcccctaggacgtcggggtttaacgaggataccgctttctctctggtgtgttcgattactccaccatctcactctcacagcgaaacgattggcatgtcgatacgctgtttccaaaacaattgggccctgtgtacctctccgccattctcgagtatctcaccgccgaggtgttggagctggctgggaacgctgctcgtgacaacaagaaccgtatcgtgttgtgccacatctagctggcggtgcggaacgacgaggagctgagggttcgaaggaagtagcagtgttttttgttcctagagggaggaagagatggcaaagggggaggtgccggcgatcgggattgacctgggaacaatgtactcgtgtgtcggcgtgtggcagcacaaccgcgtcaagatcatcaccaacgaccaggggaaccacaccacgccgtcctacgtcgccttcaccgacaccgagcggctcatcggcgatgccgccaagaaccaggtcgccatgaaccccaccaacaccgtatttggtaattccagtggcatagcttcgatgctatgtatgactttctgaagaaaaactgggagatcacaagatgggt

SEQ ID NO: 30588 - DNA, 306 bp, Zea Mays
ctattgcaaaaaaaaacaatatttttcctccaatgcaagtagatacaagttttatagttgtgtaagtggacttacatcgtcagtagcagcagcttgtagtgctaaaagtttcacagtagtgctgtgataatcagtcaataccttgtaggttgcagctggcagcttatcctacgaaatggcaaagagtggtacaatcacacagaaattttctttcgtcaaaatttactagtatgagaaatacaacatcacataagttcagacatccagaatctattaaaaagcttaaccagccgatcactgcaaaga

SEQ ID NO: 30589 - DNA, 1432 bp, Zea Mays
cccatatcagctccggagtggagagtgctgcagcctacgccactgcccactggactcgccttccccttccgcctcggctccccatctgctctccgatttctcgatatacacaccgaaattcgaatcgcccgcctgccgagccctcgcccccacaacgccgatgccttccaagcggcctaccccgcacgccatggacgaagccgcctccgcctccgctgccgccgcgcgcctccgcgcctccaccccgcgctccaagaaacgcacctcccgctccaagtcccgcggccgctccccgaaccctaaccctagctcccgtcgcgagcgcgccgcggaccacggctccgccgcgccctcgcgcaagagcgaccgcaagccgaaccgctccttcccggattctgccacgctcgccacggccatggcctcggtccccgccgcctcggccccgtcgtccggcggggggcgtggtagtgcgggcgccgtccagaagctctggagcgaggtcgatgaggtcgcgctgctcacgggcgctgccgccttcaaggaccgcactggcatcgcgccgcgcctcccggacatgggcgaactgttcgagtccatcaggggctccctcgcgccgcacctcgatcaggccaaggtgtactacaagctcaagcgtctcaagagcaagttccagcactccgtgctgggcgactccagtaccgcgcacgagcaccggctgcgcgacctgggcgcagccctctggggcgccgagctcacgcgccctgaagagaacgccgtcgtgacggctgaggagaccaccgatcccgatgagggattcattgacgaagatagggaggggtccgtgaagcttcctatggttaaggaggtgcttggagagtactggaggttgaacgggcagaccatgtcaggtgtgtcactggagaagggattggtgctacttgggtcgcagcaagctagtgtggttgaggttaaatggaggcgacagcttgaggcagatatgcgcatgcagatgcgccgacatgatctggaaaaggaggtctatggcctactcatcgatgccatcaaaggcctagggccttagcttgggtctgggacttcgtcaacgagcatgaaagggtggtgtcactgatggtgcagatgacacatgtatcctaatagttttatgtgcacaactatagttcaagttgtgtaggtaactgcatcaatcatgtttaggcatttggaggttctacttgtgtgggagaatccttaaggcatcatacctttgtggtttttaaataaaaaaaatggactttgtgcttgtatgttgccttgggttctccctgacggacaatcttggcttagacatttgattttgaaaggttgctaattggttggactctgcaacattgaaaagacaaggcaaactatattatggttgacatgtattcta

SEQ ID NO: 30590 - DNA, 1089 bp, Zea Mays
gtatttgaagacagtgttttaagacacggaggaaaaagaaactgacaatcccaagttacagtgttacacatggccccccaaatatctcgcctagatcatctccctacccctcaaaatttcgactataaaactgcactgctcccttggtcctccaagaagaaaggaacaaaggagagagatctcgatccgcacacctcacgcctctcttcctctcgccccaaggacaacgaaaacatcaaacaagagaaccaaaggaaacagagcaagagcatcgctctcgaagcaaaacgcgcaccacgccgtcgccggccggccacttcgcacgtacgtaggacgcgcacgcaccggtgcatatatggggctcctgaaccagctgtgggacgacacggtggccgggccgcgcccggactccggcctcggcaagctccgcaactgcagcgacgacgcccaggggagagggctggacgaagaagctgcgcgggaaagccaggatgggcggcggcggcggtgacgacgcccccggcacgccgaggagccccaccgtgtacgactgggtggtgatcagttcgctggacctctgaagcccaagccaagacgagaactgcacaaggaaacccaccaccaccatcaacacagctagcgaactgaaggagggagggggcagaggggccatggccatgtaatgtaacgaccaatctctttcagagcttctggtgacgtgtccagttactatatacatacatacgttaacggtgtactatgtgtcttgttgtaaatgtcacccctgcgaggtgttgccgattttgtaagctactacgtactactacgctcggcatgtcaccgtgtgcaagtgcaacacaagtttgtaaaaatgactagctagtagtagcaatgctgttgctgtacgagtaggcctccctctgctttgtacaggggtagtccaacaagtatatggtttgctggtgccatgtaaaaatgtatatagaatcctacgttcacgcccagcaaggatgcgtggttgagtgttctggactctggacaatactactatccaataacagccataccgtgtttttttcctgggccaat

SEQ ID NO: 30591 - DNA, 1543 bp, Zea Mays
gattaaacaaatcccctcgcctgtcccacgccaaagcacaggtctaaggcccggtcctggtcgcggtcgttctcacatgggctacggtgccgctgtgtatgggtgggacaggagttcggtggttttctcgacctgcgtgagaaggtcttattataatgccgtgggggcggtcataatccccgcaggattctagccctgacaatcctgagggtttatctagggaagagttaggtcgtatggtggcttctcgttggactggggaaagtgtaactgaggttagtaaagatgataagaaggggcatgaagatcagcaagaaataccagaacctgcagaggaagcacttgaagatgaattagaaattccagaacctgccgaagaaaattatggtggttatcattcagaagttgaggatgataggcgtaaatatgaagatgaagagttttatcatgagtcagaagatgaatatgttgacgaccatgatgagcatgttgagtcctacaaatctgatgatgaccaaaaagatttaactgagccaggacatgcatcgtggttggacaaagttcagcagactgtacaaaatgttttccaaaaattcaactcttttaagacccctgtagatttgtcagaggcttctcatgttcgtaaggagtatgatgatgctagctcaaagctttcaaaaattcagtctaagatatccagtctagctgagaagctaaaacatgattttggtaatgacaaggagttctattccttttatgatcagtgttttgagaccaaggaagggaagtatacttacaaggtctgtgcatataagaaagcatcacaggctgaagggcacagttctaccaacctggggcggtgggacaaatttgaagattcgtacagagtgatgcacttttcaagtggagacaaatgctggaatggtcctgaccgaagcctaaaggttaggcttagatgtgggctgagcaatgagcttaatgatgtagatgagcctagcagatgcgagtatgtggctgtattgtcgacccctgcagtttgcgtagaggagaagctgaaggagctgcaaaacaaactggacgccatgtctttgaagcagcccgggcatgacgaactttaaaaactttagaatattccagcgtgaacataaagaagatgtcaccaggaggcatagctctgacagttacatccataacatgataggcatggaagtcaatgaggtatatggacagaaacgggccaagcgcgagaaatgagaatgtagagtttaggtcgcctaccaggctatattagctcgcatagaacattttttttagctgaaatttgatgttgcaattttccagactcatctgatggaatatatagtaagaaacagtacaccttgaatcagcatatactttacccagggtttttacatgaaactatgttcagaacggtcatttggaactgaaggaattcccacttggaacacaaggtgaatcgcctgcatacctttaccaaaactattgtgctttttggatatctagaattaggtcgaatcagaat

SEQ ID NO: 30592 - DNA, 932 bp, Zea Mays
gaatggtggcggggaagatccggaagctgcgatgtcgaagcggctgctgtcgcggctgctcggcatgttccaatcgcggacgcaggtgggcgtcgacaaggccggcaaccgctacttcacccgcgttgaggaggtcgacggcacaatgaaggagaggcgctgggtggagttcaagggcgcagaccaggactcgaccaccgttccagtcgagtggatttgctggctgaatggccaaaggaagaaagctccaacaccagaggaattggctgagctggaggcaagacgtgaacgtgtcaagcaaaacattcagcttctcaaaaagaaagaagaagaggaaagaaaaactggtatccaaccagtcaagaaaattgggaaagctgaatctccaaatctccaaagtttcgtgaagcagcagttctcgggtactcctccagatcagcagaaagttaacactctaggacctgaggataggcctaaggacacaactcatacagaagatgctacgacagacaatgagaggtatactgaaccaacgggaactggtgccactttcaagccagggacttggcagccaccaacatgaatgccaacatgaactttagaagatgaaggacggtgtaccggagcattttcctttcacctatctgtgtaacattttaacatttgctctgaaagaatcactagcctatgttccttctttcagatggttacccatctgatggagttatagccttaagttccttcttttagatgcttacccatctgatggagttataggtgatcgggggctcccacggtatgctgttttttttgtggctaaattgtcctctgtaatctttactgtgatagcaactgtaataaactggaccagtgttttgcatcagggctctcttagagacactgttcaacatattctagtatgtctgatgctg

SEQ ID NO: 30593 - DNA, 1385 bp, Zea Mays
gcggctgaaccagtgccagtcccacccgttcccagaccagcctcacgcgctcaccgtgctgcctccaccaccgatggctctccctcccggcgcaggggcggtggcgccggcgacgcccttcgccgcgaatccgtgccgtctccggcgggcgtctggtcctcctgccgccgcccttcggctcgggccgctcttctggccatgggaaaaggtgaaaatcggtcccctttctgtttcccccatgggttttggaacatgggcatggggaaaccagctactttggggctatcaagaaagcatggacaacgaacttcaggattgcttcaatctggctctaaggaatggcataaacctttttgacactgctgactcttacggaactggaaggctgaacggacagagcgaacggctactcggtaaattcatccttgagtttgaagggaggattaaatctccagatgatgtggtcatagcaactaagtttgctgcatatccttggcgacttacatcggggcagtttgtcagcgcctgcaagtcttctttggaaagattacaacttgataggctcgggatagggcagctgcattggtctactgctaactatgcacccttgcaggagcgtgccctctgggatggactagttgaaatggccttgtaagtgctgtcggtgtcagcaattacgggccgaagcagcttctgaagatccacagctatctagcttctagaggagttcccttgagctcagctcaggttcagttctcgttactgagcatgggtgacgatcagatggagctgaaaagtgtgtgtgattcattgggcattcgcatcatcgcatatagcccgcttggattaggaatgctcactgggaagtatggtgcttctaacctcccaaaaggaccaaggtcagtgctgttccgacaaatccttcctgggctggagcctctgctgtcttgcctgagaaggattgccgaaaagaaggggaagaccatgcctcaggtggccatcaactggtgcatgtgcaagggcacagttcctatcccaggcgtcaaaacggtgaggcatgtccaggagaacctgggcgcgctcggctggaggctgagttctgccgagatctcggagctcgagtccgcagcgatggcggctccgaggaagatgatccagaatgtcttccagactgcctgaccgtgctgaatacatgtgtgtgtatgcatgtttctgcaatcgtctttactgaaaaatctgaaaccgggcagccgtgaaccttttcttctcgtaagattcataatatagatagtcactgccatgttctattagttgtcgtttttgacaaagtttaaataaaacttataaaattttgactataaataaatgttttattatttagtttg

SEQ ID NO: 30594 - DNA, 2275 bp, Zea Mays
gcggcagctcctcccgcggcggcggcgggagcgggagccgcggacggagcccgcggttggatcgccgcaacgcagtgaagcgcatcgagtacgaggcgagcgcgggggcgtccgcgtcgtggtcgtcctcgtcctccgcggagcagcagcgctcgccggggctccggccctcgcgctccctggaccttgcccccggcgcggacctccgaatcagcgggagcgtggagggggaggtcgacgagctctgccgcagcctggggctctcggggcccgaggatttcgccgtccccgtcgcggcctgggaggcgcgcaagtcgcggtctaactccgacctcctcccgcgctcccgcctcgacccgtccacacccgccgacgaaacctcgccgattgcgcgggcggtctcggcgcccggtgctcagccgactcgctccttccctgcccccattcccgaggagtcactccactcttcgcctgcttccaccgccaccgagtcggcggaggagcctaccgttgcggcgcccgaggagtcacccaacgctgcccctgcctctgctgtcgtggctcccgtcgggggtttgcccctgccttcgccaaggaggggaggcggggaggtagggatacggggtgcacggccgcctttactctccccgcctccgccaattggtgcactagctcctccgccagttaggaggtccttcgttgacaatgacatgactgggtccgcttgggacattgtgcagtcgtttgctcccagggatcagggaagtgaactgggactgggaggaagtgtcgacagtcgttgcaattcggacaaagaggaagagaatgatgttgaggatggggacgcagcggtggagggcgagctgaaggaattgaggataggagagactttcgaggggttcactggaacttcttcattgtcgacgacgaatgatgatgacgcgtccagtacaaccacggaggccatgttcatcatttcaccgaatggcaagttcaagcggaacattaaatcatggatgcgtggtgctcttctgggaagcggctcatttgggatggtgtacgaggggatcagtgatgagggtgcattttttgctgtgaaggaagtatctttgcttgaccaaggaagcaacgcacaacaatctattgttgcacttgagcaggaaattgcactcctcagtcagtttgaacatgaaaatatagtccagtattatggaactgacaaggaagaatccaaactctatatttttattgagcttgtcacacaagggtctctttcatccctctatcaaaagtataaactacgagaatcacaagtctctgcatacacaaggcagattcttaatggattggtttatctccatgagagaaatgtggtccacagagatatcaaatgcgccaatatattggtccatgcaaatggatctgtaaagcttgcagattttggattggcaaaggagatgtcaaaaattaatatgctaaggtcatgcaaaggaagtgtttactggatggcacctgaggttattaatcctaaaaagatgtatgggccttcagctgatatatggagccttggctgcaccgtgttggaaatgctaacccggcaaataccatttcctaatgtcgagtggacaaatgctttcttcatgattggaagaggggaacagcctactattcccaactacctgtctaaggaggcacaagattttattggccagtgcgtaagagttgatcctgagagccggccttctgcgtcacaacttctggagcacccatttgttaacagaccactgcgagcttcatttgaatcttcgtctccaccagccatctgattctagtattgatataatggggtgtttctcgttgaggccaatgctcaggtcacgtactcacgtgttgatcttcatgatctacactactggttccagaatggaattacgtgggcttgtttaggatgtagtttagtagctgtagtccgtagggttggtgggcagcattgctctgtggttttgtattctttggggtgttcttcattgggcaaagggttttcttcctggttattacgtagatttgtgtaaacttgtaggtaaaagggctgcaattgcctctgggctctggtgtaggtttagccgatgtttgtgaatgtttgacatcgccattctttacgtaaatggttttgttgctcaaaaaagcatccggagcattgaatccccctggtgttacttttttcttcgtcgcatcggaaactgtttttttccttctaatttatcatccacgggat

SEQ ID NO: 30595 - DNA, 1416 bp, Zea Mays
gcttttggattctggtttctctcgtctttctcctccctctcctgacttttcttctagacatctcgcgggtcttatcgactccaacaagaacacactacacaccagccagcgagatagcgaacgctaggaacccagtggccatctttggagcggccatgacgctggatcagaaccatgccatgccgatgcagcccccggccctgcagcccggaagagcatatggagcagagggcagtgctgtggtgcatggttccatcagaacagtaggaagaagcgacctcgcagatcacgagatgggcctacgtcagtggcagctgtcatccagcggtgggctgagcgcaacaagcatttggagtatgaggaatctgaggaggcaaagcgaccaagaaaagcacctgcaaagggttcaaagaagggctgtatgaagggaaaaggggggcctgacaatactcaatgtggataccgtggagtgaggcagcgtacttgggggaagtgggttgctgaaataagagagccaaatcgtgtcgacagactctggctgggtaccttcccaaccgcggaggatgcagctagggcctatgatgaggcagccagagcgatgtatggagacttggcacggactaacttccccggacaggatgcaacaacctctgcccaagctgctctatcatcgacctctgcccaggctgctccaacagctgttgaagctcttcagactggcacgtcatgcgagtcgacaacgacatcaaatcactcggacatcgcatccacctcacacaagcttgaagcctctgacatctcgagctacctaaaggaaaaatgtccagctggatcatgtggtatccaagacggcacacccattgtagctgacaaggaggtctttgggccgttggagcctatcacaaatcttccagatggtggtgatggttttgatatcggtgagatgctgaggatgatggaaagcgatccacataatgcaggtggagccgacgctggcatgggacagccctggtatcttgatgagctggattcgagtgtcttagagagcatgctccagccggagccggagccagagccagagccattcctgatgtctgaagaaccggacatgtttcttgctggcttcgaaagcgctggtttcgtcgagggtctggagcggctaaactgaatttctgatgtttgaccgttgatcctcatcccacttcatgtctgagcttgtgaattcggaggcaaacattggcagaacttataagctctagcaattctaggctttacattcctctgtgatagttctctatgcatgggaactgggtttgcttcacaatttttgtaagaccagaagtgatgtaaatagttcccaccttgtggaaggacaagaaaaaaataaataaaaagagtgcttgctttcaaaaagaa

SEQ ID NO: 30596 - DNA, 2536 bp, Zea Mays
ccattttcgagcgcagaagcgagagagatccggagcagccgcagtcccaccgacctcgccgccggtcgccctccatctcctcgccgctgcctctcgagaccctcgacgggctcaaggacaggttcgatctcggggtcttcgtaggcgacctcgccctcgatgaggaagtcaccagtgacgacgagtccctggaggggctgcagcaggagcttgacaactgcaagaatgaccaggaagtcgcaaacattctagccagtggcatcaaactgcgcgagtacacaaaaggcgtcgagaataacatacgccaaatcgagctggattctatccaggattacattaaggaaagtgaaaatctagtttctctgcatgatcaaatttgtgattgtgacaatattttgttacaaatggaaacagttctgactggattccagacagaaattggttccataagttcagagataaaggtccttcaggagaaatctatggacatgggattaaagctgaaaaatcgtaaggctgcagaatctaaattgtcaaaatttgtcgaggatataatagtacctccaagaatgattgacataattgttgatggagaggtcaatgatgaatacatgaaaacacttgagactctaagcaaaaaaatcaaattcatcgatgctgaccccatggttaaatcatccaaggctctaaaagatgttcaacctgaggttgagagactacgacagaaagccgtctcaaagattttcgagtttgtcatccaaaagttctatgccttgagaaaaccaaagactaatattcagattctacagcagagtgttcttcttaaatacaagtacacgataaatttccttaaggaacatgctaaggagatatatgcagaagttcgtacggcgtatattgacaccatgaataaggtgctaagtgcacatttccgggcttacatacaagcattggagaaactacagatggacatagcaacttccactgatttgcttggtgttgaaaccagaagcacaggcttcattttctccattggaaaagaacctctgaaaacccgtccttcagtgtttgctctgggtgaacgaataaacattttgaaggaaatcgaccagccagcattgatacctcatatagctgaagcgaagtcacagaaatactcgtatgaagttcttttcagaagcttgcagaaacttcttattgatactgccacttcagaatacctgtttactgatgatttctttggcgaagaatccatattccatgatatatttgcaggaccgattcaagttgttgatgaacatttcaatactgtactcctgaactgttatgatgcaattggcataatgcttatgatcagaataattcatcagcaccagctcatcatgtttaagcggcgaatcccatgtttggactcttacctagacaaagttaatatgtcactctggcctcgcttcaagatggtgttcgacttgcatttgaacagcttgcgaaatgcaaatattaaaacactttgggaggatgatgtccatccacactatgttacaaggagatatgctgaatttacagcttctctagttcatctcaatgttgagcatggggacggtcagcttgatctaaatttggagcgattgcggatggccattgaggatttgcttgttaagttggccaagatgttttccaaaccgaagctacaaactgtctttctgataaacaactatgatttaacaatttccattttgaaggaagctggaactgagggtgggaaagcacaacaacacttcgaggaggttcttaagagcaacatcgcaatatatgtggaagagttgctcctggagcagttcagtagtttgatcagattcgtcaaatctcgtccagcggatgagacggctgcaaattccgagaaagccagcattgccgaagttgagccactggtaaaggatttcgcgagccggtataaggccgcgatcgagctgatgcactatgatgtgatcacatctttcagcaactttctttgcgggatggagatcttgagagcgacgctcgcacagctcctgctatactacaccaggctctccgagtgtgtcaagagaatcaacggcggctctgctctcaacaaggaccttgtctccatatcctccatcctgttcgaaatcaagaagtattctaggacgttttagttgtttcacccccttccatgtacactaggacggctagctgaggggtagctgtgtatccttactttgtaactggtatgtgcgactgcaggggaaacaagggcattttgtcgtggtttgtatcttcgtctgtgttacccgacttgacccctgcccctttccagcacagaactatgatctctaggctgtctccacagttatcctattctatcttctgtcctatcatctattttaaacttcattttgtaaacagtatcgattatagtgcaaatctacaattttatacgatccgctgtggataaccatatgctgcatactaatgaatgcgtaccaaacgcttgccttaatgttatttttatgac

SEQ ID NO: 30597 - DNA, 717 bp, Zea Mays
agtgggctggcccagcccaccaggcagctcatgtgctcctcgcctcctcccccacctggtgtggctttgttaaactccaaatcccgacccccttcagtgtcgccgcttcttctctcacgcgttctccactgctattccgcctccacccaagtgcctgctctgcttccctccgctcctctccaggtgcgctgctctgcttccctctccggatgtgctgatcaagcaattcatgagtgggagatggaagagatctagccagcagaagaaaaatcaagcaggccaccagcagaatcgatgaggagacagcggaatctagggggcataggcatgcgaataaggcgacgaggcatcacctaacccctgaggtgaccttcgaccgctctggcgcttaagcaccgcttaagtgatgccttaataacaatggctgaaaaggtgctccaaagatgagctatccaacctaaaagcaaaattccgaatgatgtgctgtaaaactgtattctgtaatagcatatatttattatttttctattcagtccattttcttccctttcagcacaaacagaaaaattaatctgcaattggttctgttgcaaatgatttattattaaacaaaatggcaggctgctacttcatgagagaatgcttagttggaagttgggaccaacgagtactcatgtattttttctactggattttctagattgtcatcaatggtga

SEQ ID NO: 30598 - DNA, 3119 bp, Zea Mays
ttgcagatttgtcgtgttgaagacataactgtcagtggcatagttaggggaagtataattcatattcatagagcaaggactgtgactattgcaaaggatggcacaattagtgcctcagagttaggttgcaaggaaggcatcggaaaaggaaagtttctcaagtatggagctggtggtggtgctgggcatggaggccgaggtggcacagggatttacaatggaatgagaagtgaaggaggcctagaatatggcaatgctgatcttccatgtgagctaggaagtggtagtggcggttctgctttgtcagcagataacactgccggtgggggattaattgttattggatccatgaaatggccactttcaaggttgctagtttatggctcgctgaactctgacggggaaagccatagaggcacatcgggaaattcaaatgggacttttaaaggtggagttggtggtggttctggaggatcaattcttttatttcttcaatggtttctgctagagaaaaactcatcattatcggcatctggtggcaatggaggtgtatacggtggtggtggaggtggtggtggtagaatacatttccattggtcatatattgctactggagatgaatatgttcacattgcttctgtcaatggcacaatagtatcaagtggtggatctggtaagaatgatggacattgtggagaagatggaacagtaacaggaaagaaatgccccaagggcctatatggaacattttgcactttggtacatataaaaacgttgttgggtccaattcatctctgtgcatcccgtgttctgtggatagtcttccaaaccgtgctgaattcatatatataagaggtggtgttaccgagctgccatgcccgtataggtgcatatctgataagtacaagatgccaaactgttacacaccacttgaggaacttatgtatacttttggtggtccttggtctttttcaatcatcctttctttaacagttattcttttggcacttgtcttaagtgctctaagaattaagattggtgagagtgatatcacctaccgggcaactaatgcaatccacaatgatggttgttctttcccctttttgctttctttggccgaggtaccaggggcaagcagggcagaagaaactcagagccatgtccacagaatgtacttcatgggacctaatactttccgagagccctggcatctcccctactcacctcctgatgcgataattggaattgtttatgaagatgctttcaaccgttttattgatgagatcaatttggtggctgcatatgagtggtgggaaggatctatacatagtatactttctgttcttgcgtatccttgtgcctggtcttggaagcaatggcgcagaaggaaaaaaaaccatcgtcttcaagagtatgttaaatctgaatatgatcattcatgtctccgctcctgcaggtcacgggctctctataaaggcttgaaggttggttcaactccagacttgatggttgcgtacatagatttctttctcgggggtgatgagaaacgacttgatgtagcatccaccattcagaagaggtttcccatgtgtctaatttttggtggtgatggaagctatatgtccccatactatctacatagtgatacattgctatcaaatcttcttggccagtatgtatctactgcgatctggaatagattagtcgctggtttgaatgctcaattaaggacagtaagacaaggaagtgtccgttctactttgggccctgttgtttcttggatcaacagtcatgggaatccccaacttgagagacatggtgttcgagtggagttagggtggttccagtccactgcttctgcatattaccagcttggtattatcgtagctgtgaatgagaacttctacaagaatctccgccaccatgagcatgccacagaattttgtgaacgctcaaggaagaacgttgcagttccacttcaggatttcaatcaggcaaatctggatcagccttgcacaagctatgctgtttctagaaagcgattgacaggtggagtcaatggtgggatcataaatgagggaacgctcaagtcactgcactataaaagagactatctctttccattctcattgttattgcgtaattccaggcctctaggctatgcggaaacattgcaattgctcatttgtattgtacttctgggtgatttctccatcaccctgcttatgcttgtacagtactattggatatctgtcggagcttttcttgccatactgctcatcccccctcttgctttgctttcaccttttcttgctggtctcaatgcactttttagccgaggactaaaacgatcttcagtgacccgcatttttgcactttggaacattacttctgttgtaaacattattgtagcaatcatatacggctctttgtatttttggctctcttctttggcggtgtcctcagttcatcaagtatacaacacaaaaagcttcaagagtagagaagacaatgaatggtggatactgcctactatcctttttctcatcaaatcactgcaagctggactagttaactggcacgttgccaatttggaaatccaggactactcgttatttagcccggacccagatagattctgggcaatgtagtcgcctgcagcaagctaagaattgcagaaagcatggtttagtgatcgcaagaatggcaagtattaattattggatgctgaatatttgcgttttgtcccttgcaacgtcatcagcccaatacaatctctgaatctgaaggggtctaacacgctggctggaacttccttctatttatgggaagcgctcctgcgtagtgcactagtgcagatatgttcattttctttttctcagtttttttcccgtcttggtcgtgtgcctagaataggtctgtcgctcggtggggattagatttgtgcattttctttggttcaaattaaaccgttgattcgagtgtacagcaagaaactattgtgattgtcgctctagatgtacatcactgtaagtataatagtagaaccatttcaactgtatacaatcctcaaaggaaagtatgtttctttctattttctttttcctattgtcatcgtt

SEQ ID NO: 30599 - DNA, 468 bp, Zea Mays
gtatttaatcaaatttaagatatattaatttctcaataaatttggtaatttagggactaaaattgaataaaatagagagactgtcactagaaactaaacactcactaagaacagttctgagaatggcttccctctccaatgagagcagcatccaaagatgatagttgtccaaagggctatttaacatgagcacatgccaacatggcacgatttttcaaagcaatttcactaacttggcacatggctttctcatcgttcccataaacatgtttccaccagctctgctccattgtattaggacaccgaagaaatggtgactatcagaccttgcaaaagatttgaatcaacatagtttcctataagcctggtagtacatactagggccataaaggttgtgcaggcctcccagttgatttcctgttagataataaatttgcttcagcaggcccaagttcagcgaaataaaag

SEQ ID NO: 30600 - DNA, 1870 bp, Zea Mays
caatgcgctatcggacttctcgtcttggctttaacctttttcccttttgcaacctttttcgaccaaccttcgtctccagactcgtccaccctataaattgtctcgccagaccattccaatccggcaactcctgctctgcctgagcctgagcgtaggcggctaccagagagaagggtaggcggcgccggcggcgggagcaatagaagagcggtaaatccaagagagatcagagcctcggagggaaacagaagcgcacagagcatggagagcccgatctcgaggactaacctgaattgcatcagcctggcggacccgaacgtccagaaatcagtggcgctcctcaaagggcttggaacttcctttctcgggaatcttgtttcttttcataaggcatgcctggattcaggcttcttctatgttgtggatcatgggataagccaagagttcatggatgaagtttttgcccagagcaagaagttctttgaccttcctcatagtgagaaaatgaagcttctccgagacgagaagaatagagggtacacacccatgctagatgaaattcttgatcctgaaaatcaagttaatggtgactacaaggaaggatattatattggagttgaggtacctgcagatgatccagaagcaaacaggccattttatggtccaaatcagtggccttctaaagaagtactaccaaaatggagagaagtgatggagcaatatcacagggaggcattgatagtagcaaaatcagtcgcaaggatcatcgctcttgctctagatctagacgtggacttcttcgatagacctgaaatgcttggcgagtccatagccacgctaaggctcctgcactacgaaggtggacaagaaacaggtcatgccttcgtgtcagacgggtattttaccccgcaaggaacatgacgagtcctgtcgtttgatgttctttctatcgccaggtaaggtgtcagatcctgcaaagggtgtttacggagcgggcgcccattcagactacggcctgataactctcctggcaaccgatgatgtagttgggctccaaatatgcaaggacaagaacgctcagcctcaactgtgggaatacgtagctccgttgaaaggcggatttatcgtcaaccttggcgacatgctcgaaaggtggagtaacggcgttttcaggtcaaccttacatcgagtggtcctagatgggcgagaacgctactcgatagcctacttcgtggaaccaagccacgactgcgtggtggagtgcctgccgacctgcaagtccgaatcaaatcctccaaagttccctccgatcacctgctccgcgtacctgtcccagcgctacaaggacactcacgcggatctgaaatcctacgacgacagcaaggcctgatcagaggactgccctctcctctctctgtctcagcgatcagtacgtacgacgtgtatcctgcaataacactgggtggagggcggcagtaccagtgtaccacagtatcagtataggtatagagagttctgttggtgccaccgtgccaccgtccatgtgttcatgtaagatgacgagaagaatcaagaacgggggccggcgttgaggtccccggccttaatctaggccttgttgttgctgtcgtgttgtgaggttcaatccccgagcttatcctttggtgctgttgagaggtccacagtccccttcgttccgttttgtttttggttttggtacaccaggagcaattttgttgtggattgctaaaacttttgcgaggcgcggcgtcatctcgtttcagctttatccgacggtcttggtgtgggaagcagctgtgcttcgttctcctagaagagacgggtgtgctcagcagcgttgctttcttgc

SEQ ID NO: 30601 - DNA, 4248 bp, Zea Mays
ccaggccattccgcaccgccaaaattgctccgcgcgggaattccaatttcctccccacctccgcccgcttcccagttcccagtgcacagccgattcgtctccattcctatcttctcccattccctccccagtccgacctccgaccccccatttcgtcgccgccgccgtactcgccgagaacccgccccaaatccataggcccatcccttacccattaacccccaatgcctccgaagaagcgcgccgccgccgccgcctcttcaaagaagccgcagccatcgcagccatcgcagcccgccaagttcggtatcctccacttcttcgagcgccagacccaggcctcccagaacgccaagcgccagaagcccgacccccctgcgcctccccctcctcctccgccgccgcccgagaaggagccctcggaggtctcgccggaggttaccaagacgctggcgccgaagcgtgtcagattttctcccggaatgttgattaagcagagccaggacgatggggtcgcggaggtggtgacttggaagatctcgccggtgaaccatcgccttggtacgacgaagtcgaagcaatttctggggatggcgccccatccgtactcaagcgagaaaaattcctcccttgatgctatgaagaagtggcattcatctccattgggcttgtcaaggtgtactactttgggaagtaattcaggagttcttggatctgctatagttggttgtgatggtgtgggggatactcagagtccatttcggaccccaccatcgctttcctatggctgcaacgagcagcaagtgagcagtggtgtaacttctgagggaggtgccgaaccatcgggagcagggcagcacaaaaaggcattacttgatcttctagaccaagtagaggatgcaatcatggaagaagaattgcctgctgatcctggaaataaaggagggcaaaccacgaatgaggatatcaccaacaatagccgttctcctgttgctgatactgacttaactatcccatccaagaaaactattcatgtcccacccttcaatagttttcttgtcttggaggtgtccgaaaaacataaagctgatgattcatcatgtgatcgctaccctgttaaggttctgcgtctgctgaatgaacactctggtacagaatgtgccgtgcatctgtgtgatgagtggttcgacagtattgttgggcctggtgatactgtaaatgtcattggagaatttagtaaccatggaaaatgtattgttgaccatgacaataatcttgttattgtccatccagagcaactcatttccgggacacgggctgcttctagcttccaatgtttaagaaggtctgttctcgatgagaggctaaaaagcaatgaatattctaccagcgcgttgactggtactctgcttcaccaagtctttcaggctggattactcaatgatgctccttcatggcagtttttggaacaacaggcaaaggaagtacttctgaaaaatattgaaactttatatgcatgtggagtcaatgaaagcaacatgtactctacgctcattgaagctatccccaaaatgttgaattggttcaagtgtttcttaaagggttcaaaatgttctgatgttgattttggacataacgaagtgagaaagactgttggagtgactgaggtcatggatattgaggaaatggcatgggcaccaagatatggtatgaaaggggttatcgatgcttctgttagatcaagagttgagtcacacaatggtggttcatatgatagaataatgccactagagttcaaaactggcaaagcaactagtggccaggcagctatggaacactcagctcaggtgatgttatacacactgttgatgacagagagatacttgaatgaggatattgacttgggccttctgtattatcttcacacagaccagacattgggcattaaagtaaagaggactgatttaattgggctaataatgcgccgaaacgagcttgctactgagatcctgaaggcatcgatgtcacagagttttcctccaatgttacagagcccatcaacatgtaatagatgtcgacacctgatttcttgcaccatatatcacaaggcacacggaggcagtggtacaactagtgggcttggtgatctatttgacaaccttgtgaatcacttaacagtcacacatcataattttcttaaacattgggatagattgattgatcttgaagctagagcttctcaggtaaaaaagaacatcttgcagcctcataattcaaactatgggagtgggagttctgctgtaccttattttgttcttgacataaaaaatggacattcaatagattcttcaggaaaaagcaaaagatacatatataattttgttcagcaaaagatgcagcctgaaacagctgatcagttagatgctcaatttgacagcatagatttcagcctgaaagttggtgattttgtggtgcttagcactcagtctgggagaatagcagttgcaaatggatgtataagagaaataataagtcactctcacataacggtctctttgccacgccgtttgagaattccagatagcaattccttgtcagagcaagaggatctgacacgtgaaatttggcggatagacaaggatgaatttagttcttcatttggaataatgagactcaacattgtccaactatttgctcagaatccacaaaactctcacctgcgcaagttgattgttgatcttgaggcacccaggtttgatagcggaggtctgtttagccaagatcctgcactatcatacataaggtcactaccaaacttgaataatgaccaacaaaggtcactgcataaaattctaggagcaaaggattatgctcttattttaggaatgcctggaacaggcaaaacatacacaatggtgcatgctgtgaagtcattattgataagaggggaatctattttgctaacttcatatactaactcggctattgataccctgctcatgaagttgaagactgagggtgtagattttattcggattggaaggcctgaggctgtacatcctgatgtcagggcccactgcttgtcaacaactgaggcacaatcggttgatgccattaaagcaaggatggagcaagtacaggttgttggagttacttgcttgggaatgtatcatcctttattagcacataagaagtttgacacatgtatcatggatgaagctggacaaattacattgccggtttcactgggacctttgatgcttgcaacaaagtttgttctagtaggagaccattatcaacttcctccactggttcagagctctgaagcgcgagaaaatgggatgggcatcagcttattttggagattgtcagaagcacattcccaggcaatttcagcactgcgatgccagtaccgtatgtcatctggtatcatggagctctcaaattcgttgatttacggtaataggttgtgctgtggttcattggaaattgcaaatgccaaactcaagttttctggtagagaaccaatgcagttgaagttaaaagagatcttgaatcccgatagggctgtgatctttgccaacacagatcaaatacctgcacttgaggcaaaggaacacagaactgtgaacaatcctacagaagcacacattatttcatggatcatcaaagaattactaagaaggggtgtagctcaagatgctattggtatcataaccccatataacgctcaagtgaatatcattcagcaatacactgattgtttggttgaggttcatacgatcgataaataccagggtagagataaggagtgtataatagtatctttcgtgcgctccactgcaaactcaagggctagtggttcttctctgcttggtgattggcacaggatcaatgttctgttgacacgtgcaaagaagaagctcatcatggtgggatcacgtggaacgctttcaacaatacctttgctcaggcttcttgtcgacaaagtagctgagattggtggcctgttggatttgacaaataaggatgcacattctttttcgagaacttgaagttcttgtttgaatgcacaataggatgcacggtagatgaatctggaaggtttttataaggccaagctgtaaataagaatatgctgtaaattttgtttttggaaatgtatagtaaacctagccaagagccacacagctagaggttaggttttgtatattccttccgttagttataacttatttcaatttcatt

SEQ ID NO: 30602 - DNA, 2771 bp, Zea Mays
cacacgtggacattaatatcggctcagggtcacacccgcaaagctaccgccgcagtgccgcacggcgactccgactctgtctcctgcgcggctccagctcaccctctcctcacatcgaggcggaccggcccacgtcgccggcaaccgaaacgtcggccgtagcctcgcacctccggcatcggcgagcgcgcgcgcccgtccggcggcggagatggcgctgcggcacctggtcacgggccagaacaactgcgcgccggacggcgcctcgtcgtccaaccccctcaacgccctcgccaacgccttccttggccagtcctccaaggcgcagtcaataaaggaacttcctggttctgttagtgttccatctacatctggcttcagcgcgcctgctcccttgtcaaacatccctggttcagaaaatgagttcaaacaagaccagcgaccttttgtgcagggctctgactttattcatggtggtcctgctaatgattggattaagtcttttcggcctccgggggttcctgaacttggtggaatagaagcacactttccagattttgagcaaatttataacaatgcaggaacaacctttcagccgccattggatggtccaccacaaagagtgttgtctggtgtcttgcattcctttctcacaagtggcccagctggtgtgccatttcaacctcttccagtaccagctgctcttggtttatctgaaagtgacaaacagtgcatacgtgatcgtagctgcataatggcacggcatattttttctgaccaaccggaagaatatatacaggctcaggtcaatactttgctgcattcgcttgatatagacaaccgtatgagaggacctatgcatggacaatacccagaactacaggagtactggaaccagtcccaaagttctatgggtcctgccctgatgcataataccgctgataaatggattactgagtttggcaaacaaaataataatccggaaaattgggcaaagtctttcgaacaacaatatggccccaatgggtgggcctctgagtttgaacagcatcagtctcagatggccatgggccagatgggaggagtgaacatggccaacctggctgctatggagcaatcccgaatgcttgcacaaactttagcaagtaataatgatcccaagtttcagaattctaagttcttccagtttgtttcaaagatgagccggggtgaacttattatagaagataatcaggtaaaagaaggtttagcatcccaatccagtggctgggctgatgaatttcaaacacagtacaaagctaatgcaaactcatgggcggatcagtttgcacgtgaagagctttcacaaggggcggataagtgggttagtgagttctctagtcaacataatcaaggtgcgctaaatgagagctgggttgatgagttctcgaaattaaatgtcactgatgaatgggcagaggaattcagtggaggtggttttggcgaaagctctgctgatccgtgggtagatgagttccaagaacacttgtcatctttcaaacaaagttcaggcgcctctcgaggggtttatgtttattctgagaacaacccgtatgttggtcaccctaatccaatgcaagaaggacaggagctcttccgcaagggcctcttaagtgaagctgttcttgctttagaggctgaagttttgaagaatcctgataatgctgaaggttggaggttgttaggcataacacatgcagaaaatgatgatgaccaacaggccattgcagcaatgatgcgtgcgttggaagctaatccgacaaaccttgaagttcttcttgctcttggtgttagtcacacaaatgaattggagcagggagaagcattaaggtatctttataggtggcttcagaatcatccaaaatatggtggccttgtccctccgcagtcaactgattcaccttatggtcctgatgttgttagattgtttaatgacgctgctcagatgtcacctgaagatgcagatgttcatgtagttctgggagtcttatacaacctatcaagagagtatgataaagctataacttcatttaagacagcagtacagctcaaaccacaggactactcactctggaacaagcttggtgcaacccaagcaaacagcatccagagtgctgatgcaatattggcgtatcagcaggcactagacttgaaacccaactacgtgcgtgcatgggcgaacatgggaatcagctatgccaaccagggtctgtatgaggattccattcgatactatgtaagggcagttacaatgaacccaaaagctgacaacgcttggcagtacttgaggatttctcttggcaacgcttcaagagctgacatgattgccgcatgcgacgcccgcaacctcgacgctcttcagaaagagtttcctctctgagtcctccctagctttctccagcagcgatctccatggaaatggaattggaggaactaggaagtgagggggaacaacatcccgtcgatgtgtgaagtatcattgcaagaaggcaatagtggcaaagggggaattatacatctgtaagtacacaggaataaaggaatggttgagtaataaattgtttttagggcgaaccactgcttgttttataaagttaatataaaaaatgcaatgcgggtgcttcttggtggtggtgccagatcgagtttaactgagacgatccaaattaaattccatggtccacgccacgggtcctgctgggccgttaatatacgggacaacctccgctggt

SEQ ID NO: 30603 - DNA, 203 bp, Zea Mays
cttgaactgaattaaccagtgcgcacgaccatataaaaaaaataaacaaacttcctttgacaataagtttctaattaaatcatggctgcgcctgggcaacgttattgtgagagtgaaagtggacgtgctgctactcccctcattcccaacatgtatcaagtacctgcattgagtaatgcaagagtgagatgacacatctcagc

SEQ ID NO: 30604 - DNA, 1300 bp, Zea Mays
tttaggttaacaattttttccttttgcagccttccttggcaaggtcttaaagcaggaacaaagaagcaaaagtatgagaaaattagcgagaagaaagttgcaacatcaattgaggctctatgccgtgggtatcctacagagtttgcatcatatttccattattgccgttcactgcgatttgatgacaagcctgactattcctacctcaagcgattattccgtgacctttttatccgtgaaggttttcagtttgactatgtctttgactggacaatattgaagtatcaacaagctcaaattgccactgctccaccccgtgcggtaggccatggcgctgggccttctgggttggcacctgcattacagaatgataggcaaccaggccctgaggaagcaaggactagtggttggtcatcaatggatcggcgtcgtgccccactaccaattacaagtgtggggacattatctaagcagaaagcaccggtagggaatgatgctactgtttctagagacgctgtgatatctggaccaaatttcttgggaaggtcaagtggatcttcaaggaggcctgttatctcgagtagccgcgatgcggtggtcaccgatagttccgagccttcacgagcgcgcacaactgatgcaagccctggggttttccgcagagcctcaggtcctcagagaagctcacctgtccactctgcagaacagaagcgctcatcctcaggccgtcatccatctaatgcgaagaactacgattccgctctcaaaggcattgaaggccttactttagatggcgacgagagggttcagtactagagcggcaagaagaaattctacatcccctgtaaaaaagcataaccaggtggtaagcattgtgtttcctgttgagttttggatcaacaggaaacagaatgatggaaggaggatctggtcacgtgttgtgcggtttcgggttgccttctgagcaaggtaaataaacggtcctgtccgaggcgcttcaaacctagctctcgtaatgttatcgtcatgtatgtaaatgtgtcttatagtgagcctattttgttgttccaatccttacggtgttccattctgaggtgctgaaccttggggcaacaaggctgaagctggtagggacttcaattggagaactggggttcaagcatgtagaattttaaaatcggttcatttgtctggacaatgttcctgactagtaatgtgatcgcaagacaaacgatgttatttctctctgtggttatcgatatgtccatctcttcacacgcctgatagaatattatttgac

SEQ ID NO: 30605 - DNA, 2263 bp, Zea Mays
caccaagtatttttttcacaaatatatatatggcacgtactaccatgtcagcgttatacattatacacataaaatttgtatacggaagagaaatgtggtgaagcgaagagataattcatgggaaataatccatatccccgatcgaggacaatatatgcaaagggccaccagagtcattattattacgtgtaaaacaaagatgtgcgagacagagataaggatgactctgttgtttgtcgtcatgctagctagtcacccaaatttccacaaggtagaacatatgtctagttctatttctatataaagcagacaaacgaggttccgttccataacagcagtcagcagcagggttctttcttgtcacctggagctggacctgacgatggcataccatctcatctcttcaccactgttccttctcgcacaattgctcgccgtcgccgtccctctccttctgctcctgcttcaccaacgctcatcaattcgccgccgtcgtcgcagcagcagcagcagatcggccaagcagggaggacagctcctgccgccttcgcccccggcgctgcccatcatcggccaccttcacctcgtcagcgacctcccgcacgtctccctccgtgacctcgccgccaagcatggtggggacgacggcctgatgctgctccgtctcggcgctgttcccaccctcgtcgtgtcatcgccgcgggccgcggaggcgatcacgcgcacgcacgaccacgtgttcgcgtcgcggcccacgtccactctcagcgacgagatcctgtacgggtcctccgacatcgccttctccccctacggcgagcactggcggcaggccagaaagctggtcaccgcgcacctcttcaccgtcaagagagtgcactcgtaccgccgcgcccgcaaggaggaggtgcgcctggtggtagccaaggtgcgggaggcggcggtggcgggcacggccacggacatgagccttgccatgaacacgttcgccaacgatatcatcagccgcgccgtgtccggcaagttcttccgggcggagggccggaacaagctcttccgggagctggtggaggccaactctgctctgttcggagggttcaacctggaagactacttcccggggctggcgagggcgttaggtttccttagcagaaggctgttgtttctgcgcaacaggcggcgggtccaggagacgcacaggagatgggacgagctgctcgaaaccatactgagcgaccacgagggaagaaggggttctgtctctgtggacggtggtggtgacttcaccgacgtgttgctctcggttcagacagagtacggaatgaccagagatcatctcaaggccatcttggtgctcgccatggccgagctgatgcgcaacccacagcagatggccaagctacaagctcaagttcggaggcacacaccggaggggcaggaaacggtggaggaagagaacctatccgacatgccctacctgagagccgtggtgaaggagacgctgaggctgcacccacctgccccgctcctcgtccctcacctgtccctggcggactgcgtcgtcgatggctaccacgtcccctccggcacccgggtcatcgtcaacgcctgggctcttggcagagacccgggctcgtgggagaagccagaggagttcctgccggagaggttcatggacggcggcagcgctgctggcgtcgacatcaaggggaaccacttccacttcttgccgtttggagctggacgaaggatttgccctggcctcaactttgggatggctacggtcgagatcatgctagcaaacctcgtgtactgcttcgactggcagctgcccatgggcatggaggagaaggacgttgacatgacggaggtgtttggactcacggtgcatccaaaggagaagctcatgcttgttcccaagcttcctgctactgctgcacctactgcaactgctcgtcaactccatcctccaagctgctgacgatcgaaggaaaactgcatgcagcgggtgtagaggacgagcacgtacgtacgtacaatgcacatgccaatggtgaagtgaactacactctacagagatatagatggtttggagtttggattccatgtatatatatatctattattatactaggaaaagatgtccgagtgttgctatcgtacgggtcatgtaaactatgttaatcttatgtgtgtgtttacttatatagtaataaaaaaagctattttgtagagaggtgattcttctcagactaagtagtga

SEQ ID NO: 30606 - DNA, 1888 bp, Zea Mays
gtaacagcagtcagcagcagggttctttcttgtcacctggagctggacctgacgatggcataccatctcatctcttcaccgacgttccttctcgcacaattgctcgccgtcgccgtccctctccttctgctcctgctttaccacggctcatcaattcgccgccgtcgtcgcagcagcagatcggccaagcagggaggacagctcctgccgccttcgcccccggcgctgcccatcatcggccaccttcacctcgtcagcgacctcccgcacgtctccctccgtgacctcgccgccaagcatggtggcgacgacggcctgatgctgctccgtctcggcgctgttcccaccctcgtcgtgtcatcgccgcgggcggcggaggcgatcacgcgcacgcacgaccacgtgttcgcgtcgcggcccacgtccactctcagcgacgagatcctgtacgggtcctccgacatcgccttctccccttacggcgagcactggcggcaggccagaaagctggtcaccgcgcacctcttcaccgtcaagagagtgcactcgtaccgctgcgcccgcaaggaggaggtgcgcctggtggtagccaaggtgcgggaggcggcggtggcgggcacggccacggacatgagccttgccatgaacacgttcgccaacgatatcatcagccgcgccgtgtccggcaagttcttccgggcggaaggccggaacaagctctttcgggagctggtggaggccaactctgatctgttcggagggttcaacctggaagactacttcccgggactggcgagggcgttaggtttccttagcagaaggttgttgtttctgcgcaacaggcggcgggtccaggagacgcacaggagatgggacgagctgctcgaaaccatactgagcgaccacgagggaagaaggggctctgtctctgtggacggtggtggtgacttcaccgacgtgttgctctcggttcagacagagtacggcatgaccagagatcatctcaaggccatcttggtgctcgccatggccgagctgatgcgcaacccacagcagatggccaagctacaagctcaagttcggaggcacacaccggaggggcaggaaacggtggaggaagagaacctatccgacatgcccttcctgagagccgtggtgaaggagacgctgaggctgcacccacctgccccgctcctcgtccctcacctgtccctggcggactgcgtcgtcgatggctaccacgtcccctccggcacccgggtcatcatcaacgcgtgggctcttggcagagacccgggctcgtgggagaagccagaggagttcctgccggagaggttcatggacggcggcagcgctgctggcgtcgacatcaaggggaaccacttccacttgttgccgtttggagctggacgaaggatttgccctggcctcaactttgggatggctacggtcgagatcatgctagcaaacctcgtgtactgcttcgactggcagctgcccatgggcatggaggagaaggacattgacatgacggaggtgtttggactcacggtgcatcccaaggagaagctcatgcttgttcccaaagttgctcgtgtactgcaactgctcgtcaataattccatcgtccaagttgctgatcgaagggactcgagatcgatcatgcatgtatatggtttatttggagtagaaaactgcatgcagcgggtgtagaggacgagcacgtacgtacgtacaatgcacatgctatcgtacgggtatatatgtatgtattatactaggaaaagatgtccgagtgttgctatcgtacgggtcatgtaaacaatgttaagcttatgtgtctttttacttttatatagtaataaaaaagctattttgtagagaggtg

SEQ ID NO: 30607 - DNA, 2118 bp, Zea Mays
cgcgcgccacttcgtcacggcccaaagaccagccgccgccggcagaaccccacgccgctcaatccagcctccgcctcgccgccgccgccgcctgtgctgctccgggcgcgccgcgtccatcagccatgctcgccctcgcccgcgcgctccggagccttggccaggcgggggccaggcgggagggccccctcctcgcctggctctcttccttgaggtcggccgccttctcctcctcatccgcgccgccggagtacgacatgccgtcggtgacatggggcgtaatacaggggcgcaaggagcgtctcgtctcgcgcgtgttggcgctcgacttcctccgctccgcgggcgtctccgaccccgccggggagctcgaggcggtcgagctcccctcgtccctcgaggtgctccaggagcgcctcgacttcctcctccgcctcggcctctccaccgacgacctctccaactacccgctattactggcctgctccctcaggaagaacgtcatccccgtcctctcctacctcgagaagctcggcgtcacgcgcgcccgcctggccgcctttgtccgcgcctacccggcctgcctccacgcctctgtcgccgtcgacctcgctcccatggtcaaggcgctccgtggcctggacgtcgaccgccaggacctcccccgcgtcctcgagcggtaccccgacgtcctgggactcaagcccgacggcacaatcagcacctccgtcgcctaccttgtcggcatcgtcggcgtggcgccacgagacatcggtcccatggtaacgcacttccctttcttccttggcatgagggttggcactaccatcaagccgttctgcgactacatcacctccctcgggctgcccatgcggatcctggcgaggatcctagagaagcgaccttacattctcggctatgatcttgaggaaacggtcaaaccaaacgtggaggcattgctcagctttggcattcagaaggaggccctgccgttggtgattgcacagtacccatctatactcgggctgccactgaaagcgaagctagcggcacaacagtacttcttcaccttgaagctccagatcgacccagatgggttcgcacgtgtgattgagaagttgccacagcttgtaagcttaaatcagaatgtgatcttgaagcctgtggagttcctccgtggacgagggatctccaatgaggatgttgctcggatggtggtccgctgtcctcagattctactgctgcggatcgagctcatgaagaacagtttgtacttcttcaagagtgagatgaagagaccaatgagtgaattgttagaatacccagaatattttacttacagcttggagtcaagaatcaagcctaggtatatgagagttacaagtcgggggattaagtgtagcttggattggttcttgaactgcagtgatatgaggtttgaggacaggatgcaaggggattttatagaaggggatgcaccaggtccttcgtttacgatgggtgggaagcttcagatgccaggcagccagctagtgtcagatgatgacgaggatactgatgatgaggtgctatataggaggacggtcatgatctaatttggtggaagataatcccaatggtctttcatgacatgtttccctgcagtatcatataaacaagtgataagacaccagaatatgattgatgagtgttctcttggcaccagccgcagtagtttgagtgctgccctagcaaaaactcggaggcattgataacgactctgatggtactcgggcacgacctttgatcatgtgccccaaagatggaagtgggaggtccattgacaacctaagcagggaagagtttgtagtaaaacggatatgacgtgctgccaaaaatctccttccagctaaacagtcgattctttcattgattaattaatgctactctaaggcaggtcagggggtgatcatacaataggatcagatatttgtagcatgtgactatctactatttgtaactgaaatgtcccacctactttttccctattgaaatagaacctcatgtacagctcgagtgtgttccatgaaaccatcttgacgtagccaattaattaatatgatcatgattttcttgaaa

SEQ ID NO: 30608 - DNA, 799 bp, Zea Mays
atgcagggtgctctgaggactggcacatgctgttcaggcttgtgacttggcggcaggcaacaggcgggcctctggcgtagccaacggggcagggggaggggggcgcgcgggcggcacagacggaggaaaactttgaacgatgaaaagtatagctgcagcgaaactggctatcgcctgcccttgaaatgtgtacaggcacaaaatgctacaaaagaaggaaacatgagcaagcagaggaagatattggatgatgcatccacatcaggtggcacaaaatccgcatcaggtggtccaaagcattatattacttacagaagttgtgtgccgttggttggagaggagaatttatctgttcttggttttgagataatgatggccggaatgttgctagtaagtggcccgttcgtatattaccggaaacggcgtacaaatcttatgcagggagctgcaagaatcccgacaagtgatcctaggttctagtatggggggacatggggtaataacggatcgcatacttgtgttgatctggtctatctttcttgtgattttgactcttgtcattgtactattatatttcacacatgtaattctggaagaggcgaagtgcttttttagttctcacaggagtaggaaccacagtggttagtctcatcgacctggtttacttgggtcaaatcacttgtgttacatattcaaatttatggttttgttacccccaaaaagttgctctaacagaggaacaactttgttcatgttgataatttatgcgaccaatgcgatcatttttctgaaagctgca

SEQ ID NO: 30609 - DNA, 2465 bp, Zea Mays
cttaccttccggtaaagcaatgcaactacaacgagctgacagcaaagcaaagcttgagaggcttttctcaaaaacgcgccgtcgccgtttcttccccctttttctttgagaaaattcgcccgcgagatctttagtttcagaccccgtgtggattagtcgctgtcacgatcgaggcggggcgccaattgcggtggccaccacctccaatccactccccgcggtggcctcgccgagctgttcttgctccgtcctccctccaactccaagatttgtttcgcacccgattcctgagcttccgcggcgcttcttgctgaaaagaaagctccgagttcttcagttctggatcgatagagaggcggttcctttgcgggctctgagatccagtgtcgaataccgtgtcttgaatcatggccttgtgaattccaatataaacgttcctgcttggcttgctttgttttgacacaagcgttgtactccttggggttttccctccaggttcagctctcgctcttgatttgtctcatcgacgcatcagttgggctgcaggcttagagctggaaggaataatttgactagagaaatggggcagtgttgtagcagagctcccgccccggactctggacggggaggcaccaatggttatggctattctaaccaggcaaagccagcgcaaacaccttcgagttacaaccctcctcagcagccggccgaggtgaggtacacgccgccggcgacgaaccctccggtagtcccacctgtgcctgtgccaccgaagcccacggcggacacgattcttggcaaacagtacgaggacgtgcgctctgtctactccctcggaaaggagcttggccggggccagttcggggtgacatacctctgcacagaggttgcctctggtaagcagtacgcctgcaagtccatctccaagcgcaagcttaccagcaaggcagacagggaggacattcgaagagagatccagatcatgcagcatctgtctggacagccaaacattgttgagttccggggagcatacgaggacaagagcaatgtccatgtggtgatggagctctgcgcaggtggggagctcttcgatcgcatcattgccaaggggcactacacagagcgtgcagctgctacaatctgcagagcagttgtgaatgttgtcaacatttgccacttcatgggtgtgatgcaccgtgacctgaaaccggagaacttcttgcttgcgagcaaggaggagaatgcaatgctcaaggccactgattttgggctttccgtcttcatcgaagaaggaaagatgtacagggacatcgttggaagtgcttattatgttgcgcctgaagtccttaagcggagctatggaaaagagatagatgtttggagcgcaggtgttattttgtacattcttctcagtggtgtgcctccattttgggctgaaactgaaaaggggatatttgatgctattctgcatgaggagattgactttgaaagtcaaccttggccatcaatttctgagagtgctaaagacttggttagaaagatgttgacacgagatccaaagaaaagactgacttcagctcaagttcttcaacattcatggctcagagaaggtggaggtgcatctgataagcctatcgacagtgctgttctttctagaatgaagcagttcagagcaatgaataagctgaaaaagatggccctaaaggttattgcctcaaaccttaacgaggaagagatcaaggggctaaagcaaatgttcatgaacatggacacagacaatagtggcacaatcacgtatgaagaactcaaagcaggactagccaaacttggatcaaagctgtcggaagctgaagtaaagcagttgatggaggctgctgatgttgatgggaatggatccatcgactatgttgagttcatcactgccacaatgcatagacacaagctcgaaagagacgagtatttgtttaaggcattccagtacttcgataaagataacagcggtttcatcacaagagatgagctggagtctgctttgatcgagcatgagatgggtgacacgagtacaataaaggagatcatatcagaagtggacacagacaatgatgggaggattaactatgaggagttctgcgcaatgatgagaggagggatgcagcagccaatgaggctcaagtagcctgttcccttagtagaaatggtgtaccgttagttactgttcttcactctttttcccccttccttacaatgggcgtcgctcttttgcattgtcaagagatgattgtgtatatctttttcttttgctcgtgtttgttgcattgtagtatcctgaacgtcccttccttttgtaagtttgtttatacacaagcacatccaatagaaagtgcaatttgtgtctcactctgtactagttgtgtaattggtgataggaaaaaggtctatttttaattacgtaacgaagattcctt

SEQ ID NO: 30610 - DNA, 2181 bp, Zea Mays
acacacacactcccattcgctcccatccgccaggacactcttctccccggcgcagtcaggacactcttctccccggcgcagtcaggacactcttcttctcaccgccgcgagcactgctctgggcgcgcgccgcctaccctcccctcttccctccctcacctctcgtcctcgaagcaagggtttccctgccccaggctgcctctcgtccgttctccttctctaccgccgccacaactcgcccgccgccccgccctcaccgccggcaacgtgacacgacaagcccacccctttattcctgcagctatactccgatggccctcgtgaagtccgacgctgaggaggagtggtccgactctgacttcgatgatgcctccgactccgaggtcgccgaagctctggactggctcgacgccgtggagggccctgacggctcagctcgcccccacgtcgccttctcggcctccggaggcggggctgcggcgcggaggcctaacgcacacggcggcgtgctgtctcgcccgctccagccgctgtctaaccggacccagaagctggcctcgcacattagtgctactcccttggaggagtgggaaggtaggatgaacgttgcgatgtcaaattccgtcacaactgcaatcagggatagcataagggacacagctattgggaaaataaggaacactgagaaggctgatcgtgctacagtggaacaggctattgacccaagaacacgcatggttttattcaagatgttaaaccgtggtgtctttaataacataaatggctgcatttctacagggaaagaggcaaatgtctatcatgcaacaaagacggatggccaggagcttgcaattaaagtctacaaaacctctgtccttgtttttaaggatagagaccgatatgtccaaggagattatcgttttagacatggttactgcaagcataatcctcggaaaatggttaagacctgggctgaaaaggaaatgagaaatcttctacgagtgagggcagctggaatccgatgccctgcaccattactcctaaggcttcatgtactggtgatggaattcatagggaaaggaggctgggctgctcctcgtctcaaggacgctgctttgtcagatgacaagttgcatgaaagttactttgagataattacaacaatgcggactctttaccaaacgtgcaaactggtccatggtgatttgagtgaatacaatattctatattttgagggtcacttgtatattattgatgtttcacaatccgtcgatcttgatcacccttcagctttggattttctgaaggaagattgcttgcatgtttctcatttctgatgaagatgttgatgattacctggaaaaggctcagcaaaagattttggaaaatggtggtgcggttccaaatgatgatgaaattactcctacagtcatggtgcagacgttggactacgtgaagcaatgtgaggcagatattgtcaacatgtcaataatgcaacgttcatcctctggctatgagccaaccgcagataagctttatgaccaaccattgttagggtttgtgcggactaaaaacacaaacactgaaaaggagcaaggacaaccggcacgaaacttagttgaggttgaagaagacgagagcgaatcttgcttgagttctgatgaagatgattcgtggcacgaggatgatcctaaggtgggacccgaggaaaggaaggctgctcggaaggaaaacaagaagaaagtgaaggaagagaagagggaggcccgcaagaccaagatcccaaaagctgagaagaagaagaggaagaaaatggcgaaggcaaaatgcaagcggtagcgaatatctatgaacaatccagtagttaactccgtcagtagagatggataacttcgtcgtgaatcaaacaagatgatggataacttcattgtgaatcaaacaagatagcctttatgagggagtgcaggttggaagtttggttcacagcgctactttacacatcacaagattattcacgatgttttcaacctttttgttcgtttcaattttgtagagaactactgtacgtaatgtgaccacatatatgtttatcttgagtggaaccgtatagtattttttagagaagagtacaaatggtactttgtgccgctggattctttgacctagtgcaacttaattagg

SEQ ID NO: 30611 - DNA, 2200 bp, Zea Mays
ctcttctcagccgggacatcttagaagctctgtttttaaggtccggatgctgattcatttgacttagagacaatagaagaacctttcttctcaaaaaaatttgcagttcttattaacgttctatcgagatacaggttggaggaaaacatgaagtgcattgtttttgtgaaaagaatcattgtcgcaagagtagtagttcaaattctccaaaatctgaagtgccttgatttttggagatgtgagtttcttgtgggatgccactcggggttaaggaatatgtcaagggataagatgagttctatcattgaaaagttctcttcgggtgaggtaaaccttttggttgctactagtgtaggtgaggagggacttgatattcagacttgctgccttgttgtgcggtttgatctccctgaaactgttaatagctttatccaatcaagggggcgtgcccggatgagtaaatcgaaatatgtttttctcttggagaggggaaatcattctcaggagaagttacttgatgattatattactggtgaaatcattatggataaagagattaacttgagaacatcaaatgatatgttcaattgccttgaggagaacatctatcgagtcaatgatactggtgcttccattagcactgcttgcagtgtatctctattacatcgctactgtgataaccttcctagagatattttttttgttccttccccatcattcttctttgttgatgacgtcgatggaatagtatgcaaattaattcttccaccaaatgctgctttccgtcaagtgaatggtcaaccctgtccatcgaaagatgaagctaagagagatgcatgcttgaaagcatgcatcaaacttcatgaactcggtgctttgacagattttcttctacctggccaaggctctagaaagattaaggtatcaacaacaaataattcagaaagcaacaaagacgatgatgaaagttttagggaagagctttatgagatgttaatccctgcagttctgagaccttcaagatgcaaactagactcctcgtttaagttgcatttctattacatagaatttattcccataccagcagatagacgatatcagatgtttggtctttttgtgatcaatcgccttccagaggaatctgaaaagttggatgttgaattgcatcttgctcgtgcgaggattgtgaaagcaggaattaaatatttgggaaagattgagtttaacaaagaagagatgatactcgcacacaattttcaagaaatgtttttgaaagttctcctggatagatctgagttcacaccatcttatattttgttggggaatgatggtgcattggacatggattcaacattttaccttttacttcccatcaagcagaaattctatggtgataatatgattgattggccagcagtaaagcggtgtttatcatcacctgcatttcaagatccaatgggtttgtctctgcatgattcatatttaccaaatgagtctttgaagcttcttggtggaacatacaacaaagctgatgtgattggcagtttggtctatactccccacaccgacctgtttttcttcgttgatgccattctggatggaacaaatgctaaaagtgagttgaacggtgcaacgtatgcagaacattttaaacaaaggttacatatcaagctttcccatcctgagcagccgcttttgaaagctaagcaactcttctgtctgcgtaatctgcttcataaccgacaactagagagcacagaatctgaggctcgtgaattgatggagcactttgtggagttacctccagagctatgctctttgaagataattgggttctcaaaagatatgggcagttctttgtccttgctaccatctctaatgtatcgcttggagaatttgttggtggctattgagttgaaggatgtcatgtcatcttatttcccagaggcttctcaaattagtgcctcgggtatccttgaatcattgactactgaaaggtgtttagagaggatctctttggagcgattagaagtcctaggtgatgctttcttgaagtatgtagttgggcgtcataactttatttcatatgagggacttgatgaaggtcagttgaccaggagacgttctgatatagtgagtaattcgaatttgtatgagttatcaattagaagaaatttgcaggtgagttgattgtatcgat

SEQ ID NO: 30612 - DNA, 4268 bp, Zea Mays
gtcgcaactcgcaacggggaggggggaaacagcagtcagcaggcggagcagagggtcggacggcgagagagagagagagaaggaaacctaggcagctttccgtttcgggaaattcccgggcgccccgtccgcgctgccccgctgctcccgccgccggtggccaagcccccgcagggccctgcgcggctcgctcccgccaatcgcacgcgggatcgtcgctctcgggagggggtcgggggctcgtggcggcgctgcgctgtgcgcgaggatgcgccgcgcgggcggctcgctgctggtctgttgcgcgcgcccgccgcgagggtaggtttggtgccatggaagggacggcggcggaggtgggcggcgctggcgctgacgcggccggggatgtgcagattaagggtgccaaggagaatgcgcagcccacggcggcgcagcagcagcagccgtccggcagcgaggcgctggagatgccggccacgccactccagcgggacatagactggtccgagcatttctccttcttcacctcgctgggtgggttcgggggcagctcggacggcgcgaggggcctcaccagcgtcggcctgtccaattccgagtccaggccagacagtgtggcacagcgtggcttggaccacgacactgaagagagggtggaggagctcacattgaagaattgcatcaatactggtatccagcctgaggtttctgctggtgggagcacaagcagcagggataggcctacccgtattaagggcctgtggggtaattttacacggatcgcccggagaactagcgatttggccagcagggaaaacaccgcactgagttctggcgacattgcaaacttgagggctggtgatgcttctagcatggaaaagctggcgacgagccttgccagcaatatcatctcaaggaacaacaatgcgtctggcaatgaggcacctatgagtcatgttggatatgtcaataatgagttcatgatgtgcagccagcagattctcttgtctccatggtctaatcaggataatgctcttaaagtaagcagcttctcaaataggattcttaaccggatgagaagtaagactgtggcaccctcatctagggttctacgatcaccacttcaaatcaaatcaaaaggtaaaggggttgtgtgccaaggtgcacgggaggagatccaagtgcaagctaatgcaagacccagagaccctttggacaagattccgactattcctagctcaattcatgattgtatggccagagtggaccatatgcttttcagtactggtggaaatgttacaaaatcccactctgagggatctagcctgagggaactgattaagcctgggtggcaaacaatgactaagtttgagaaaatgcatttgtttaagcagatcattgatcttgtggataagtgtcatgcacagggttttactttgcagcatttgcgaccatcatattttatggtcctttcttcaaatcaagttaaatatatcggctcttataccacacaagatttgccaacatcaatcaaacaagaggttgctagagaagatcttgtgaatagaaaaagaacttttggacagagaattgatcaccaagagtctaatgaccatggaaatttgacgctgaagtatcaaaaggttgatgagcaaggctcagtcgctatcaggcaaccagcaaatacattttggaccgacaaaatatgtgacaatcaaaatgaagatgtcaatcgaggtgttttgaggcaagaaaattttagccacactgccagagaaggttttaagttggtcgaaccatatggcagtaatatatcttgtgctcagcatgtatctagttctgccacccaacaaccagcatttgaattgaggaatcttgaggaaagctggtacaaaagcccagaggagctcagtcaatttaaaggcacattcccatcaaacatctacagccttggggttcttctatttgagctcttttgctgttctgagacatgggaggtgcactgtgctgcaatgtcaaatcttcgtcaacgcatcctgcctccaaattttctttcagaaagtcccaaggaggctggcttctgcctttggttgctgcatccagatccttgttcaagaccaaaagcaaaagagattcttggatgtgacttgataaatgggggtcaggatttgtcgttgttagatgaggcaccagtttccatcggtgaagatgacactgaatctagtttgctacttaacttcctttctcaattgaaagaagaaaaggcgatgcagtctgccaagttatcggcagagcttggaagcttacaaacagatatcacagaggttgacaaaagacactcagcaagaatgagattgagtttagatgatacagatgtactgccaagttctagtgctttgtcaggagcttctgtgagtgcccttcaaggtgcattgctgtcaggtttgttaccagcgtcatacaagtcgagcatatatgaggagagggtaatgaggaatttggtgcagcttgaaaatgcatactactccatgaggtcctcgctggacacctgtgaaacaaatgtaatcaaacggccagataacgaggctttgagggcccgtgaaaatttccatcaacttcatagtgattctgatgccaaggacgagaaaacagatcgtcttggatgcttttttgatggtttatgcaaatatgcccggcacaataggtttgaggtacgaggaattttgaagaatgcagatatacttaactctccgaatgtcatctgttcgttgagttttgatagggatgaagaatattttgctgctgctggagtttcaaagaaaataaaaatatttgaatttgatgcactcttaaatgatcgtgttgatattcattacccactgatagagatgcctagcaagtccaagcttagctgtgtctgttggaacaactatataaagaactacctggcttcaacagactatgatggcactgttcagctatgggatgccagctctggtcaaggattcacacagtttacagagcaccggaaaaggacttggtctgtgagtttttcagatgtcgaccctactaagttggcaagtggtagtgatgattgttgcgtgaaagtatggagtattaatcagaaaaattgtgttgatacaatcagaaatgtggccaatgtatgctgtgtacaattctctccatactcctcccgcatgctagcttttggttcagctgattacaagatatactgttatgatctgaggaacacaaggataccttggtgtactattttgggacatgggaaagctgtcagttatgtgaggttcttggatccatacacacttgtctctgcatcaaccgacaacacattgaagatatgggatcttaaccagactaattgcagtggattatctaccgattcttgcagcctgactctgaatggtcataccaatgagaagaattttgtagggctatctgttcatgatggatacataacttgtggctctgaaaccaatgaagtgttttcttactacaaaactttccccatgccaataacttctcataggtttggttctattgacccgataactggacaagtgacaaatgaagacaaccagcaatttgtgtccagtgtttgctggagagggaagtcaaacatggtagtggctgccaactccagtggtagcatcaaagtgcttgagcttgtgtgaatgaacgagagtcatattggagaagaaggttctagtgttgccatgcgggcctgcgatgctttcgtgcccttgggcactaaaagactcgactgctctatgcaagcatcctacaacaccgatcattggttattggaagctttgcttgaaactcacaagcaaactaaagtttttttttttccaagagtatgatggcctcacctccatttttgtgtttggcattttgagacggtacctattcatcgtgatgcaaacttcttttgggctagaggtgcgcgggacttgctatgactgttaagagcaaacgatggaaagaaagggaaaaaaatgatcatgtagctcgaagaagttaatcgtgctgtgtgaatgtttcaaggagaatgtctcaaatagttttatacccccttcattattgtacatatatctagggctgcctaatgaaaggccttgtaagttgtaactagagtagaatgctgatcatgagttaagtataatgaatggtcttcacaaaagattaatcaatggaagattcatacaaagtataatgaatgattatccttttggctggaacaa

SEQ ID NO: 30613 - DNA, 777 bp, Zea Mays
caagctctccctctcgctctccctctgcggtgcggcaccgccgatcccctcgccgtcgattcatatcacccctttcgattcaagcgacgccgcggccgccggccatcgcatagtgattcagaggatgaattagatggccaagttaccccatacaacttaatggagaaaagggacctagcgaagagcattcttcttgagcttgaaagcgagcatcatctaaaagttcaagaagaagttagaagtaagctagctttgttggaggtatgccaccaaaatgaaatccatagaaccatttctgcatttgcccgacttcagaaatatgcagaatcaagaaaagagatcgacagaagacttgatgtacacttccagagaagaatggcagaagtactcgataagcacttatctatggtccaaagggatcatgaacaaaaatcccagattgttgaacgtcgaataagagatgatgcagctcttgaagaagctaaaagaaaagagcaagctgtcaaggaagaaaagttaaggcaggaaagagcccagcaagaagcagaggctaggcagaaggaagctgcaaagttagcagctgaagcgcgaaaaacagcatttgaggctgctaaaaaggaagcggcagaaaagcaggctgctaaattgagagatgcagcagcaacttcccaatctagtccagatttgcagaataatattgcaggctggagttatgtgaagggcgggcctggtgcagtgttagagcctaccgtctgtaatcggaaggtcccgggttcg

SEQ ID NO: 30614 - DNA, 1544 bp, Zea Mays
atcacgaactagctatcactgccaaaaaatgcagatattctgaacggcacccgtcatatatgttctggcttgactaggttgagggaagttgaagcaaaagtctaagcaaaaatgttttacgggggatatgcttaccatggcaactcgtttgagcaaacataccgttgttatccagcatcgttttttgataagccacacctggaaggcggtgataaagtaataatgccaccttctgcccttgatcgtcttgcttccttgcacatcgagtaccctatgctatttgagctgcacaatgatgcaacccagcggatttcacactgtggtgttttggagtttgttgcagaagaaggcatgatcatcatgccctattggatgatgcaaaacatgctgcttcaagagggtgacactgtccatgtaaaaaatgcgactcttcccaagggcacatatgtgaaattgcaacctcacacaactgattttctggatatttcaaacccgaaagccatcttggaaaaaactttaagaaatttctcctgcttaaccacgggagacagcatcatggtagcctacaacaacaaacaatattatattgatattgttgaaacaaagcctgcttctgcggttagcattattgagacagactgtgaagtggactttgcgcctcctcttgattataaagaacctgagaaaccacgacaaccaacagttcctgcaagcaaggcacctgctgaagatggcaacactgcagtggaggatgaaccaaaattcaaaccatttactggttttggaaagcggttggatggaaaagcctcaaaactgcaagcatcagaggttccttccactgcactttctgcaccttcagattcaaacaaaagagcaaatcagcaaatctcagcacccgcagcttcaggagctagcaattacagtcgacagaaaactgggaaacttgtttttggttcaagtgcaagcaacaataaggaaccacaaaaggctcctgctaaagaggagcaacccgcaaagaaggacgacgagctgaggttccaagcgttcagcgggaagagctactcattgaaacgttagctgcttcagttaaccttcaaattcgccgctactctttcgtttcgtgcatggtgggtgttctggcacctggtcaccaccatgtagatatgaattgaagtatgtatatgcttatcttgatggaaacatgacagtctgtttatttaagcccaaaagtttaaaacagcgctattgttcttacccagtgtgtgttttggaatctgctcctgttaattttcgggccatggtttcggattagtagaccaaagcaggatactgaacgtgtcagcaatcattattagcggcagacgagatgtgatgatcgttgggccctgggagtttggtcatgtaccaatattatagaccgtactccaagtctccaatactgattgctgaatattgaacgaggagcaagtaaacaagctccttcaggtctcagttgccattcaaaaaagttgcaccggctttacaacgcagcataggtgactcgt

SEQ ID NO: 30615 - DNA, 3988 bp, Zea Mays
cccaaaccaattccaaaactgcaggcctctccaaaattcgaacaccctcgcctggaaccttctacgagccagctccgagcggttgccgtcccataatctgagagacggtgccgtgggtttgcggcgcctgggtcgccagtaaagtgcgggccgagatggagtcctcgtcgtcgggcggcgggctggcgcggcggcggagtagcggcggctggggcagcttcagcggcgacacggacccgttcgacatccccgcgaagggcgcacccctcgagcggcttaggaagtggcggcaagcagcccttgtgctgaatgcatcaaggcgctttaggtacacactcgatttgaaaaaggaggaacaaaatgaggaaatcaggagaaaaattcgtgcaaaggcatatgttataacggctgcttttcgtttcaaagaggctggccgagtccatgttcggtctgaagaaacaaaagtaccgattgctgatggtgcacttggctttggaatcaaagaagacgagattacagcactgacaagggatcacaactactctggtctgcagcaatatggaggggtttctggtgtagcacatatgctaaaaaccgattcggagaagggcattagtggagatgactcagatttgatagcaaggaaaaatacatttggttcaaacacatatcctcgtaagaaaggaagaagttttttggctttcgtatgggatgcttgtaaagacctgacgctaatcatcctcatggttgctgctgctgtttcactggcattgggcataacaacagagggcataaaagaaggctggtatgatggagcgagcattgcctttgctgttcttctagttgtatttgttacagctatcagcgactacaagcaatcactacaatttcaaaatctgaatgaagaaaaacagaacattcgtttggaggttgttagaggtggaaggcgaatcacagtatcaatatatgatttggttgttggagatgttgtccctctcaaaattggtgaccaggtccctgctgatggtatccttatcaatggccactctctttccatagatgaatcaagcatgacgggagaaagtaaaattgtacacaaagatcaaaagtcgccatttctaatgtcaggttgcaaagttgccgatggctatggcacaatgctggtaactgctgttggagtcaacactgaatgggggttgctaatggcaagcatatctgaagattcgggtgaagagacaccactccaggttcgtttgaatggtgtcgctactttcattggaatggttggactttctgttgcccttgcagttctggttgtacttttggccagatgggtgtaggccagacgatacgtggagtagttagaatattcacagtggctgtcactattgtggtcgtggctgttccagaaggactaccattagctgtcacactgacgcttgctttctcaatgcgcaaaatgatgaaggacaaggctctggtcaggaggctttctgcatgtgaaacgatgggttctgccacaacaatctgcagtgacaagactggcaccttaactttaaatcagatgactgttgttgaggcatattttggtggaaagaagatggactcaccagataatgcacaaatgttatctgctgatgtcacatcactgattgttgaaggaattgcacagaacacttctggaagcatatttgagcccgagggtggtcaagaaccggaggtgactggatcacctacagaaaaggctatattgtcttgggggctaaagctgggtatgaaattcaatgaaacaagattgaagtcatctattcttcatgtatttcctttcaactcagagaaaaagcgaggatggccctgaagtccatatacactggaaaggagcagctgaaatcattttggattcatgcacaagctggcttgacactgatggttcgaagcactcaatgactcctgaaaaaattgctgaattcaagaaattcattgaagatatggctgtggctagcctccgctgtgttgcctttgcctatataactcatgagatggatgatgttccaaacgaagatcagagggcagagtggaaactgcctgaagataacctcattatgcttggaattgtgggaataaaggatccctgccgtccaggagttcgagattctgttcgtttatgtcaggcagctggcattaaggtgcgcatggttactggtgataatcttcaaactgcgagagccattgccctggaatgcgggatacttgatgatcccaatgtgttggagcctgtcatcattgaaggaaaagcattccgggtgctgtcagacttagaaagggaggaagctgctgaaaaaatatctgtgatggggaggtcttcaccaaatgataaacttttacttgttaaggcactgagggcaagaggtcatgttgttgctgttactggagatggcacaaatgatgccccagcactgcatgaggcagatattggtctatcaatgggcattcagggaactgaagttgccaaggagagttctgatattattatcttggatgacaatttcgcatcagtcgtgagggttgtcagatggggtcgttcggtgtatgcaaacatacagaagtttatacaattccaactaacggtcaacgtcgcagctctgataatcaatgtagttgctgccgtcagttctggaaatgtgccgttgaatgctgttcagttgctgtgggttaacctaattatggatactttgggtgcccttgcattggcgacagaaccacctacaaaccatcttatggagagacccccagtagggagaagggagccattgattacaaatatcatgtggagaaacttaattatcatggctttgtttcaagtttcagttctcctcactctcaacttcaagggaataagcctcctgcagttgaaaaatgatgatccagcacatgcagataaagtgaaaaataccttcattttcaacacatttgttctctgccaggtgttcaacgaattcaattcgcgtaaaccagatgagctgaatatattcaagggcatttcagggaaccatctgtttattggcatcatagctataacagttgtactccaggcgcttatcgttgagttccttggcaagtttgcctcaacggtaaggctaagttggcagttgtggttggtatcgataggtcttgctttcttcggctggccgctggcattcgtggggaagcttattcctgttcctaaacgtccattgggagaattctttgcatgctgctgtatctgcaaggggagcaaacaagcccctgatgacgcaacctctaatgataaggaagacaacaagcccgagccttgagatgtcagcaagattgatggttgctaacaatgaccttgtgctgtttcttaccgggttttgacgtgttggatttgtgattaccactgattgctattgtacttcaaacaggaaggctggaaatgcaactcggcttctcatgagaccttgtcatttgctgtagttcgttcgcaactgtatattgtagcttggaagactctgtgccgtggtgcgtgtatttgagaaatttctatgcaaagtgagctggcgataacattggatggcgcagcaaagcatcgcgcgcagtgtttcctaggcatcatccagtgcggctcgtggatgcttttcgtgggtggagctgcctgtgttcgtgccatagcatttgacgagtgggcgcccgctgtcggctttgtgccttgaagcctccgatgcagagaaaacaaggtgagttggaacccgagacgtgtctgaccagcatggcccgtagaaaagtttgccccggccggctaaaatttcccgtgctcgtactttagccgtgcacttgtgcgtccatgtccgtacgtaccgttacgtgaagccgttgccttctctatatttcttgtcagctgtccagtgtattacacgcatgcgcgtttcattgttgagccccacggggccgaggcgacagttgacagcag

SEQ ID NO: 30616 - DNA, 465 bp, Zea Mays
cgtacgtcgtacctcgtgtactcggctgtctcccccacaaccagtcgcctacccactgcctcgcatcggcatcggcgtgccggtgctgccaagctaaaattccccaactcgcgtcgcgtcgtcagtgtgcgtgccagtcctccggcccaaaccccccgcacccaacccccagccccggcaaccgatggcggggtccgcggccgacgcggagcaggagcaaaagcgggcagcggcggcggcgtacgactacgagggcgacgcgcgctgggccgagtactggtccaacgtactcgtcccgccgaacctcgcctcccgccccgacgtcgtcgaccacttgaagcgcaagttctaccagcgctacatcactgcacctgaacacggcatgctcgatcgagattccatgtgttgattgcttccaaccctgggtgcttgtgctactcattcaagctcgtgatttcattatgg

SEQ ID NO: 30617 - DNA, 479 bp, Zea Mays
cgccaagtaccgaaaacaagaaaaaatggcgaatcccgccgaatttcgctcgggattttcttccctgtatggcatacatgaaattgataagctccaccattacaggcctggtcactgtatgtaaatcaatttatacatatatgcatgagagacgtaacatataaatattatatatttggatagtcaactcagctcaacatgtatttcgacatgcgagggtaagacaaccttcgagtattatattaagaataagatattctcatataggttgagaaacctccgaacccctgctccacctatacacagcggcatcgaagctcatgtgagaacgaccgccaccggagctgatctttagacccgtgctttggcgtgggacagacgaggagatttttttaaccacagcttgaaattcgctctcacggggagtcgaacccaggacttgaggagtgctactcagaccatctaccgactcagctata

SEQ ID NO: 30618 - DNA, 4424 bp, Zea Mays
cgccgcgccgcaacccgcagcctccccgcatacgcccacagccgccccacgcgcgcatcccgcagccgcgcgatccgtccgcttcctcctccccgcgcccgcagcccccgccgccgatgccagccgccgcgcccgcgcaagggaagttgcttcccaaatcccgcagacaagatttaatcccgtgattcttcccatccatggcagccgtgcccgcaaaccgcgcctccccacgactcccacttccatggcgtcgcccccttccatccatggcagtcacgctccctctgcgcccttccatccatggctgcggctccctccgcgccgcaattcttcccatcctctccttccgcgcggtttgcggctaccaatcctctccctctgcgtcgtgttcttcccatcctctccctccgcgccggatctcgccccatgtccaccaacgccggtgtccgtgatggcgcgctcggggcagcggtggacgcagcctttgccaggcgtgtgctccaggccgaggccctcctcgggtacctctccgcgctggccaccagcccgcgtgccgagggcgacagggtggaccccgccgtcgccgcggcgcagctcggggcgctcggccggtggaagggctcggcgaggggccttcccgagtacacggtcgtccacggcatcgatggtgccgtcgtcgccgcccctgggagagccaaagccaagcagaggaggccgcagtcgaccggatttgggaatcctgctcctgccaaacgggatgaacggaaggaagcaaaatctttctggggttgatttggcttgaaggaagcgggatctttctggacaatggctgtctagcttcatccattctggtacagagggatggagtcttgtaagaaggtagctgcaagcttgaagtcgtgtgagccatgggggaacagggcatcctggacaaacgccgttgggccaggttggaagttgagctttgctgttgagccatggactaagggctttagcgcgtcgtgtgcggcgccatattctgctggagccacagagcatcaattatcgctcgatgagaaggtggataactccaccgttgcatctggttttgatgggtatgtaccatattattaatgcctctattttctgtttatataaacagaccattaataattttcaggtaaagttatctgtcatgttgtcaataatttctgtttatataaacagaccattaatgcatctgattctgatgcaggtaaagttatctatcagctagattcatggcaggaaaggttttttctattgtcggtatccagcacctaatggcaattctgtgaagcccaaaggttccaagtcaccatgaaaaaattgaaatgacgagatctcttaatctaattgttgcaccttggaaggtctgaaccatcatagtttaattgtatcacccatttacacaagttcctaccatcagagttcaactgtatcacccatccataagcaattccttttgttgaaatttatgagaagacatatgcctctgttaagtctcaggaacttttttgctgggaagccaattccttactgatctgagggacaacatttttgtttgcctgatataaggtaaagtgtgaaagggaaacgcgaaaagaaacgtgtcctggtcccaagtcacctgccatactgaacacgattgatcgcagaaagaaacacgttctggtctagactgacagttttggagctggagccggccatgcgctcgatcagagttccgctgcagccacgacctctctcccgaacgcgcacgaggagaccaggtggaacatatgcaagcaggttctagagcaataaccccatgaatccagatcgggggtctgcatctacacgggcgtgtactccgcaccgctcccctccggccccgaccgccgtgtgctcgttgtagccggggtcgacctcaaccacgacgacgatgcggtctcctcgccccaggctcgacctcctcgctgacctcgccctgctccacctcaactcgcgatgaggattgtcggcacgttcacaccgcgccgttgcagaacgttggagcctctcagaactctagaagctgcctaccaccacgcaccctaagataggggcatatctgtgcatggtaccatcttcatcatgtagctgggatgagctggcaccatgaaagaattcaagtggttaaatcatgcatctgcagaaatattgtactctcaaatggtgggttgctgcgtcatgggagtttgggtgaaggcctgaaggatgtgatgcaaaacgtcgatgcaggtctgggatgtccgcctcattatggatcaaaattcatgacgttctaaaggtgtcggatgagtacctatatactccctcccagaaaacaaggcgcctcattacactattggaagctggacgacatggatgactctggcaagatgcggtgggagcacgacgacatggatgactccgaccatgagttcgacaggaagcctagcaacagtacgcagtagcaaggttgaccagaggggcagtggagactaacccaacaccccctcctccgaccgtcatagcgcttctttcctctggcttcatttcttacctatgtatggatggtcttcaccactggttacatctagcaagtcctcctagggtgacatgaaggagattgtcatgctgccaaagcacatcaaggacaatgcaaacaaggacagaggaagaccggacatgccatttccaggaaatggaggcagcatgctgctgacaagcgattacttagggagcagaagaatgctcttgctgttgcagcattgtgttctctatcacttggcccaccagttcataaaagtacaacggttgataaatccagtggcgatgagctccacctgctgctgcttataaggtaggtggagatggtcgagaaattgagacacatggttctgctgtcctgggtaacttctgcgacaagcgcattcgatggtacaaaagacataatggaagctcttagcaacaaacatactaatctagccaatgagcttgagcgcaatactttttgtttgcgcttgctgggggcaagctgatagagcgtattcgtgccttgtcatttcaaagcattgtgcgctaggaaatttcttggtttgactatgtctcaaattccagctttagggtggtgctgctggagctcatgataggcagacggtcaatggacaagagccgatcagcaggtctgccaccagaagtttcttttatgctggatttgtggtatgaagaaactttgttgaggtattatgcaccagctttggggttcttgatgtttgctgttggtgtaaactcaagcgccaaggatttgattgaaacaataaaaaggccagatgctattgctgcgggctatatcagacagtttgtcaagctcgtcaccgtcgacgaccctttcatcaccacggactacatggtttcgggaggatcaacgggctcgtggccagggtccccctctagaaatgtggggaaaattgatgaggcatcagaactgaggagaactgtgagtgatatcaagcacaatgttcagacacagcttagcgagaatgctaagaccaataaacgagtgattgggattcacaaagaattgcagaaactgcttagagaagctattcagaacaccatcaattcagtcaccatggtagcaaccctgattgcctccattgccttcgttgtcatattcaatttgccaggtcaatacttccaagatgtgaatagtgggggagacattggtgaggctcaaacaactatgattgtgagtgaggcggtggtggtggacacgcgcaggacgggacggacgaagcatcttccaagccggggcagagcgctgtcgaagcagccagcaacaaaagctttcgctggagccgctggtggagtacagagacgtgggaaccaggaagggtattgctgttgaccgattagttgggtctcaagatctcagaagtaaagacgattttctgacaagagcactggaacatattcttattctcaagacgaaagggataatcgatgagaagaagaaagatgacgaagatgacgatgaagaaagcgaggctaagaataggagggttaggtcctcaactgctcaagcctctgactcagactgaacctaagatgaggattgaggactcaccttttttgcactttggattttgtttgtttgttctgtgatgtgctgtattgtactgtaattgatttgtgtaaccatgtatcggtaccagacaccacaacaagaacatgtacaagagattctttagcatccattgtgtgtaaaagttagggtttgtggctgccttttatttcatttttccttagctgtcataggatggtacaacacaacaagaacatgtacaagtatgtcatagcttgtctttcttgcttcttaagacattgttctgccttttggc

SEQ ID NO: 30619 - DNA, 1818 bp, Zea Mays
ccacgggccacctagcatcccgctcccacggtccccgcatccccaattcccagcggaaaacccccagccccctagcctcctagcaccttctcctgtccttctaaccctagccgcccaagcccaccagccgccgctagctgctgccgttctccactctccacggaccatggctccacggccagccgccaaccaccaggccacggccgagcagggcgccaagcacctaggccggccgagcggtggctgccagcaagacgaagatctacatggtgcttgagctcgtcaacggcggcgagctgctggacaggattgcggccagtgagggaaagctcccggagcaggagctccccaggtgctaattccttatgccgaatgcctgcaggttctgcagaacagagggtacgacggctgaaatacacacaatttagttgaatttaagttatgcctagtgtgctatggccactagtttgaatttaagttagatttaaaggttacacacaatttactagttttattatctgaatggttgaattggtctcgtactactgtacataatgacagctgaaatacatcatgtctctaccactttagcctttcgttttttatacactaatactgatctacatggactgcaatagtattcacaccacagtgaatgttgagcgtttattcagtaacactaatataggcaagaggtatatgtatttcataggcaaaagtaacactgaagacataggcaagaagtataggcaacaataacactgatatacttagagggaaaagggtatatgtatttctagcccttttataacagtcatttctagcagttttagcaaatgactggttcagtgtgtatttatatagcagtttcagttttatagcagttttagttctagcacttttagcaaatgtatatatatatatatatatatttcatagcagtttcatagcccagccgccgcggcctccggctgggcacgaggcccagttgcccgacaggccgtccagggcgtgcctgagaatacagatttgtcttcgaaaatcatctcacctgttttcttttttgcagattgtactttacttggagctttatgcaagctgtgtggagtacatcacgccgctaagagacagcatgtcatcagtgtttccctcagcacatttagcttttgccagcatcgacctgaatgcacacactgtctttgcgatcacaacggccttggcaattctccaaacagtctgtctcaggaacctcagtctcctctcgtatctttctgctgacggtgtgatggcgacaattgcagtcatcctctgcctgttctgggttgcctgttctgggttgctctgatactcccatgtgcgtgctacctctccatcaagaagggcgcagtgccattgtgggagatcatcctgtgcatagtcatcataatgatcggcgtcgtatgtgcatgcgtgggatcatacacctcagtcagccagatgattagcagcaccaaatagcgcacgctagctgatatttatctagtgtctacggatccttccaaatgctttgacagagttggaactggcagcttttcgtagctaagtttatttgttccttctttatggcagaaatttggtaagagagagtttagttgtgggaggacaggcggcgaaggagtaatctgagtttagtgtggtgcttttgtgactgatcatctctggagcttttgtgaatgatctagctagctatctgtaaatgatctagttgtgaatgatattataattgtgatgcttttgtgaatatataattgtggtgcttttgtatttatgtgatggatc

SEQ ID NO: 30620 - DNA, 2169 bp, Zea Mays
tacacgacactactatgacagacttattttgaaacatagaacaatgcttattcaacattattatacaatcaagatcctaactttttgggggggttgcaacaatggagagtggagacaacatggagacctgagctgagcttaacccgcaaaagatcatacaccattctgtgatgcttcacaaggttccgcacctcaaattttggtgaaactgccttgttgttgtcttcatatctagcgcactggcatcccatgtagactgcagtttttgtcaaaaatgattttttttgaataagtagacattatatccttcaagatttttatatggaaatcctaaattgtgggcatattgatttttactctatttcttaaatgtaaagttgtaaacttgaatcacctagaaggaaccgtgttaagaagaaataagcaactatgtcttttcttctggaaagataaaatgtgtttatatttgaaagctagaaacatagctttctattatgtcacatcagtctaaaccagaatttaatcattttttataatgcacgtgcaatgagataaaaccaaaacaccttataatttggaatagagacttaacattttgttggctgggacattgggctatattttgcagcctcctcacttggcacagataacttcatttgttttccagagactgtattaatactttgcaggaataaacattgtgtcttgttatccattgcaatatacaacacttaagcccttggctgatagagtgattgtaaagattaactcttccgaggagaagacaactggtggaattttgcttccaacgactgctcagtctagacctcagggtggcaagaaatacgtcaaggaaaaatgtcgaacaactcagaagataaattcaagaactggttgcttcaacaagagtctgtccatgaggatggcatgcaacattacttgcccttcgattgagataggtggctacggtgatgctttgttgaacctgatatacgcatctccatcaagccagttcgaagagctcagtttagaatgtgagctagatgctacaggcaatcattctagagtgaaggatgctcaagttcatggctcacctatacctgagagtaatggaagattatcgacaactgctcagactaaaatgatgtccacagtctcagaagatgcaattcttgttggctcatctttcagataccaaagtagcctaggtaacaacaataagagggttgggctttttgatatgggtgatggaagtagtgagcctgctgctgaggacaacaatcaaatgcatcaggtctatcatgggttttattctgcatacgataatacaactctactatatgagatcctgaagtctattaaatgggcaagaaaaacatatgtaaatcgacctgtaaatgttgttggacactccattggaggggatctagcttcattttgtgcccttgatctatttgacgttgagctcatgacttttggacagcctcggttaggcaatcctgcatttgttgtatgccttggctaacaagtcccaagaacaatccatgtgacccataaaaacgatattgtgccgcaattaccaccgtattattattacttaagtaaatggacataccaccacttcgctagagaggtttgacttcatgagagcatagatggaaatgtagttgccagaaatgagattgtatgtgatgattctggtgaggacccgacctatagcagaagtgggtcatgggatgagcgtagcagataatcttgagtactacagtgtcacactacatgttgactcaaggggaacctgtcagttcgtgattggtacagccaaccaagtatacaactacattcgtgaagttgatggatccatcatcttgttaagatatatatgcaagaaccatgagctctagaatcaatgtgactttgtatgccacgaaatgcacccttgtacaatatttttattttcaatttgtgtacagctcatgaaatactgttgtgtacaactcatgaaatactgggctctccagagggtaaggactaaggagagactcacctttttaaatgcacccctttgaccaagtgacattcgatacattgtaagctccataagattgccgcacaattcaatttgtgtatatcaataacactatgtattaccaagttatgcaagtatta

SEQ ID NO: 30621 - DNA, 844 bp, Zea Mays
taacccgcatcccccttccgcggcatccatcgtcggctcctcgacaaggcaacaggctgttggaatatggaccaacaaggcatgcatgaccatgaaggggtccacgttgttggatttgaagtcccgccttcaccggattccagctacgacaaccctgttcctgggaatgaagacgaaggccgggagcccccactgatgccacctcatctgcagcacacgctgctgagcttcccaccaagccaagacgagtcgagcccgctgccccagccccagaccgtggttctgaaccacctttacatcgagaaagagaacacgaggtccatggttgctctggggatcacgcaccggttcaaggctaagttcgtgaccgtcgtgctttacaagccagtgctgaggcggtagggtgtggtcgtgtgcctgcgctcctgctccctcttctcgcgcaggatcggtaatggtaatgccgtaatggtaatggtaattgaacaccccttgggttgcagcccaccccttccagttgttgttattgttgttgtagtggtgcagaaacgggcgagaacgtcattttcgaatgattattagccttgttgtacctaatttggctgctggtggtggcagtgatggtttggttggagtagtttgcttgtgatttggcaccattcttctgtcgctgctgttatgattgcggatgtgccggctctctgcattttgaccggtcaatcggacagtgcaattggaccgagacgagagtaccttcgctcacaaatattcctggggtggagacatgttgcaccataggaatatcagaaaaattctatagctctaatagttagagtacgtaaat

SEQ ID NO: 30622 - DNA, 1084 bp, Zea Mays
accatgaatcatgtttctgtcggtagaggacttaaagctgcgatggagggcgggatcaacaggaaagatttgtttgtgacgtcgaagctatggtgcaccgagctggctcctgatagggttcggccagcactcgagaaaacactcaaggacttgcagctggattacctggatctctaccttatccactggcccttcaggctgaaagacggggcgcacatgcccccggaagccggggaggtgctggagttcgatatggaaggggtgtggagggagatggaaggcctcgtgaaagacgggctcgtcaaggatataggtgtctgcaattacacggtcgccaagctcaaccgcctgatgcggtcagcgaatgttccaccggcagtgtgccagatggaaatgcaccctgggtggaagaacgacaggatctttgaggcatgcaagaagcatgggatccatgttactgcttactctccgctgggttcgtcagagaagaacctagcgcacgacccgctcgtcgaaaaggtagccaacaaactggacaagaccccggggcaggtgctcctcaggtgggcgctccagagggggacaagcgtcatccctaaatcgaccagggacgaaaggatcaaagagaacatccaggtgttcgggtgggagatccctgaggaggacttcagggccctgtgcggcatcaaagatgagaagcgcgtgctgaccggagaggagctcttcgtcaacaagacccacgggccgtacaagagcgcaaccgaggtgtgggaccacgaggactgagctgagctgccgtgccgccggatgcctcccactcccacctgatgaaccagaataaaggataccgacgcacctgtcagtcacctccttccccgtgccttgtgagagcggcagcctctcgcacagggaagatgctctgtgagagcagcagcctcgcacgagaaagatgtagaagagtgtgtgcgcaacacactcctgtactgtacgatagactgaataataaagaagaaaacgatccacatctcatgcaaactgcaatctgcagagtgcaacgcagcgccggccgaaccaagtttttgta

SEQ ID NO: 30623 - DNA, 1460 bp, Zea Mays
tacagtttccacaaacacaaggatctactccatgagcacaatggcacaactggtgccatggaggagtcatagcccagttgaatacaaggaaggccgtgacaaagattatgggacttctggaaagaaggataagtcaagagatctagatgacacatgtgatgctagaagaggtcatgaaaccgataggcactctgataagcattcctttggaacatcacgtgaatccaagaagcatgatgactatcggaggtaccatgataagtatggtgatgattatggtaggagccatccaagagcctctcggtcagaccgggaatcaagggctgatacttattatgatcgctcaaagcatgataacacatctggtagatcacgtggtgatcagcgagatgttggcagtaggtacggagaaaaatctgttaatcgagatcagaggagtataaatgaaggaaagcaggagtcccctcgtggctatcaaaagaatgatggcggagaatacaataaacatatggatgcaagaaagcaagagtacaaaggttatggagatgatagagatcattacagggttgttcgtaagaacaaggaaaccatcaaagaggaggaggactcgaagaggagaaatggaaaggaaattgagaaagaagctttggtggaaactagggataagaaaagaagtttattcagctctactgggccaaatgtggataatccagatgtcaaactatcctcagccacaaatgaagccttggataacgctgcagaaaccgtagacggtgtgaatgcagctaaagttgcagctatgaaagctgctgaattagtgaataggaacattgcagcatttggtgctggaactgggcgcctatcaactgatcagaagaaaaagcttctttggggtaacaaaacgagtaatccctctgaggagacaagtaaacgttgggacttattttctgaccgtgagcgccaagagaaatttaacaaactcatgggtgtgaagagcagtgccccagttcaggaaaacacggtcgagaacaaggtcgggagctcggcggaagaagccaagaaactggaggagctcgacaccaacctggagaaacattacatagcaggcctccgcaggagagatggcaggacagtcggccttggcctgtagaaactctgcttgcagttgcagatgctgcggcattgaaaaatgcagagagcttgctctgtacaatctacagtgccttgtttattcttgcacttacaaaatttcctgtacggcttacgttgactgtttccgggttatcttgaagctctagaacatgtgtccctgattgacactcctgtactgcgtttgcataaccccgtcattcttgagtagtaattcaccggttattgttttctctttgcatccaaagatgttttgcttgaggcctaactatgcctatctagaaaattggttacgactaacgcaacgcccg

SEQ ID NO: 30624 - DNA, 1657 bp, Zea Mays
cctccatctcctcgcgactgccgcacacggcacatctcagcgcctcgcctccaccagtccacctccacaacgtcaccttcacctcctcgccgccagacgcgcccgccgccaccccgtgagccggcaacctcccaccatctagcctctgcgcccgcccggccaccgggcactggccacgtccggccgacggccgcctgaggcagtgaggcctgaccacgccctcccttctccactttgtgtctgtgcccggtcttggattcgtggttgtctccgccactgatctcctcctagcacggcagcaccccagagccctagcgcaagcctggtgctccagatctccaccctgaccatgtcggggcggagacaggcctggcagtttgcggccgcgctggtcttcttccacggctccgagtacgtcctcgctgccgctttccacggccgccagaacgtcaccgctacttcacttcttattagcaagcagtatgtattggcaatgggttttgcaatgctggaacacctgacagaaattcttattctcccggaagtaaaggagttctggtttgtcagtaatattggccttctaatggttattatcggtgaaattatccgtaaacttgctgtagtgacagctggacgtgccttcacacacgttataagaacttattatgaagatcagcatcaattgatcacgcatggactgtataggtttatgcgccaccctgggtattctggctttcttatatgggcagtaggaacccaggttatgctgtgtaatccattatcaacagttgcattcacattggtcttgtggcgattcttttcaaaacggataccgtatgaagaatttttcttgaagcagttctttggctctgaatacgatgaatatgcacagagagtacactctggaataccatttattaaatgaaaaaagaggatgtaaagggaatgcaggtagagctaatggcccaagctaaaagaatgaatcatgattatcattcgaggcaattcctttatcatatttcatctgctgtattctccaagtgacattttcactgatgtatgctcgataactccaataaaggcataaagcgagagatgctacagctttgttgaatgcaaacaggtttgctcgtgttgaattattgtaaggccgcgcatagcagagcgtgcatatgttgaattattgttgaatgcaaacattgttttgtaccgtagactatattgtttacagagtagagtttgaaatagattagagtttgaaatagagtaaagtttgaaatagagtagagtttgaaatagtgagtaagataggagatgagatagagaggctgctggagatagcctatcgtattacaagtgcagaaacttgctccagcttgcttgggacaaaagaatctgatgccatttttgttgttattccagaacagcacaactcaactatcagggtttttttatctggttataagctgttgttttgtactgagatttcattgttcacttgaagaaacccttgctgggagagcagaatgcatggtgctgtttaagtgatcccgtgttatatttactcatgtagtcatggcatacatgtcaagtatgctggttgcttttctgctgtccggcgtcatgttctaaattaatatatgtagtgatatttctg

SEQ ID NO: 30625 - DNA, 4028 bp, Zea Mays
tctgcctatattctttgaagatctgcgctactcaatctggtgaacacgtttttagtataaatagctctgaagtggtgtgattcagatctattggtctcaacgctatgtagccgatctatacatactcgtgaaggaataattgttaaagcattggattgtgctgctgccgcagctaatcgtgatgctttagcgaagactgtatatgcaagattatttgactggcttgttgagaatattaataagtctattggtcaagatgtggattccaagctacaaattggtgtgctggatatctacggctttgaaagcttcaaaaacaacagctttgagcagttctgcattaactttgcaaatgaaaaacttcagcaacactttaatgagcatgtattcaagatggaacaggaggagtacaaaagtgaggaaattaattggagctacattgagttcattgacaatcaggatgtgctggatttgattgaaaagaaaccaattggaattattgcactgctggatgaagcctgtatgtttcccaaatctacgcatgagacctttgcgacaaagatgttcagaaacttctcttcccatcttaggctcgagaggacaaaattctcagaaacagattttaccatctcacactatgctgggaaggtcacgtatcaaacagattcttttctggaaaagaatcgagattatattgttgcagaacactgcaatcttctatcatcttcaaggtgcccatttgtttctggacttttcacttcattgcctgaagaatctataagatcttcatacaagttctcatcagttgcttccagattcaagctacaattgcaagccctgatggaaaccctaaactcgactgaacctcactatgtacgctgtgtgaagcccaactctgctaatcgacctcagctttttgaaaatcaaagtgtattgcatcaacttcgttgtgggggtgtcttagaggctgtccgtattagtcttgctggctatcctaccagaaggacttatgctgaatttgttgaccggtttgctgttcttgtgccagaattgatgattggaagttacgatgaaaaaatgatgacaaagggtattctcgaaaagatgaagcttgaaaattttcaacttggtaaaacaaaggtgttccttagggctggtcaaattgcgattttagatatgcgccgtgctgagattttggacaacgctgcacggcacattcaaggccgtttcagaacatttatcacacgcaaagaatttgtgaaaacaagggaggcttcaatttctatacaagcatactgcagaggctgtttggcaaggaagatgttcgcaaacagacgagaaacagcagcagctgtaattgttcagaagtatgtccgaagatggctgctacgtagagctcacctgcaagcatgtttggcagctctccttattcagtcttacattcgagggttcatcgctcgccgctatttctctgtcattagggaacataaagctgctacagtgatacagtccacatggagaagacggaagtttgtcatacttttccagaattaccggcaagccactgtggcaattcagtgttcttggagacagaagcttgcaagaaaggagctaaggaaactcaaaatggctgcaaatgaagctggtgcactgcgtgaggcaaagaataagcttgagaaaaagatggatgatcttgctttaagacttacccttgaaaggagactgcgggcttccagtgaagagtcaaaatcagtagaaatattgaagcgtgacaaaataattgaatcattaagtgcagaatgtgctgccgctaagtcagctgctcaaaatgaacatgccaaaaaattgctgctccaaaagcagttggatgattctttgagagagattactatgttgcagagtaaaaagattatgtcagcagaagcagcagaagaaaactccaacctaaagaacttagttgaatcattatctacgaagaactcaatactggagaatgaacttattgtgactcgcaaaagtagtgatgatacaatggaaaaattgaaggaagtcgaggggaaatgcaaccatctacagcaaaacttggacaaattgcaggagaaacttacaaacttggaaaatgaaaatcatgtcttaagacagaaggcatttaatatgccgacaatgaacaatctgtctgtagctccaaagacattatctgagaaattttctgcatcaattgggcttcccaacagtgagccaaagcatatatatgaaagcccaacacctacaaaatatctggcttctcttccacagactttgagtacatcaaggagatcgaggttgcctgttgaaaggcatgagcaaaatcatgaaattttattgagatgcatcaaagaaaatttaggatataaggatggcaaaccagttgcagcatgtatcatttacaaatgtcttttgcactggcgtgcttttgaatcagagcgaactgctatttttgatcacgtgattgaggccataaatgatgtcctaaaggggaacgaagctgatggtagattaccttattggttgtccaatacctctgcattgctatgccttctccaaagaaatctgcggtcaaatggattattcactaccccgtctcgtcgttctggtggagctctagggaagatagcacaaacattgaggtctccttcaaagtttataggccgcagtgatactctaccacatgttgatgcacggtatccagccatactattcaaacagcagcttactgcatgtgtcgaaaagatatttgggcagctcagagataatctaaaaaaggaaatatcacctcttcttaatgtttgcattcaggctccaaagtcaacacgtgggcaatctggaaaagcatccaagtcatctggagttggtgcccacccagcatcgaactccaactgggacaatatcgtcaatttccttgacttacttatggatacattgcgcgaaaattatgtgccatccttctttatacgtaaacttatcacacaattattctccttcatcaatatacagttgtttaacagtcttcttctccgacgtgaatgttgtacattctccaatggggaatacgtgaaagctgggctatcgttgttggagaaatggattactgatgtcacagatgagtttgcgggtacatcttggcacgagctcaattatatcagacaagctgttggatttttggttatacaccaaaaaagaaaaaagacgcttgaggagatcaagcaagatctttgcccgtccttgagtgttcgccaaatctatagaatatgctcgatgtattgggatgacaaatacggtacccaaggcatttcaaccgaggtggttgctgcaatgcgggagatggtcaacaaagatacccagaatcttgtgtcaaattccttcttgttggatgatgacttaagtataccattctctaccgaggatctatcaatggcaatcccgtcaatagattatgctgacgtcgatcttccagaatctcttcagcactatacatcagtacagtttctactaaggcagcaggatccacagcctgcccaatagaatgaatgtggtcagcctgccctgaagatctgtctgtcccctggttgtttctaccaaggcagcaggatccacagcctgcggcctgcccaatagaatggatgtggtcagcctgccctgaagatctgtctgtcccctggttttattggggtaacatccatctgcgatgttgtattgatgtttagagagtacctagtttggtggagtggacacaatttaaaagcaaccattgttgctagatgccaattcattggtgttcactccccaagtatttttcattgtacaggaaatgttgtaagtctgttgactagcgcaaaattagttatatcagtggtaaattgggcaatgcgcatcagtgcatcaccgatggtatcttctacacatgaatcgttagccagttaaccgctaggtcgggcgatcataagctccaggctgtctgatatgggttcgtgtgggtctgtcgcgggacg

SEQ ID NO: 30626 - DNA, 2821 bp, Zea Mays
cttaagggagagggtgatcttccttgagttgtaccagccctcgaggtgagcatccctcccccggcgccgcgccctcggctttgtagcagccagccgtcatggcgccgccggccagcaccgacgagaccgcacgccacaagaaggccaggaaatccaagatcgatatagaagagaagaagcacaagaaaacaaataaggcgcgcgccgccgcagaggacgccccgatacccgacgccgccgagcgcaagaagcgtaagcacaaggacgggcgcgaggagaagcgggacggccagaagtccaagaaggagcgcaagtccgagggaaagggagaggaagccgaggcggccgtggggagggacgagaagatgaggcgtgcgatggaggacgagcggttcgcggcggcgcggactgacccgcggttccggccgatgcggaggaaggaatccaaggtggcgctggactcgaggttcagcagcatgatgacggacccgaggttcgcctcgtcggcggcgcccgtggacaagcgcgggaggcgccgcaagaaacgcgagaaccccatgctgcattactatctcaaccaagaggacttggaggatgatgggaaggggaaggaaaaggggaagaaggagaaaccagtgcttgttcaagaagaggaggaagatgaagaggaactagaggaacaggaggaagaagagagctctagcagcgatgacgacgaagatgaagatttggatgacgacgacgaagagtgctctgttggcagtgacattgctcattacttaatgggaaggcatgatgatacacctatgattgacaaggaaactcacaggcttgctgttgttaatatggactgggatcatattaagttgacctgtatatggtgatgacttcttgcctcccaaagggtgggcgagttttgtcggtctcaatctatccatcagaatttggactgaagtgcatggaaattgagtcaacacagggcccagctgctctggtcaatgccaatgttgataaaaaagacagtgatgaagatgaggatgacacggatgatgatgaagagagcactgatgatgatgttgatgaagaagaagaggaagttgactctgataaagagaataacaaactgcgtgcttacgagctaaacagattgaggtattactatgcagttgtggtgtgtgattccagcgcaacagcaaatcacctgtacatgactcttgatgggactgagttcttgaaaacagcaaatgtgtttgatttgcagttcattcctgactctagggagttcaaacatcctgctcgagacgccgctacagaggcacctccgagttacaaggaacctgattttgagactcgtgctttgcaacatagcagagttaagctcacctgggatgatgatgaacctgaacgtaagaaagtcttgaggcgaaagttcaatgatgatcagctagatgagcttaacatgtatttagcaagtgatgacagcgcgtcagataatgaaggtgtagacgattctgaggatgaatctctgccaaatgggggatccaaacggaagctaacaaaagaggagaggttggctcttctgctgcaaggagacaaatctgatgaggagcaaactgatgaccaggatatggagattacattcaacacggagcttgaggatcttagtaaacggatcctagagagaaagaacaatgaggagaagaccatctgggagaagcaccaagagaaaatgaaagagaaaaggaagggtaggaagaggggactaaaggacgaagatgatgataaccactacatcagcgatgatgagcctgagaatgatgatgatttctttgcagatgaacagtctgatgaagaacctaagccgagcaaaagcaagaaacacaaggcaaaggcaaaaggcgaagcaaagaggaaaggaaatgatgggaccacagatgagcatttggaacaagaagcaaccaaagatgagttggagctcttggttgctggtgaccaggatactgccaatggtgcaaagggttataacttgaagcgtaaaaagggcaagaagggcaaagaggaatctgctgatgacaaacttcctgacattgaccttagcaaggatgagaggttctcagcaatgtttacttcccacttgttcgcattggatccaactgatccccagtacaagaggagtgccgccttcatgcgaaagcaagctgggaagccaggggtacatgggggcaaatcaagcagagaacctccgctggagggttcgtctctgggaggtacagtaccacctgacgatgctgttactaacaatgatggtcagaaacctgatggttcagccacagagaagctgcaaattttgtctgctgttaagtctctcaagagaaaccttggtgcattcaaaaactcaaagacaggtgaccgataaaaagagcatcatttttgttccggctattacacttaatcagtgaaatccctttgttggaaaatggtctcagttatatagtcttcgagatagtttcatggttatgtatgcttatctctgattctgtagacacgcgtccaatctttggattttcagttttgacactatccagattccagaatccaatagaacgattctgttcatttctagtgagataattggtttaatttatcaatttagtcacagcgcatttgaatatctggccttgttgatgtaatctctatgcgggatactagcaagaggttgagactcgtagaaagtttattaggctgtgcccaatgttggatggtagtcttatcaggagataaacgacagctctaggctcagccaagccatccttaattgtgg

SEQ ID NO: 30627 - DNA, 1914 bp, Zea Mays
aagcaagcagcgactccgtccgcgcacggcaccttcccctcccccgcacggccgcacacaccagacaccaccaccactcgcaagtctcttcgccgtctcgccgagttattagaaggcggggaaaaaaatcaactcgaacgggcgggtggcaaccaaccaccaagcggcgagggcgatggcggcgtcctcgccgcggaagcggctccctgctgcgcgcctcatcttcgccctcctcctgatgtcctccgtgctgccgcgggacgccggggcggtggaactggggctgaagctgcccttcagtccgggggacgtgctccccgtcctgccgcggcaggtggcgtggcccgtcatgaacacgctccacagcgccgtcgacctactgccgtccttcgtcgccgccgtggcgcccggggcgccggcgccggcggcctggaaaggcgcgtgcttctcggagaacgaggccgctatcgagctcacgcccggggaccgcaacgggaccgacgtcggcggtgccgtactgcgcctcaagactgcttcagctcatagttgggcatgcatggatctctacgtttttgcaacaccatataggataacatgggactattattttgctgctcgggagcacactttggagattaaatcatgggaggaagaagcggaattgaaatatgtgaaggagcatggcatttctatttttctcatgccatctggaatgctcggaactttgctatctttgattgatgtcctgcctttgttttcaaacactgcctggggccaacattccaacctagcctttttagagaagcatatgggagcctcatttgagaaacgaacccaaccttgggttgctaacattagaaaggaggatatacaatctggtgactttttggctttatcaaagattcgaggacgatggggtgggtttgagacattagagaaatgggtgactggtgcatttgctgggcatacctcggtttgcttaaaagacgagaagggtgatctttgggttgcagagtcaggctatgaaaacgagaaggtaatggcagttatgtcaatgtggactagattgcagccagtttatgctgcaaacatgtggaatgaagccctaaacaaacgacttggcactgaggatttcgaccttcaggggatcattatggagattgaaagacgtggaatgtcttttgatcagttgctcaccatacccgagcaagacgaatgggtgtacagtgatggtaaatcaactacttgtgtcgccttcattcttgcaatgtacaaggaggctggaatattcacccctttctcggagtcgatccaggtcaccgagttcactattcgtgacgcatacatgctcaagatatttgaagacaacccggcaaggcttccaggttggtgcaacgcaggcacggacaagcttcccttttgccagattctcggagagtacagaatggagctaccagagtacaacacgattgaaccttatgcgaaaatgaacgagaactgtccgtccttgcccccaacgtacaaacgacccgcacgctgctgactacgagattgtctactatgtatctttctgcagctgctgcctttacacagtggcattagagtgttgttgctatgttctgtaaataaaagacactatatatataggtgcttggtagatggtagttcttaccagtaatgtagctgcgatgtattcaggttcacggttttcagtcgatcagttctgaagccacggcgtcggcgaccaatatgaaggttaggatttgtcagctccggaaagttgcttatatgtatcaatgtatgtatgtaggcaacattatggcttggtcataaattgtgaactccgtcaagaaataaatctataatgcaacgtcaggtgattctgatatgtgattaagaaaataaaaaaacaaa

SEQ ID NO: 30628 - DNA, 1630 bp, Zea Mays
cgagccgagccgaacgtggctcggctcgccgatgggtgcccctgcccctcgatagtcgcgccgctctcctgccccgttcggccgttccccatttgcctcgtcgcccaccgccccattagcgccgccctcccttatccgacccaacgccgccgccgccgccgcatagacctcgccggcgcctctgcgccgccccgtggcctccggaggtgctattcgcgcgcgatccgccgctgcgtccgtcgctctggcatcgattcggcggcgctgggaggtgagatggatctctaccgctcgaattggcgccgcttttgggtcgtttgcggggggttttgtggggaatttggttgtgaaatggtttgccggccatggagtttgggggggggtaggttcggatttgggcgtgggtggtgggctggtggctgtgccgtatgagatgtgaagctagttacaggcggcgagctgcttttgcaagctctgatgcttctgccgcagagttgacaaggtccgaatgggagttagtctgtctgtctttgcagctctgtttcttctgcacttgggtaaaaacgctgtgaaccccaaaattaggaagattcagttcagaggtgaggattaggggtgggtgtccggtctgaaatagcagtggacctttgatgcctctgtttgtcttggtctggttccagtgatagctgtatcttgtgctaggttatggttatagcagttcatcatatgagcttttggagaccagcaagatatggaaagttcctggtaattacttaagtatcatttcactgaatgagtaatgctagctagttagtgaaaaggaacatgtcagcacctaactgcaccagatatcagaccgcaacatcaggatacaatacaatgcagcgagataaacagtctacccaacgagtataaatatactatgagcagtatgttggggcctcagggaaagggggtaggcagggaattgaattcattctaataattataatttaggcatagattaattaagctaatactgtatgattttgtatggaatatatttatacactactgttagccatactacctatatgttacatttcagctgtagaagcgagttggttggagatcagaaacaggctacccaacttgaagatggcactgcgacgggctctaggatggtcggaaggggaggttatgcgaccagagtcaaagccctgctcccggttaatgcggcagactgcgggcatcttctccgtcggtggtggtctggctttctgggtccaagaatcactgttccaaggagtctcagatgggcgtcatgcggagcagtctctatgagcgcgacatcagcattgcttgtgcggctctttagcccagagtgtgagcctcaaaacatagctgccttcgacaaacctgaactaaaggcccaatagcataaccgaaaactggtgttaatctaccaagacccatgcaagtttttgttaatctgccaagatctatccaagtttctgtccttgtaatgatccaggcagttcctgtaagatacttttgcgtggtacaacccgccattaattgtttgtttgggattgctacaggtttcagtttcagcatggaagatgtggtttataatataaatctaaatagt

SEQ ID NO: 30629 - DNA, 1779 bp, Zea Mays
caaatccgcccttggcccgtggtctcttatgcacttatgtaatctccagcaacttcagggttcttaaaatatgatgctttatggtgctatctttggttgtttatcaccaattctgtccgttgctgctttcctgagttataaatctccatttctctctccaaaagatgagaagcaaaatgtggagaaagcaaaagccacattattgaatgagaaccttgatggatctagttctgtaacagataataaacaatccgatcacctgctaatggtaattgcatacgacaaatggtcccgcatactgctacagaatggtgataaatctgctcgtcagttttgccattcattctacttgaatagtactgtgatgcacatgatcagggacatgcgtcttcagtttggtaccttgttagcagacattggacttatagatcttcctaaagatactctgaggcacaaggtgggcagtagaaaaaataatctcgagagctggttttctaatatgtctcttccattcaatgcctatgctcgctgcacctcggttattaagtcggtgatgtgtgcaggtctataccctaatgtggcagcatctctagagggtgttgatcctggagctctaggtggaagaaagccatctgatgttctgttcagtaaggaccgtcctcgatggtatgatggaaggcgagaagttcatatacatccatcatctgttaatcacagcttgaaagctgttcaatatccatttttggtgtttcttgaaaaggttgagacaaccaaggtgttcttacgtgatactagcgtcgtttccccctactcacttcttttgtttggtggttccatggtaatccaacatcagacaggagtggttgttatagatggatggttgaggctgtctgctgctgcacagactgctgttttattcaagcaacttcggatgactcttgatgctgttctaaaagaactgacaagaaaaccagagatggcaacttttgttgacaacgaagtggtcaggtccatcattcatttattgttagaagaagacaaggctcgataagcatgaattcatggcttttgatcagtatcggtttctgccgatgtgcacgttagtctgcacaggattcttattgcacaatgtggctgattgctaatgtggaagctgcaaagcggaaaaggagtttaatatattattcggctggctggcttcaggtgtttggactgctgcagctgtaatctatagaaacaaaatactatagaaaccacagttgcagtcggattaaagccgcagcaagccgcagtgattaatgtgttgcttgttttatatggaacaagtttgtgtcggtctagtattagtgtaatacccttgtcctaattttggagcttacgtgcatcaacgtacagagcagataaaactcaaaagcctgaattgccgtcaattttccatctgacactttggacagaaaaaatgaaaaaaaatgaagagggaaaaaccatatacatatatgaaactgtagcaaatactattatagatggcagttagtgatgatgagagttgcattaggattcctgatatttagcgttgcacaccttgcacttgttgtacctcgtgatagttgcaattgaaaaattttggaacccaaccgtacgtgcatctcgtacaaagtactgtccgttctgaattacttttttcttgagaattttccgtgcttatgacaagtgttttagtactgtaaaaaagtgactagtacaggcgtacagctcggtaggtttaggacgaatgatatt

SEQ ID NO: 30630 - DNA, 2236 bp, Zea Mays
ccaagctggcattgtcccgtcccctgtcgacttcctctccatttcatttccgttccaggtctcctgtttccatcctcttccacggttccacttccacccccatctcctcgccctcggcaagcccagcaaccccaatccccaatcccgtccgcttctttccccgtccccgaccttgccgaggaacctcccgctcccaaatcctagcctctcctccctcgccgctcccctccccatggaggacgaggacgccggcctcggcgacgggggcgaggcctcccctccgcaccatgccgcggcgtcgggcgaccgggcgcgggacttggcggcgtccccgaccagctcgcgctccgtgacgcagacggtgaacgggtcccaccgcttcgtgatccagggctactcgctcgccaagggcatgggcgtggggaagcacatcgccagcgacaccttcaccgtcggcggctaccagtgggcgatctacttttacccagacgggaagaaccccgaggacaactccggctacgtctcggtcttcatcgcgctcgcgtccgacggcaccgacgtgcgcgcgctcttcgagctcacgcttctagaccagagtggcaagggcaagcacaaggtgcactcgcactttgaccgctccctagagtccggaccgtacactctcaagtaccgcggatccatgtggggctataaaaggttctttcggcgtaatgctcttgagcaatcagattttcttaaagatgattgcttgaagataaactgtactgtgggtgttgtagtatcaactatggattattccaggccacattcaatagaggttccagagtctgacataggctatcattttggaactcttttggacactctggaaggtgtagatgtcatttttagtgtagcaggagagaagtttcatgcccataagttggtattggctgcccgatcttccttttttagatctgaatttttcgaccatgaatctgatgaagagaagaacgaaactggtacaggggatgaaatcaaggagatcgttattgatgatatggatcctgtagtgttcaaggcggtgcttcactttatgtacagggacaatcttgttaatgatgatgagttgatggcatcaagctctgactgctctatatttgatagtttagctgggaagttaatggctgctgcagacaaatatgagttgccaaggctaagattgttgtgtgaatcttacttgtgcaagcatgtttctgtaaactccgtggcaactactctagcattggctgatcgataccatgctatcgagcttaaatctgtttgcctaaaatttgctgctgaaaacctttcggctgtgatccggaccgaggggttcgactatctcaaagacaactgcccatccctgcagtcagagatactgcggacagttgccggatgtgaggaacaatgtagcagcggcgtgaaaagccagagcgtatgggcgcagctctctgacggcggcgacaccagcggtcgcagggtgaggccaagggtctgagacgcgatcctgcaagcactaacctttgtaatcaaactgtggatgttttttcttaaccaagcaaaaactactagtcgttcacaacttctgatcgtgtcgtcatcaacgaccacgtgcaggcggacgcgatgaactcacagaagggcgacccgagttgacggtggtttaaacagacacaatgaagctaatcgttcacaacttcagtacaaaactacacaggcaagacactgcctgatacagtgcgatagccgctgccatcctctcttcgcttcgcgggtggcaacccaatgccttgaggttttgctcaaccaaatgtcgccaccaggaactccttgtaaacgctcatgaacttggccacgaaagctgtagagtggaatgggggaataagttaagtatatatggcttctgtattaataatcattatgcaaatctaagacacgcagatactaaaagcaaataagaacaatcgtgggcattcatatacatgtaccaactgattttgttccagattaatgataagaccaactcatataaacgtaagcaagtaccttctagatgaaaaatagcctttgatccgaggcgcatcttgtgttcctgcaaacataaggccttgcaatttagaactacgagataggcaagaatagcaccgtgttgaatcagtttaagggcgtgtttggatgcatgtgtattggtattggaagggattgagggacatgt

SEQ ID NO: 30631 - DNA, 2486 bp, Zea Mays
tttatatgagcgtgctttggacaagaaggacctcgcgggtgcattatagcaaactctagtatatattgctgtttcggtaccctacccccctctctctctctcctctacctccttttcctctaacctttagctttcctccctccctctcctctctcccccctcctctaacaagaactactcccagccattcagatcctaagttgctgaccttgctgctgcttgttggagatagatttgttggttctaagttccaagtaccatgagtccaccgagtgtgatggggcagtttggggacacaacctacaccaaggtttttgttgggggactcgcgtgggaaacccagaaggagacgatgaggaagtacttcgagcagtttggggagatcctggaggctgttgtcatcactgacaagaacactggcagatccaagggctacggatttgttaccttccgggatccggacgcggcgatgagagcttgcgttgatcccgcaccggtgattgatgggaggagggctaactgtaatcttgcttcccttggggttcaaagatctaggcctcctactccccagcatggaggagctagaaactttagagtaatgaaatccttcaaccagcaggcaggaatccaaggtggactcggcgcagcttttccttctcatgccaccttccctcattatgccatcccacaaggccttcccttccatgtctatgggctttactctcttacagacatatcctcagtccctcacacaagcataaagtagccatgcgtgctagtggcacatgatggcagccctgtcatatgcccactcccgtgaacagtactctccatataccccagactatggttatccaacaaacttctacaatatatatggaggagctcagtacccgttttatggaggagcaacagctggcatggtgacaggaacaagtcccttttatccatatttccaatttgggcagtcaggaaacactactaccaactatacaagtggacaaggctacaacttgcaacaatacccacaaatgttccacttctcaactgtatcttctacagctgcagctgtgaccggctttgctcagcaatatggaggaccattgtcactagcagcaagccctcaagcccaagcaggcatgactatggcactcacagctccaaccctgccaactccaacacaggctgctcatccttaccggttgattccctcgcactttgcagtttctgctgctccagagcaacccttggcctaaccatggtctcccttctcaccgttgttgtactgtctcgtttccgacgtgtttgagtccatgcatccatctctaacaccaaaaggcactattgtagatcacgcttatcagtcaaagtgctcacctccatatcccacatggtcatgtggtgaatggatattagctttagccccaggatgggcataaagcttcatgccccaaggatggggtgttctaacagacaagtacaaaccccaaccattctaacaatagtccaaggaaggactttatctgggagagttaatttcagccgtaccaagacaatgctgtagctaaaagaaactaacagtcaagcatgacccagggatggttcatgctgatactagtcaaattggacaacaatgacagctaaataactgactagcatgccactcccacatgtcattagtagaatcccaactgtacctagcttaggcatggcatctcttgttgaagcatgaaccatttagcaaaacctacccttctatagtcccgatgttacctagaccaaatgcatttgatatatgaccagcgactacttgtgtaaccaactcatcttttctttgcaaatgcttagatgcatcaactaacattttatttgatctttcagtcgatagcttgcatctaggtggtcaaggctctaaggagagcctgtgcccctaatcagacacaggttcagagtagtgctaatgtttgtttttagcacttggcactacctcctgtcactccaaacacagtattgggactccaaagaaggctttggagtaaccaagcactgctgtgtaactcattaacacaatggacccacagataaatttttattgtcttgggccaccccactcatgtagatgtcattacttctcagtgtcactaccatggttaggtccaggcccccctccccaaccgcgtcccccacctctctcactgcacatcgcagagaccttagtgctctttaatctactattaccaggcatggtggttgtaataataaagtagcgctgtgctactcgtaggacatgaagaactatttgttattcaacccttcatatgtacttaatatcttgtctatttcagttcagtagtcggtacttatttccatccattgtaatgcaccatataatgttgtgtaatatatgtccactgtgctgcacatttcttagggcatgtttggttcgtcttttttgtgacgaggttttctgagaatttgtttatgag

SEQ ID NO: 30632 - DNA, 3159 bp, Zea Mays
agcagcgacgcctctgtcagtctatcttctcggctcgcacacctcagacacagccaggcagcggagcgctcccccctcgattccttcgcttccttctagaaccttccgctccctccgttgcaacagtagcacagagcttcctcctcccccacccccgaagatgacgaccatggagaacgtgatcgtgctcgtgaaccgcatccagcgtgcctgcaccgtcctcggcgaccacggcggcggggacgccgccgcctccctccctaccctctgggaagcgctcccgacggtcgccgtcgtcggcggtcagagttcggggaaatcatcggtgctcgagagcatcgtggggcgagacttcctgcctcgaggatcagggatcgtgacgcgtaggccactcgtcctgcagctgcacaagacagaggccggggtgcaggagtatgccgagttccttcacatgcctaagcgccgcttcactgatttctctattgtgcggaaggaaatccaggatgaaactgacaggttgactggaaagacaaagcagatatctccagttccaattcatctcagcatatactctccacatgtggtcaacttaacattgattgatctgccgggcctaaccaaagttgcagttgaggggcagcctgaaagcattgttcaagatatcgaaagcatggtgcgttcatatgttgataagccgaattgtattatattggctatatctcctgccaatcaagatatagcgacatcagatgcaatcaagcttgcccgggaagtggatccaactggtgagaggacatttggtgtgttgacaaagcttgatttaatggacaagggaacaaatgcacttgacgttcttgaaggaagagcttacagactgcagcatccctgggttggaattgtgaaccgttcacaagcagatatcaacaagaatgttgacatgattattgctaggcgaaaagagcaggagttcttcgattctagtcctgaatattctcatcttgccagcaggatgggttcagaatatcttgctaaacttctttcacagcatctagaggccgcgatcagatcacgcattccgagcataacctctctgataaacaaaactattgatgagcttgaatctgagatggatcacctcggtagacctattgcttctgatgctggggctcagttgtacctcatcttggagctttgccgtgcatttgacaaaatatttaaagaacatcttgatggcggccgacctggcggtgatagaatttatggggtctttgataaccaactcccttctgctctgcggaagctcccatttgatcgtcatctctccgtgcaaaatgtgaagcgggttgtttcacaggcagatggttatcagcctcatttaattgctcctgagcaagggtaccgtcggctgattgaatcttctctcaattattttagaggaccagcggaagcctctgtagatgctgtgcattctgttttgaaagagctggtgaggatatccattggggagacacaggagttaaaacgatttccatctctacaaacggagctagctgctgcatgctataaggcccttgagagattccgcgaagatggcaggaaaactactctacggctggttgatatggagtctgcatatttgactgtggagttcttccgcaagctcccacaggaagttgataagactggaactggaaatcccagaaatgccaatcctcctgctccttcggatgatcgttacgctgatgcacatttcaggaggattgcttctaacgtgtcctcatacattggcatggtatctgaaacgctgaagaatactatccccaagtctgttgttcactgtcaggtccgcgaagctaagcggtccctgcttaaccatttctatactcaagtgggcgggaaagatgctaagcaacttgcagtactccttgacgaggatcctgccctcatggaacgcaggctgcaatgctttaagaggcttgagctgtacaagtctgctcgggacgagattgatgccgtgtcgtggacaagatgaaggtaacgcatgccatgcttgttaatatattcgctttctccattagacacattgtaattctactagtgcagaattagcagctagccattgtgcacactgattgtcaagtatagcagaccgagcacctgtctcgtatcttagcctgttaatatcagtagttgtgtgcttgactgcttgtgttgtatctatgtctcaactcccaactgttatcaggtgcaaatttctgtccttagtaacccatgtgcaaacttgtatgcacgaacgatacctggattctgtaggatgcacatgccgatcttcttcccatgctgtagttaggtgtagactgcagaactgggacttctaatgtgaaaataatgttttatgcaacttgtcattagtcaatcacattatcacactgtagaataattttttgttggctgcgagcattaccatgcgatttgggggtggtccacactaacatgtacgcattgcatgagaccctttcaataaacaatactggcactgcgtctgaacattcttggcctgctggacctgcaagacacgtctgccatctatcttagttcaatttgttagcgttattgcttgacattttccacatccgggatgaatgacgcgtgctgcgtgcggtgcagaatccgaaacagttgcgcgctctgttgatgtgacccttttggtccgtccgggaaatcgtcgcctgctggccatggattcacgctttctagaggacgtgtgttgcccgccgtgcgcccttccatgagttccccgcatagaacaggtcgtcttctggaacagaaaggcgaagcgcgtggcgagctgtcctgattttgacgagtccatgcatcttcagcagattggactggtcgccataagaacacgaaactgtgattaggaggcatacacgtcatctgctagtgtttccggtgaagtcagttgccaccatgacctgctaggcagaaataaatatgcccctattaatcgggccttgatctgtcgtcctcattgctgaaaacctcacccaaattgcatcttatagcacattcgtcgccatggatatggtcattggctgtgccggctgtgagctgtcaacattttgtacagtactacatttccaaaatctaaaccgg

SEQ ID NO: 30633 - DNA, 2895 bp, Zea Mays
ccccacgccgtctccaccccccatcaggcaccccccccgccccgccccgctcgtcgccatagagtttcatcgcctcgctcgcgtcgccaactacatccgctcgaaccgcgtccttacatgccatgcccaccatcctcgctcgctccaaccatgtatctacatgtcgcctccgacatccacgcccatgcttcgtgtagtgcttgacgcgcccgctccaaccgcgtctatgcatgccgtgactgccatcctcgccacccgcatgcctcatctgcatcctccgtttatcgtacttatccgcggtataccttccctcatcgttcagtccgcgctcactctgccccacgatccgcttctcccccgcgcccctcggcaagctcgcagtccaggatccgattctcgcgtcgccctcccgccgcgcccctcggcaagctcgcaatccaggatccgattctcgcgtcgccctcccgccgcgcccctcggcatctcaactacctcgtgatgcctcccccacccccgatctataaaccagccgctcgccactcctcccgtactctcgcccccgacctcatggaaggatccgcctctcgcgcgcccccgccgacgcacgcaactcgcagacggcgcccccccagatccacttctcgctggccgctcagatcctccatatcctgacctctccctcctcttgctgcagatgatatgctagagcgtcagcaaggcggactctccaaacctccagagagggagggaggcagcagccaatgcccagcacgtaccaatctgcgtggcgggaggtgcccggactgcgtacccacgggcgagcaggattttgacgatccacgacccgatgaagtcgccggcgtcggtgacgcacaaggcggcagtggccatcgtgcgctgacgcccagtcccttcctctcgcgagcgaaacggggggcggtggtgccgccgggcgaatggattcgtccgagagcgagcaaataggggtaagcatttatcaagcggaagtgggaagaaatggtacagtgaagtggaggaaatgacacagaacacgagcgaagctggcatctcaaggcggtcgcactcgcacggttagcagtgcactcccctaatttctgccctttttatggtttcacgattatctgaatatggagttcaaggattgatcttttctgagttctttgttgccatatttttctgtccatgtaataaggttgtgggtaaaatattgtgtcaatcgggcttgtgtgttgcagttctattcttgtgtagtgcagctccgaagtcgctgctaccaggtgcccccgtgctggggcataggtgcagtcgccgctgcgcccagcctacacaaaggcagctaccgttgcgacaacgagagggagctcccaaggcaccaatgttgttgctgccagttcttcaaagagttattgatggttcacaaaagaccactgttgctctgccaattcacaaagccttgatgattgttatgatggaaccaatgttgaggcctacaacaatgatgtcattgttcccatgggacctcaatctccaaaaaaccaagaggccgtgggaagaggaatgtgacaatgagaaggttcagttaaagactattggtacattttatcgaatattttatttttatttcagcatatgctcgcttgttgctctcatgttttaaaccatgttataacttcactgcttgccttggaaaattttaatttgcagcaataatttctaggtaatttgtactacatgtaacttctaagttatagtagaattgtcccgaaaaacttgtcgctacaaatatgtctgttttcttttgagtgtgtgctcggattaacaatatacattgcatctctctgtgttcatgcatgccaatgggcattaatggtccatgcaaattaattgggttgggcctaaatcagctaacttcacatatcaatcttcatatatcctgtcagcaaggggtaaatagaatgtccaagtgtgtatgaaaaatacacgaaaggaaagaaaaatagaatgagtatgaaaaatacacaaaaggaaagaaaaatagaatgatcactcagtcaacaaaaaggatgtttttttgtgcacacgcgatatgttattcccttattctccagatatggtaatggtaaactcaatcaagcaggaaaagatgtcgccctaaccgttgggcaaacacctggatgacatcatcttctctgctaaaggcaccatattctcttcaaggatccaaacaattaccccacttgggaagaggaatgtgacggagttagcactacctccacataatgggaaggttgggttaaagcctattggtacctggccgaaggcatggaggtccgtaccatgagccgccgaagcggcggaggcgacgcgtcagcaggcgcctcgggtgggagctgcacgaaggccagctcaggcgacgcggtaactgggaggagccggtggcgcaggcgcacgaaggagagaagctgcgcccaggaggagcggatgatccggagcaggatctggaagagcagaccgaggccgagccaccccgccgccgccggatggctcggttgctgaactggcgcaacctccgtcgccgccgacatctgtctctggaggcggagacttagccgcgattgggagaacggaacggggaggaagcaccgaagcaatcatagagtcgtggtcgctgctctatctttcatttgtgtcggcaggttccctcaattccctcttaagggctggtttgacagtatcccgtgtatagctagagcccagggagataattgcatatttgggactcgaaacattgcgcttcgcacaaatgccattcaaaagattttcttcgtaaaaaagggactataaatatgttctaattgattatactaccattta

SEQ ID NO: 30634 - DNA, 3710 bp, Zea Mays
ccacaaccaatttccagttccattccctttccgtttctgttcctcagactctcttttcccgtcgccgcctctcgcccccgtactcctcgccaccaccaccaccaccacttccctcccctcccggcctccccccaccccacccgcacccgcccgcgcgcccctcattcattcgcctcgatctcgccggcgatgtacggcaacgacaactggatcaacagctacctcgacgccatcctcgatgccggcaagggcgccggccccgccaggggccggggaggcggcggtggcggcggcggggaccggccctcgctgctcctgcgcgagcgcggccacttctccccggcgcgctacttcgtcgaggaggtcatcaccggctacgacgagaccgacctctacaagacctggctccgggcgaacgcgatgcggagtccgcaggagaagaacacgcgcctggagaacatgacctggaggatctggaacctcgccaggaagaagaaggagtttgagaaagaggaagccaatcgcttgtccaaacgccgtctagaggctgagaagccacaaaatgatgctactgcagacatgtctgaagatctttttgaaggtgtgaagggagaagacgttggtgatccatctgttgcctacggtgacagcacagctgggaacacacctaggatcagttcatttgacaagctatacatagtgttaatcagtcttcatggcctgatacgtggagagaatatggagcttggccgtgattcagatactggtggccaggtcaaatatgttgtggaacttgctaaagcattaagttcatgtcctggagtttaccgggttgatctattgacaagacaaatcatagccccaaattttgatcgtggctatggtgaaccagacgagatgctggctttgacaagtttcaagaactttaaatgcgaacgaggagagaacagtggtgcacatatcatcagaataccatttggccccaaagaaaagcatctagctaaagaaaatatctggcctttcattcaagaatttgttgatggtgcactaggtcatattgtgcggatgtcaaaaactttaggcgaagaaactggcagtgtgtgtccagtgtggcctgctgtgattcatggtcattatgccagtgcaggagttgctgctgctctactatctggagcacttaatgtcccgatggtgtttaccgggcattttcttgggaaagataagcttgaagggcttctcaagcaagggagacagacaagagaacaaataaacgtgacatacaaaataatgcgccgaattgaggcagaggagttgtctcttgatgcgtctgaaatagttatcgctagcacaaggcaagaaatagaagaacaatggaacttgtatgatggttttgaagtcatgcttgcgaggaagctccgtgcgttagtcaagcgtggtgctaactgttatggtcgttatatgcctcgtatggttataattcctccaggagttgaattcggccaattgattcatgattttgatatctatggagatgaagataacccatctccagcctctgaggatccatctatttggtttgagataatgcggttcttcacaaatcctaggaaacctatgattctggctattgcccgtccatatgctgagaagaatatcgcaacacttgtgaaggcatttggtgaatgccatccgttgagggaacttgctaaccttacattgataatgggtaaccgtgaggctatttccaagatgaacaaaatcagtgcagctgttttgacatcagtgcttacattgattgatgaatacgatttatatggtcaagtggcatacccaaagcatcacaagcactctgaagttcctgatatttatcgtttagcagcaagaacaaaggctgccatgcacgggctgcctgttattgcaacaaaaaatggggctcctgttgaaattcatcaggttctggaaaatggtctccttgttgatccccatgatcagcatgcaatcgcagatgccctctataagatgctgtctgaaaagcaattttggtcaagatgtcgagagaatggattaaaaaatatacaccagttttcttggcctgaacattgcaagaattacttgtcaaggatattaactctaggtccaagacatcctgctttcgcatgcaaagaagaccataaagtgcctgtgaagtgcaggaagcatatattcgttattgctgtagactccgttaacaaggaagatttaattcagattatcagaaattctgttgaggctacacgctctggaactatgtcagatttgacaggttttgtgctgtcgacttcactgacaatagcagagttacagtctgtaatagtacgcacaggcatgctccctactgactttgatgcctttatatgcaatagtgggagtgacatatattatccatcacagtctagtgatgtgccaagcaattcccgtgttacatttgcatcggaccataactaccgatcacatattgagtatcgttggggtggagaaggtttaaggaagtacttagttaagtgggcctcttcagtagtagaaagaagggggagaaccgaaaagcaagtcatctttgaagattcggaacactcttcaacatattgtcttgcatttaaagtgattaatccaagtcatttgcctcctttgaaggagctgcaaaaattgatgagaatccagtcactgcgttgtcatgcactgtataaccatggcgccaccaggttatctgtaattccaattcatgcatcgcgatctcaggctctaaggtatttgtctatttgctggggcatagagttgccagatgctgtggtcattgttggtgaaactggtgattctgattacgaggaactgtttggaggtcttcacaagacagtcatccttaagggtggattcaacactcctgccaataggatccatacggttagaaggtaccctttacaggatgttgttgctcttgatagctcaaatatcattgcaattgagggatttagcactggtgacatcaggtctgctatgcaacaaaagcttggtatacccacacgatgacaccaagtgcgatctattttgttattaatagaaagaaacaaagaaaaaaatggccaatacaaatatacgatacaaacacttcgtttccattctattggaaatgcccgattttgcctgccagtcgtttaatgtatgtgtgccagtgtgtggtccctgcatgggttatgaatgacattcccttggatccctgcactggaaatttttggagcgaagagcatgtcaatggatacatccagctgtacagaagaaacaaatttgttcaaatgttgatagtgaaaacattttatggaagcattttcagcaacaaagcttccaatatacaaagctcacactttcacatcacttcaaagtggagcttatgattacagagcaaccctctaaaccttttttttccctttctaagaggggtgtcttatatttgtgtaaatactgtgtagcaccaatgcaccatcttgttttcttgtttcctgaattaatatgcgtaagcgtttactctctttctatatgtttttccaacagcctgtcttgtggttacatcatgaatacctttattcatctgctgctgtattggttatgaaattatagtagcaagcgtggtgctcccaactatgacttcatcatgcgtgtatagctttacattatctgcg

SEQ ID NO: 30635 - DNA, 2885 bp, Zea Mays
gtggcctcagcgattttgctgccccccatctcctttttttagcacatcgcttgcgttctctctctggtttcctcctctgctctgcgctccgcttcccaccgctcctcccctgccgtctctcctaccacaaagccgtggcccgtgggcgctgttcgcggcggcgacgggtctctcatctcctctaccctctctcgcgcgcaacggcctaaaaaaaccctagcgactcggtcggcgctcgacttggatcgtgccggggggctaggggcaggggcagctctcttctctcgtcgtcgtccagtgacaatactatcggccggtactcctgctggccaggcctagattggataacaacgacattgttgataacttgatactggattttcttccttctcgaacctgtagagggctctgctttatttgcagattagaccttatatggtttgagtgccacaactgaaactttgcacctaaaacccgaggccaagttcactactttattatatccttccatacacagaaagtggagagacatggatcgtgatgatatagctggtttcgtcagtggaggttgctatgagtcctgaatttctaacccagtatatataacagagttatgatatccagaaggcagacaattgtttcttttcgttttctagttggtttgcatttgatgtttcataattggaatggatacaactactcaaggccttgagtttggtggtggtatcaactctccgaagccatattgctattggagcacaactcaagacactactgtgcacaaagatagtacaccagaggcatattccaccttttctatttccaactcaaaagcgtcaaaaaggaagcaaggtgccatgtctggagcaaaaggtggaaaccctttactcactttgggtctaggctgctcaccaagttcatcttataacagcaagctaagttctggcactgcttgcataacatcatcatctttattaaaggagattgatgaagagtcttcaatagatcttggccttaaccttgggttgtatattggaaatgatattggacactgccaacagaaatcccatgctggttttgaaaatgtgctctcgacaaactctcctaaactggatcttcagttgagtttgtctaccagttcgcctgaatcagttgtcattgatgcaaataggtcaccagatggcttggcgatgccgatggccaattcaccactcgccattgtagaagaaggatcagtaccacatagttgggttttcgagcattcaattgtttcatcatcacatgcttctaaggcaacgcatggctttccattatcaaagaaaaccaatggaggcaatgcctctgtgccttctcatgtcatgtcatcaactatgtttacaagtgtgaaaggtccagttgcctctgcttctgagacaactaactcccaacaacgcaacagtaacgctaaaagctgtcagtttccaggatgtgtgaaaggagcaagaggggcatcagggcgttgcatagcacatggcggcggtaggcgttgccagaaacctggttgtgagaagggcgctgaagggaggacaatctattgcaaggcccatggtggaggcaggagatgtcaatttctcgggtgtacaaagagtgctgaagggcgcacagaccactgcatagctcatggtggtggccgccgctgcagccatgaaggttgctcccgagctgctcgtggaaaatctggcctgtgtatcaagcatggtggtggcaaaaggtgtcagaaggagaactgtaccaaaagtgcagaaggccattctggactctgcattgcccatggtggtggaaggcggtgccagtttccagactgcacaaagggtgctcagggaagcacaaagttctgcaaggcacatggtggaggaaagcgctgcacattcgtcggatgcaccagaggggctgaaggcagcacttcattttgtaagggccatggtggaggcaagcgctgtgcctttcagggcggtggcgtgtgcccaaagagcgtgcatggtggcactcagtattgtgttgcacatggtggtgggaaaaggtgtgctagctttggttgcactaagagtgctagagggcgcacagagtattgtgtgcgccatggaggtggcaagaggtgcaagttcgagagctgcaccaagagtgcgcaggggagcactgatttctgtaaggctcatgggggaggtacacgatgcctgtggggccaggcggacacaagctttggtgctggtgcacagcaatgcgataaatttgttcggagcaagaccggtctctgctcagctcatagtgctttgatccaggaccactgtgttcatggcggtggtacattaggttccgctatctaccagtctgtgcatgtcaaaccgactgagatgatcaatggtgataaaactttactggatccggctatccctgttacaaacagtggtgttcatcctcctgtcctagctcagtctatgatcgatccgctgccagagggcagagttcatggtggtggcctgttggctttactttcgcggggcggaagcagaacaagcgctggtggctcagaattgtgcttcgggcaagatcgtgtggatctgaggctatcaggatctccatgaaactgatgactgcctgcagttttgatccaaattgtgttgctcatgctcgggttccataggatctacccggacgtgtactgtgaatctacccagacgtgtactatgaaaataagagggtagctcctagagcagatgtgttgttttattttagttaattgtttcagtgcatgtaatcacttactttaatgctcatgtttggacttgattaactctcagcaacttaaggttgaaatataatgtgcattttgctgcttattctgctga

SEQ ID NO: 30636 - DNA, 5138 bp, Zea Mays
taaattctttttattgcatctgtgtccatttcatcgtcacatcatgatcatagcatgcatctttactgtacgtgtagatcacgttgtctgttgatcaatcacttggtggagtaattttctagagactggtcatcaccctgaagactcgtgacattttattttcttagtcttcggctcttctctgcaacaaaggtactagatttgtgctgctatttatggtgctaagtgccggtgggctcggcctccctatataagtatatcacatctttatcttctttttgaggattgtcacttatgctagcatgtaatccaaacttacaaatattttataacatttcaaagtataatattttaatcacatttgtaatcactctgataatgtaaacttattgtaatttgaaattttgtaataaaaattccgctgcaaaaactttggtatgtgatttgtgtttacttaatctagcgatcttggtagtagtggtttatccgaggtcccctgggacactcggacagatcctattaagttatcgggcacacatgcatagctgtttgaggtctttgagataaggataggtgtatgtgggtcatataatttgggaggatccaccacaactacacccacttaagatacccgattggaagtgggaagagattggtatggatttcattactagattgcctcgcacctagaaaggatatgactctatatgggtgattgtggatagattgactaaaagtagcccatttcattcctgtcaagactacttataaaggttctcaactagcagagttatatatgacccggattgtgtgtttacatggagtgccaaagaagatcgtgtctgatcgaggtccacagtttacctcaagattctggagaagctttcatgagaatatgaacaccaagttgaactttagtactgcctatcaccctcaaactgatggacagactgaaaggactaatcaagtattggaagatatgttgagagcttgtgcccttcagcatggaggaagttgggataaaattctaccatatgctgagttctcatataataatagctatcaggccagtctgaagatgtcaccttttgaagctttatatggcaggaaatgcaggaatccactatattgggatcagactggagaaagacagttctttgggcctgaactgattcaagaggcagaagaacaagtccgtataatccgggagaatttgagggtagcttagactagacaaaagagctatgctgataatagaagaagaccactggaatttgaggacggagatcatgtatacctcaaagtgtcaccacttcatggaatgaggagattcaaagtcaagggaaaattgtcccctcgctttattggaccattcagagtttttaagcgagttggggagatggcataccaactcgagttacctgatagtcctatctgatgtgcacaatgtattccatgtgtctcaactgaagaagtgtctctgtgtccctaaggaacagttgccaatggaagagctcagtgttcagggtgatctaacttacacggaatatcctatcaagattcttgacactctgactcgagttacaagaaataaggttataaagatgtgcaaagtacaatggagtcaccatggagaagatgaagcaacatgggaaagagaagaagagctccgcatagattttccctatcttttccctagactttcttaaatcttgaggacgagattctttttaagggggtaggatttgtaatacccaatttgtaatagataataaaagaggagaaaagtcatttcctatattttatgtgtgtgttgaatctacttatcatcacatgtgaacaccatattcaaaaacaaataactaataaaaagatatgccactaaattatgcatcaagccaaggttttattttgtgagcattttatgaaaatataaaaataatgtaaaaaaagagaaatatgttaaatatccaaatggggatttaaatcctaaagaaaatcctagaattgagaaaaagagaagaaaacactatacaaacaggataaaataaaaatataaatgaacaaaaattcagtgcatattgttatttagatatagacatttaacctgaatttgaacttcacacacatagattcaaacttaaaatttaaatttaacggagaagagggataagaagaaaagaaaatataaaagaaaagggagaagaaacctaattgggcctcgtcacgcgttttggcccatctgcagaaacgtgcgcgcgcgtcccattacctcgcctgcccacccgccgctgcgcgttgacatgtgggccagcccgcgcagtcactcatacctcaccctctcactggctctcgggcttgcggtcagcctcttccctcgctcgcggtccagcaaccacgcccgcgcggccgcacgcttcgaccactgcccgtttgggcccgctcgtcagatggcctggctgcttcacgcgccgttttgtcgccgattagtgggcccgagctacatggctccgtcttccctgcgcggttgggcgcaacagcctggccgagctcggcgggtctcgcccactagaaccggaccacgttgaccacataggggatgcataaaaggctcggtcgtcgactcaatccactcgtcccctttcctctcgcctttcctacagcaaacgcaagaatttctcgctgctgcggaaggaatcggggccgccacttgtgaacctcagactgtcgtcgaccgcgccctcgaagtcttgcccgagagcttccttggagtgggggaaaacttcatttggtgccgctgatcaggattgctcgcctgcgcactggcaatttctcaccgcgctccttccactgtggaatcgccctcgtcgtggacagcattgttccgaccgccattattggtgagcacactccccaattgcctcatgctgttgtcctccccgtgaatcattgttcgaatcgaagagtagccattagaatcgtagagcgcgcggggtccggcaatggtgccgtcgcgttccgcgggcggtgatgaacagtgggtagaacacgtatggccctcgacttcgcgatgtgcggctcttattaggtctgggtatgacgtttcactggtatggatttcccaccgtggatctgtgatcgtatggtggacgggcgggtcgtgtttcattaaatcacggccaatgatctcggatctaacggatttagctgcttaccgattcggcgaaatgcggatctaaagagtgccgctgatatctaatcaaacggccgagattggcgcgtacctcttcgcgatggccatttcattaaagagaccctaacctctctagaaatcaacccgcagtactacaaatagtgttctgagtcttgaaataacttgcacagaggcccctgctcttcccgtgcgcccagtccagaaggttaagaaaatcagataaaagaattagaaattgaatatttaatatgaaaataaatgctagaaattgtataattcatagaaaattcatatgaactccaaaataacccatttcagtttcgaaatttttgtcatattattctctatcacttagaatctctgttttgacatgaaaacaataagaaaaataatttctcacttaatcctatttcaagcacataaaacctttggaaattcataaattaaaatctataactccaaaattaatgattcatgttcccataattttattttaatgtatagattattattatatattttgtttacatgtttggtgtgatgttaattttctctatatactgtgcttgtttgtattgtggcgagtagaagaacctgtgactgaggatcctggtgactagcagatagaagtagctaagcaggagctcattgaaggcaagttgtgcccttgatccacttttgttacccaataatattctttattatcattattcaatgcataggtttaattgatgggacccaataggtcaccctagactatttatctctttaccttgtttacccctgaatcacttgggtagttttagctactgctttacatggttttgggataatattttattgcatctatgttccaattattttgttattctatttatgttcatgtcaagatcattaatgttaattggaacatggagcttaacttgagaaacacgtgccaccacaagggtttaatgggacgcccttggctgactaattaggaaagctagtggaagactatcttactcgaaaggggcaagggcagtaggagagttgcatgcaagaaggttctcgggttgattttgctgcgatggtggtcagacgggggattcttacaagtactattcccatatactatagcgggttttcggaagctagtggaactttgtaaagctctcgtagtgttaccctgcctcgtttccttgatagaggtgtatggggcccatacaaccccgtggtagatggacccatggcagatgggtaacatgacttgtgggtaaagggtacaacctctgtagagtgtaaaactggtatactagctgagctcacggtcatgagcaactcaggactctcgcatgattaatttatggaacttaaattcaatttgtcatttgcattgcatgggattattattaattttgttctattactttatttaaggtttggtattaacttacatctagtaactgataataaaactttgaccaactaattaaaagcaatgctcagctttaacccctgttgttgattaggcttacacatcacatgaactcccacctttggtgagttcatgcccactggttttcctcacaacttgttgagctatgatcatgtgtgagctcacccttgctgtctcacacccccacaggaaaaagaacaagtggttcaggagaagccacaaagcgaggagtttgatctgatctaggtggcatttcccagttgacattagcgccaaggatgatccttagttcattttatatttatcttttattttgtaataagacttccgctatgtaataaatactctgatgtttttaagacattatctctatacactctgttattatatatgttgtcttcttggcgcatgtatgaaatgcacctggctttgttccttaaagcccgggtgttacactttgactatttacaaaagattttgaaagga

SEQ ID NO: 30637 - DNA, 3286 bp, Zea Mays
tgagttctcaatgacacctgggtcccacatgagaggatccatgaaaaacctggagaaaggagcgcacaaattggacaaatgaagacacactaaacgacaaccttgggcatggaacatttgtagcaggagttattgctggccaagatgcagaatgccctggatttgcacctgatactgagatatatgcttttcgagtcttcacagatgctcagtgcagatatcttacacatcatggttcttggatgcatttaactacgcgatagctaccggtatggatgttttaaacttgagcatcggtggacctgattacctggatctcccctttgtggaaaaggtctgggagctcacagcaaacaacattattatggtatcagctattggaaatgatgggcctctatatggcacattaaacaacccagctgatcaaagcgatgttattggtgttggtggtattgattacaataaccatatagcttcattttcctctagaggcatgactacgtgggagcttcctcatggttatggtcgtgtgaaacctgatgttgttgcatacagtcgagatataattggatcaaagatcagcacaggctgtaagaccctttcaggcaccagtgtagcaagcccggtggttgctggtgtagtatgtttgcttgttagtgttatacctgaagacaagcggaaattgatcctcaaccctgctgctatgaaacaggcccttgtggagggtgcttctaaactttcaggaccaaacatgtatgaacaaggtgctggcaggcttgatctctggcagtcatatgaaatcttaaaaaattaccaaccacgtgcaagcatatttcctactatgcttgacttcaccgactgtccatatttctggcctttttgtcgtcaacctatgtatgctggagctatgccagtaatcttcaatgctacaatcctgaacgggatgggggtgattggttatgtaaaggatcaacctttatggcaaccttctgaggatattggcaatcttcttagtgttcacttcacctactcagatgtcatctggccctggacgggataccttgctctacatttgcaagttaaagatgagggttctcagttttcaggcataattagtggcaatgttactctgactatttataccccagcagctcatggagaaagcagcccacggagtagtacatgtattcttcacatgaaggtcaaggttgttccaacacctgttaggtcaaaaaggatactgtgggaccaatatcataatattaagtatccttcaggatatgttccaagggattcccttaatgttcataatgatatccttgactggcatggtgaccacttgcacacaaacttccacattctgttcaacatgctaagagatgcagagtactatattgagacacttggatcaccacttacttgctttgatgctagcaattatgggacattgcttatggttgatcttgaggacgaatactttgatgaagagattcagaaacttagggatgatgttatacacaagggacttggtattgctgtttttgctgagtggtaccatgttgatacaatggttaagatgacattctttgatgagaacacccggagttggtggactccaattactgggggtgcaaatattcctgcaattaatgaacttctggcaccatttggcattgctttgggggacaaaattcttactggtgacttctcaatcaatggtgagcagacccactatgcttctggaactgatatagtgcaatttcctgcgggaggtttcttgcatagcttccagctccaagaaaactcaaagacggtgcaagatcacataggaacactggatacagaaagcacccaggggaaaggcaagctctcctcaattcttggagtaatagaagcaggggaagggaggattgcagtgtatggtgattcaaattgtcttgacagtagtcacatggtaacaaactgctattggcttttgagaaaaatattggagttcactggaaacagagtgaaagataatgtccttttctcagaggcagcacagttaaagtttcctgtttttgagaatatccatcatccatcacgtagaacggatgtaaacttttcaacatactcaacagttgttggcaaggaattaatctgccaccaagattcccggtttgaggtttggggaacgaaaggctatggtgtccaaccaataggcacatcaagaaagcttccagagtaccagatgcatgaaagttctagttctcccaatgtaacaatacaaattgctggcagtagacaagataaagttgaaaggcttcaaagaaatctttcgataccaaatgctgctaaatttgatgataaaagagattattttggatttattggtcatgaggaggttgacataggaatgttaatggcaagccaatggatgataccttgcttcgctgccactgcttgccttatgttgtatcttagttgtagagtgcaacaaaaacgccgcagacgaaggaaggggtcggtggctagtgctaatcggctaacaagtatggtataattcgtcattcgcgcggtggtgctgaaaaggtttttttagcgtatctaagtttcaggcctccagccatgatggataaccaggaagcgccatctgcgcagcatgacagaattttagtagccagaaatccctggtagtgaagacacattttaactcggcaactagaggctgaacttgagagaaagctggctcgtcacttctgtggtcacatggaaagcagcttgtcttcccagattcagccattcgtggcatctactgctgttgcttgtagtcgctcacaattttgttcttcgccacacgtagttgtagccacaaaaatcgctgctaagggctagtttgatgaccagagatcacgagaggatccataaatagcaatgggattcctctgacatggatctcctcgtcatccctggccaccaaattagcccttagatcatggagatcggaagggattgagagcaaaattagttcatttctcatcaatctcttccaatctctcccaatcttccgtgatcccctttgtcactaaatcaaccctaagagccaatatctagggtagaagctagagctagtcatttgtcatctccttggaatatgtgaaggagatttgagcttctctgtagatccatgagcaataaggggcagggggactcggcatgagcttggcaggtacaaaggaggcttaggcttattgggaactttgtaaagtaaattttgtattgttaatttaaaaaaaagaaccaggcc

SEQ ID NO: 30638 - DNA, 1646 bp, Zea Mays
gttccacgcgcgccttagcgcctaagcgacgctaaggtaccggcatctgggccaattcgccccactaggagggaaacaaactgctgcacaacttcccggggactggatctccattggccacagcacccagtggctctggtactccgtgtacgcaacctgcttccattaagaattggtcatcatggcgtgggagctcattgaagttccgggcaacttgaatccctctctcaaagactcttcagttgatgtggtggccgccaagattgatcccaagttagccaatactctcattaggcagttaagccaggtgtgccctttggagaatctgaggcatgtaaagcgtgtacgtcgacgtactgaatgtggtggaaaatctgagttatcaataatcctatgtgtttctactgggtctgaaacttgtaacatacagttctctgaagatctacagaagatagtggatacttatcagctgagtcctttcaccgcaaaatctttaacaggttgccaggtgttgtgctacatcaaaagaggagtgggaggaacagtgcaaactttggccaacatcttaccatcctgcacatgaccttggtattgtccgtggatttcaagaggaggaattaccatcaatatttaattgcatgaaggctgctattcagttatcaaaggcaggcaatgctgcaatcattgttgatccatcaagcatgcaaatagttgcaaaggccactgaccatacacacaagcatgatacggctgaagaagggaacacattttctgaagcgaatgcagatgttacctgcccttggaatacatcgactgatgatgacaacaatctgtcacttccaggatcctttcttcctaaactcaacagtttgaacatggaaatcccatgtataaatccttggggatggatgaaaaaaaggacttgtgagcagaagccatcgccatgggatggctgttctgcatggcatcctctgagacatgctcccatggctgccattgaaaatgctgctgagagggacagaacgatgtttccttcttcgatttcaataaccaagccagattcagatggcagtcccgagaactgctgcgacaatgaaccagcaaaaaggctgaagacggatacaaaagataatgagaaaccggcatctgaatcatctggtggcgacctgtttgagaccagcagaccatatctctgcacagggtttgatatctaccttgtttgggaaccatgcacaatgtgtgcgatggcgcttgtgcatcataggttcaagcgcgtgttctacgccttccccaatcctgtggccggagcactcggtggagtctacaggttgcatggggagaggagtctaaaccatcactataatgtgtttagggtttcagtacctgaggcgtacttgaatgggttgaactgttattcgaaggaatgctgatccaacacctttccgtttttatttagaaaaaaagaggatccaagactgttttccttttttttttatttttggcacaagggcttcatattaggcctaaacttgcccatctgtattattaaatgttttggtaacaaatgtgtttatggatgtaaacgttggtgctatttttttattagtttacttaaatttaatgaaatatgatcggtttcaaacatg

SEQ ID NO: 30639 - DNA, 485 bp, Zea Mays
agatagtcttataacttcaattatgacagcggccgccggccagcctgtgtctctctgagtggctcaccgcactgcgccccgtttcagagtggtagcagtgctgcgactgcgtgcacagggtatatagatagataggagtacactgcgtaggagacagcaagagggcgaggctgtgtgtgagagagggggaggcagagaacattcggcagtgtgagaatcggaatcggagatggcttggaatggccgcttcggcgacgacgaggaggggagcggccttgagctcagccttagcctcccgggctacttctccggatcgccaacccaagctgcagcaggtttcgaggacaaagcagacggcggctctgctgctgctgctgctgctgggcgagcaaagggaagcaatggcttcaaggccagaacagagttactgtcgtaacggcgcctcatcatctgaactatgaactacctcaaattcaactcctcag

SEQ ID NO: 30640 - DNA, 3529 bp, Zea Mays
gcggctgcaatccggctgcggctgcggcttctacagtatttttctctctatggattgcagctgcagcagtccaaacagctgcaacagtgtcggcttgtagccagccgaacacgcccagtgttcccagccctaaaacacttgacactacgacactaccgtatcagtctggcaggtcctgtgcataatccaccatctcgctcacaggctcgccgcccccgccggcaatggagggcgttcacagcctcctggcccggcccaactccgcgccgttcgccttctcaccgctgcccctccgcaggagccacatttcctaggcgatggcattcggagggcgttcgagtcgcggatagctaagccacctcagtatgggtacagcacagaagctcttgttgggcgacggcaaatgctgcagattgcccatgatactctcacaaaccagagctcgcgcaccgagtacgaccgtgcgctttccgaggaccgtgatgcggcactcaccatggatgttgcctgggataaggttccaggtgtgctgtgtgtgcttcaggaggctggggaggcacaactggtgttagcaactggagagcacttgcttcaggaccgtccacctaagcggttcaagcaggatgtggtgctagcaatggcattggcttatgtggacatatcaagggatgctatggcagcaagccctccagatgtaatctgctgttgtgaggtgcttgagagggcactgaagctcctgcaggaggatggtgcaagcaatcttgcacctgaactgcttgcacagattgatgaaactttggaggagattacacctcgttgtgtattggagcttcttgctcttcctactgatgaaaaacataaaaataaacgccaagaaggtctgcaaggtgcaaaaaacatattgtggagtgttggcaggggtggtattgctactgttggaggaggattttctcgtgaggccttcatgaatgaggctttcttgcagatgacatcagctgagcagatggatttcttctctaaaacaccgaatagcataccacctgaatggtttgagatctatagtgtcgcacttgcccacattgctcaagcaattgcaagtaaaaggccacaattcatcatgatggcagatgaactcttcgaacaacttcagaagttcaatataggttctcaatatccttatgaaaacgagatggacctcgcattagaaagggcactctgctcgttacttgtgggggatatttgcaattgcagaatgtggcttggaattgataatgagtcctcgtcatatagggaccccaaaaatatcgagtttgtggtgaataactctagcatgaacgaagagaatgatcttcttccagggctgtgcaagctcttggagacatggcttgtctccgaggtattcccaaggagcagagatacccgagggacgcagttcagactgggagactattacgacgacccaaaagttctaagctacttagaaaggatggaaggcggtggtgcttcccatttagctgcagctgccgctatagcaaaacttggtgctcaagctactgctgcgcttggtactgtaaaatcaagtgctcttcaagctttcagtaaggttttcccattgacagaacagctagacatgtcaggcaaggatatcccaagtgatgatcttgataaatctcttgaaaaactcgcccaaggaagtgttgctggagacgctatccatgattccagaaatgacgccttgaagattatctctgctggtacactgcttgcactatttgcagtgttaggtctcaagtgcttgcctcgtaacaagtcacttcctgctcttaggggcgagtatgggtctgtggcggttgttgactccattgatggtccagcggcagatgaagagccactggaaatccctaggatggacgcgaagttggctgaagacattgttcgcaggtggcaaagcatcaagtccaaggctttggggccagaacacactgtcacggcattgcaagaggtcctcggcggcaacatgctgaaggtgtgggcggaccgagctgcagagatcgagcgccacggctggttctgggagtacgcgctctctggcgtgacgatcgacagcatcaccgtctccgtggacggccggcgggcagcggtggaggcgacgatcgaggaggtgggccggcttaccgacgtgaccgaccctaagaacgacgacgcgtacgacaccaagtacaccgcccggtacgagatgacctactccaggccagcagggtggaggatcaccgaaggcgcagtcctcaggtcgtaggtagaacggctgtgcttgtgcagctgcagcaggagtaggcgagtagcgattctgaagaattccagccagttgtgcctgttgtgaaagccgagccacttaaaaatcagtgggctgatgaagatgttgaagaagatgatgtaaaagaatcatgggaagaagaggaggaggaggagaaacctaagccagcgccagtggaaaaggtcgctgcaaaacctagcactaaggctcctgctaaaaagggaaaacagcaagcattgacaagtgctgaagaaccagatgagcctcctcttagtcccacttcacagaaaattcgccaacaaagacttgtggaagaagctgacttcaagtctaccaccgagctttttgcaaagaagggcagtgagcaaaagtcactagatacttttattccaaagtccgagagtgactttgcggaatacgcggagcttattgcaaacaaactacgcccctatgagaaaagctttcactacatggctctgcttaagaatgtcatgagactttccatgacatcgttgaaaggtgcggacgccaaagatatatcttcttccgtgacggcaattgctaacgagaagatcaaggctgagaaggaggctgcagcaggcaaaaagaaacaaggagcgaaaaagaagcaactccacatcgagaaaggagacgacgacttcatccccggccggggtggtggctacgatgaccccgatgagtacgacttcatgtgatctggctgggagggatagtaggtttctgttatgtatacctttggcgggcagagaatatatcactagagtttgcggcatactattgcatggaacatgcgttatctattcgagaatgatttttgactctgcaggataagaagagcacttgtgatctggatgcatgggtgttttcttatttatccttgaatctttgtgttatttttttttcaacattgcattttttgccaaatgtactatagtaccttgtactatctggttactccgtgagtcatgaaagcaattaaatccctggagggtgtctcgcttgtgtttgcagctgtatgaccgtgtgcattgtttttggagatcttgtgtgatccactgactactccgactggcatggttgtcttcctttttctgacgctcggacgagacacagcaagacactattggtgtgctagtttgctgcacggaggtgttgttaggttgcacactgttggtgtgctaatcttacttctgg

SEQ ID NO: 30641 - DNA, 734 bp, Zea Mays
gctctgcatattgtccaaggctctaatttatcactccactgactgcagcagtgcgatggaatcacagtgtaacatttccagtacccttaaaggactggatcctcaacctggatcaaagaggaaatgcccacacctcaaatccaatgaagaggatgtagagctttcggatagctttacgcgctctgtccatcttacaccaataaagcgactcaaggaaagccatgacgccagatatggagcgggggaatccgccaaaactacccatttctctaatagttcctctggtggttaccacgaggatatgaatttacacaactcaagaggttgccttcagaactccccctgtaatgttgaggatgccctgtccaaagggtttgagggttgtatttcgatgaaatgtccattttgatgtaacaaatttcgtgtcagcccagaagctatacattcccttttagcggcaaaatcatcctgtgtgtgtatctagtcattttgtgcaaaaaaaatgcagtaattgaatgcattttttttaaaatgctttaaagtgtattgatcagcatcggacctgtttttagaggcatcggtatgaagggagggctgttggttgtgtttgcttgacagcaaatccctcccattcaataccccgcactttctgaaaattgcgacttccatattcccttcctttgagctttgttaagacagtattgtattacaagatctgaatcgctgcaagcgtg

SEQ ID NO: 30642 - DNA, 689 bp, Zea Mays
gcaacattagccgtgagaatggcctgagtcacatctcaccacatccgcgaccgcccgaccgcgacgctgaaggggaacgcctcgccgccaccggcgacagctggcgcgagaggctccgtcgacggacctgctactcgcttccttcatcgccacctcggatggcaggccccgttgaagcacacacactggctgcctcagcaccacctccgacgccaaaccctaacctggactggcgggttcgacacccacccaggcaccatcgcctaccctaaggtctttcatctggatgcagggaggagggagctctgcagcaaaggaagtctgtagtcaccatggtccatttcaagaacaggaagcatcaggcggcttgcaagaaagctgcactggagtgcgattgcgacgaagcgaaattttgaacagtacaggttggccgcgcggtggtagtgtcacggtgggtgtcgtccggtccgtagagatcgagctgctttgagaagattagagaggactagagagctagctagccgaagaaggaagaactcgtatctcccccttggtgtttttttctgtttcgttgtatccgcgtgatgctgttaattctgggctatctaaggattttttttttgccccagttattagcatgtgctcataccataacgaattgctgcattcttctgccaatacagttttgg

SEQ ID NO: 30643 - DNA, 3669 bp, Zea Mays
ctctgcgcgtgcgcgcgtacgtggctcgtgggaccgaggtggcagccacgggcccgggctttaactgcgccagtgcctccgcggtccgcgcccaagtacccaccccaaggcatgagctgagagaggctgggactgggaggagcgcagggcgcgattacgcggacgctccagtctccaccctccagagcagacagcaagcgcccaagcgccatgatgttgccgccgccgccaccaccgtcctccttgcgcgaccttctctcgcgggagcgcgtcgacgaggacgaggcgccgcatctgtcgccgcgacgcgcctccgggcggtcacccccgcgccgcggggcgtcgtcgaggtcgtccaggcacacgtcgtcgccgccgctggccacgaccacgacaacgaccagggaggcggagggggaggccgccgccgccgacgcggtggtcgccgtgctgtccgcgtacgccgggaggctgctcagggacgcggaattcaggcgggcgctccgcgacaagtgcgccgcgtgcctcgcgcccgccgcgggcgcgggcgaggacgacgacgcggcggcaggccgccccgtgctggccaacctcgagctgggcatcgagagcatagagcgcctggccgcggacggctccgccgcgcagccacaggcgccgcgcgacgccaagatccggtcgctccgcaactccatccgcctcctcagcgtcgtcgcgtcgctccactcgccaccgccgccgccgcgccccggcgccgccgcgggggacggcggcggccgcacctgcggggtgcccaactcgcacctcgcagcctgcgcgcagctctacctcgccgtggtgtacaagatggagcgcaacgaccgcgtcgcggcgcgccacctcatgcaggtgttcgccgacgcgccgggcctcgcgcgcagggagctgctgccggacctctgggaccacgtgttcctgccccacctgctccacctcaaggtctggttcgccagggaggccgacgacctcgtcgctggccgggacgccgacgaccggcgcacgaggatgaaggccctgcagaggctctacagcgaccacatggacagcggcacggctcagttcgctgtgtactacaaggagtggctccagtcaggcgccgccgcgccgcctcccgtcccctcggtgccgttgccttcgacgcccaggagtttcgacgggcgcgagaagagctcggcttcggtgcacagaacctccatcaacagagacctgtataatgcggttttcgggacagctctcgctctcgggcaggaagacgtcaaggatacaaagctggacgatgggactggactagctctggatttggatgtcgaattggatcacgatgctgcgggcttcaagacacagaagcttgctcatacagagtaaaatggggctccaggaaaagcactcccgctctcggaaagaaggcgccgctctagcagaaacagcacctgcgcagcggaaatcatactcctttcgactgttctcgtgccaaggcgatataagcaggaacgtgatcagccatcccaaagcagcgaagaaggaacccgtggtgtctgtcgagaaagagctggacagcagcgagctagctcctgctgtcgtgcctctgctggaacgagcggtttccgtggtatccagttcggacagcctgagtcagtgcgaggacgccgtgcacgaggtcgccagagcatgctcggcctgggacccgagcctcgtgaacctgctgtcgtgcgcctctttcatccaaggccttctcgaggtcacgctgacctccaaagacgacgccgtgctggagtcggccatgtcgatcatggggaagctggttctggggaacgaggtgatcagacagctcgtgctcaacgcggacccgcagctggaggttttcctgaggctcctgaggagcagcgagctgttcctcaaggcggccgtggtgctctacatgatgaagcctaaggccaagcagatgctgtccctggactgggtgccgctcgtgctgcacgtactggagtgcggcgacgaggtgcagtctctgttctccgtaagatgcgcccccaagatcgccgcgttctatttcctggaccagctgctcatggggttcgacgttgacagaaacgtcgagaacgcgaagcagatgatcgctctcggtgggctggacctcctgatcggcaggcttggcgctggcgacgctcgcgagagcaggcactgcatcgctctcctgaccacgtgcgttcaggccgatggcagctgcaggcactacttggctgatagtctcaagaaggagcctctcgttcagcttcttgctggaaatcagaggaaagccagtgccgcgtcccttaacctgatgagtgaactcgtctgccttaacagaacaagcaaaatcgtggagttcgtcaaggagctgaagaacagcgggtgcttgaacacgatgcacgttctgctggtctacctccagcaggctcctctcgtccagcacccgttagcagctaccatgctactccagctcgatctcctgggtgatccttcgcagtacagcgtgtacagggaggaggcgatcgaggccatcgtagccgctctggagcacagctcgcagagcaggaaggtccaggaacagtgcgcccgagctctcctaatcttggcagggcggttctcgtcttcaggagagcccgtagcagaagcgtggctgctaaagagagcgggcctagacgattccctctctgagtccttcaggagatcagaagtattcaaagataagagtgttcgagcggaggaagagaagctagtggaagaacggcagaagaacctcgccttgatgctactgaagagcgggggcagaaggttcctcacggcgctgtcgagctgcatatccgatggaaccccgagcctcagccggtcgtgcctcgtcagcgtggcatggatgagcagctccctctcgccgctgcgcggatgcaacgacttccagcccctggcatgctccgtcctcgcgtctaagcttttggacagcttgagctacgacagagtcctggaggagagggtgctcgcttcgctgtcgcttctgaacgtcgtgagacacccagaatgcatggagaaggtcttcccgctgaagaaagaaaccatcgagtcactccaagatctcgcggaggtgacgtggactgcgaaggagctcctctttgcctgctgcagatgagatgcaagaccagatcgtcctcagcgatgaagaactagacaccagcatgtaattggaagtgattgttttgggagaagagtgatcgccactgctgtacacagattgtttcgtacttccgttgatatgtgaagccccacagatcctttccctcgtcatggactttggctttcgctgttgaattgaagcctgcacatggcttcctttcttcttcttctttagggcttgtttagattgccaggtatccatatcaatacacatccatgtgttgtacgttaacacacaacatactatattgagttggataatgatcatccaaataagtccttagttttacattatcctatacacgtggattgagttgaatatataatcacccaaatgtaagtcctcagtcgtagttcgttcccgtgataacatttttttgtctccagtgaaaataaggcctattggatctcccatcatcaatc

SEQ ID NO: 30644 - DNA, 7347 bp, Zea Mays
gaaaaggatgaaaaacagaattctttggaactattgttaagacggattgaagggctacaatatgaaatggatgaaaaagtagatcttgttgaagtgttaactcgtcaagttgaaaatctgcagcgagagcgtgatgagctcagaaaagatattgagcaattatgtatgcaacaagctgggcctggttatgtttctgttgcaactcgaatgcttactcagaggacagcagctttggaacaggatattgagaacctccagaaaaagttaggtggttgcttaagagagaatcaaaatttgcaagaggagcttgctgaagcttatcgaattaagagccagcttgctgagttacatggtgctgcactatcaaagaacaaggatcttgaaaagcaagtaagatttttccagagcagtgtcgctcaagcgtttgctgaacgggacagttcattaatggagtgtgagaaagcaaaagagcgggaagaagcagtgtcaagaaagtttgctgattttgaggaaaggatgagagaatatcaatcagagattgatgaacagaaacacttaaatgatgacttgcagagagaactgacagaactgaaggcacatacagaattgtccttgaaagttattctaaaattctatgaccttcgttgcagagactctggatgttcttcaagccttactattgaagagaagtgttcaatccttcttggtgattctgctgacaattggagttttagctctgatggcggaacctcaactttgaagtacattgtaaaccacccttatccattataaagaatgattcatatttaagtatgcgatctgtttttttttttgcatttgtattgcaagatacaaattctctgtggcactaaacatcatctggcgcagagccagaaaattatagatatggggacgaaatgctaaaaaataaattattagaaggcaaaatcagcattttcattgaattttatgtgcataagaggaacttatctatcataacagagtgcttgatcctccctccttccgcccctgaacatgttaatgcattgttggctaattggcttgttcagttttattctgggaactaaatgaatgcagaaggtaggaaatgatgaaactttgctggcatctgtttcaggacttatgcagttatgctttgttcccagtttctcattcaacatactgctcaatacatggatagaaaacatccgtattattgatggaagtcataaatttagtgctaatcttctcatttgtcctattcagtaagttatagttcagtatgattgtcatgttctatttgacctaattgtgtcatgtacttgagtaatacaacatgacttgcaggccctaatttgttttcaagaactgtttattgattttttttccagttgatttggtcctaaaccaaagtgctttgcatagttaaggcgagtgtttgacccccgccttaccttcgaagcggtaaagtgtaaggcgagacaacaccttaatcatatataaatataggaaaatatagaaaattagtcttgaatagaagtacgaaagtaccaaacagaagtctataagttcaatataagcaaacataataggctaaaagtccaacataagtaggttctgatactctcatctctcaagttctgatacatcatcaaactcatcaaaaatgggaggattactgtcttcttcgcgttctctcccaccggatatatcatcatcttcactcacattcaagtcatctttcgcatgattggttgccgcgtcctacccgcccagactcgcggcatgcgttggccgggcgcgagcgagtgtttggttgccgcacccacgccctccggactgcatgtgcgcatgcagtttagtgctttttttcgccgttctgcctgcaagcgtggagaagccggaaattaccttcgctgggggaccaggcccgcacgaggcaggcacgtgacagaccggcaaccaatcagcccccttgtggatctggctcaaagtcttcgtccatggcacctccctcttcttcttacggcctcattcttgcatgctttctctatgtaaggccagaactttgtctctgactagcttgccttggaaggttgtgccctcgaagcgactccgatgctctagtagcaacatcaacatgatccatcatgtgaggtcaacaatattatcattgtccctgctggggtgtaccactgatgagtatccactcgttgtcccaatcaaaatcctcaataattaatgggtcatagcttgtgccggctttctccctcatttgaaacctacttcgcatcttttgattgtatgaaacatagaccaagtcattcaaccttttatgcaacaacaagtttctcttctttgtatgtatagtaagtaacaaacccaacctaaataagtagcaagaaatagattgaagctagtaaacataagcgaagtagcaaaaaatggacttacaaattcaaatgtgcttcaattcctctcacaaccggatgaggaagcacaaagtctaaccagtaaccacacgcttggcaaacctttgaaattcatatgctcggccgccatatgaacgttatcaatcaactacgcagatgcaaacagcgacacggtcacacacataggtatacaacagcaggaaagaataaaaaaagatgtgctgaaattagcaatcagccaagcatatagtactttagagggctctttgcttgaatgttttcaagtgccaacttgtttgaaaaatagaccctctatgatcttcataatgcatggcatgctcattaatcttcgaccgtatttcttcattggactccattcttgctagcacataattgaaacaactcctcagctttacaacatatctatcatctccctttggatggcaaagaattttcccaggttcaaataaagtgcagcaccatacgatggatggtccatttgtttcatccaacgaccctcaataatgtccataattttttcagcaatgcttgcttgttttgtgtagggaagctaagccttttctcttttgcaacatccattagtgctgcaatttatgtcatgtatgttttttcatctccatcaactgccctaagcactataagaagtgccaaagctctgaggcaatcttcaactgaagaccaaaaagtcttagctagaataatattacaccccccttccagcctctgtctttgccaacttgttgcagttccatgcatctcacaaaaagtgctctcaaggcatcttgatgtttatgtagacttttcaaagtaaggaatgtggcaaaacgagtggctgctggtcttaaaggatccccctcctatcttctccctcattgcacttagaattcctccatgcctataaataaaagtggtgactcttttggcttgtgcaattagtctttcaaatatccaatatcctccaccatgaggtccaaacaatgtgcagtacaaggaccctagaacaatgttaaaatactatccattagaagcctacccactgccttatatttttttctcgaatacgcaggagagctgcgtatcaattcattaatagtagaggagaaatatatatacaagaaaaaggcccacacacttgcacacacccactaggaacagaactgcaagaacatttgcgcctgttacagcacagaaacgaccctacacaacaactaaaatcggtatgccgtagcctccagaagctgcagatccttggcccctgctgcactccaacacaaaatctcatcaccagccaagcacaaggcagcagccaatcgtggaggtttgcgaccaaagacattcatttctgtgtctccacaaggtccatgcccctaagattatgagagagttaaaacctttctgaatggagcttcgcatagagctggaagaactgctccaccaatccaaaaaggaggtcgcctcaggctgaggggcaagaagtgccaaacccattcggctaagaaaaaagaaccagaactgacacgaaaagagacaggagacaagaaggcgatatagcgtttcacgttcttggtcacacaacacacaagcttcagggtgtggcagattcgtcctttcaagtcgatcagatgtccaacacctattgtgggcagccaaccacatgaagaaggcacatttaggcggcacccacaatttccagatacgctcccatggttcaaagaacaacgagctctgcatgagagcatcatatgccgatcttgctgaatatgccctgacggagagaggctccaaaaatgtctatccggcatttccagcacccctggctgaagctgcaccacgtgtatagcctctcaaataccaagaaactcttgctaactctgccaagaaataactccatggatatcgtggacccatcttgaatctgttagagcatctaggaccatccttcgattagctattctggtgggaatcatactatgtataagtggtgctagttcctttaaccgctgcctcatcaaccatctatcctcccaaaacaaggtggtgctaccatcgcctagttcagtagtcacggccatgttgaaaattccttgcacctgtttatttgcttgtagcttgaaggcagcccatggtctctgtcagcctttggctttgtggaagcagcctccttagtggtttggtatgaacctgaagaccgcctatcatccacaacctattcagggattctctggagcatgcttgcgaccttcccaaccacttttggcatgttttgggcttagttgtagctggttgcctaaactgaaaggcggctctcctccgtttagcagctgtcccggaacttggctgcacaacggagcaatcagattcattctgtcctagcctctgcccctgcacctgcccatgtactggaccaatgttataaggaaaataggcctgttcctcttcttctccaagtaagctgtcatctcttttctaatctcagtggtggtgttgaaacacatgactgtcctcatatcccccggcaaggtgttctttataccttttaattccttctttgttaccatgttgcatcggatgcatgtcaccttatcctgattccctatttctgtccaataaccgtacttccagcctgggtcattgaattttgcctctggatcttgcatggggtgataaggatcaacatcaatgggagcagcagcagcggatgcggatcagacactctccatgacaatggcttactctgtacaggtggatagtaagaaaaaggcaaaggttcagctcactaattaacatcagagagtggggaacagagcagcacggaggcccattatcttgcaccggatttaaagcagagggctgctgctaggatgctggcctgcccgccctgtctggctgcgccagcgccacccctcctgcgtggccacaccccactcctccctgtctgcgcctgcatgccttgcttggcccgtgccgcccacctcgctgtgccgcccgtcctgcctggtcacgccactcctcacccctccttcgaacagaacaggcgcaccgcgcaactcagcctttgaacagagcagcctccgcccacaaccagccgccttttcattcccttattcccataatgcgacaccctagaaccgctttacggacgtctgaggtgccagagcgactagacggtaaggaagatgccttagtgtcaatcttaaggcgggtaaatcacctcattttttctgaccgccttaccgcctaagggacgccttaatagtttgcattagagattttcccttcaatgtatttgacattttttgtaggcatctttagaagaggagaaagagtcacttaaagctaaaatatcgaagctgcaaagcaacctaagaatgggccttgaaattgaacaacatttgcaaagaaatgcacgaatattagagaaaagacaggcactgtatgatggattcctgagaaatggattgtccgaacttcaaaagttctacacatgtcaaaaggctgaaattatgaaaatattggaagaagaatcgttgcggttgatgaaagttgttgcagagattcaggataaactaactgaaatttgtatcaacactgaagttagtgaccaccctgccgatgagattcaatgttgtgacagcagttgtaaagatgtgcatgttactaaagatatcagtcctagcacatgtcgtaagagtgattatcctgctgatcttaactccgtgtcgtttgatgaatctaaagcacttgcacaagccttacaggagaagatggaagcacttatgctcttctcacaggaacaagaaagatacctattagagaaacagagagacctgattgttatcgaggaactccagaagaacttatctcaagttaaagatgaaaaggtgaaggtcctgatggaattaacaaaactaaaagaacaatatttgctattgaagggctctgctgtcaaggaaggtcatgatactggtgattcatctaaactcattcctgggcatgaccaacaagggatgctgaagactatgctgaagaggacatctttaagacactggatgaggaaagaaagtaatactattggacatgggagctctgatggaaatgatcatacagtttgcaaagaacattcagtggatgttgcaagattaagagttgaaaatgctatgcttcttgaaggtgttggtactgttgagcatctcacttcttcagtgcatagactgcatattgtgcttttgaaggcttatgatgatatcaagtcagctgatcctttggagagtacctttgaagcgctcaacagtcttataactgaagcaaaccttatgaagacagctcttaatgtggttcttcctgtaagctggtccggggattcatcagatgcaattaaatatgaagctatgtgcgatccatctgattcacctaaatcgaagtctgggaaagtagacccgctctcttctgcaggcatggagatggtggagctactaatattggctgctgagattctcaaggagagctttctggtgaagaaataaggcctccatgtaaggacgagtatggctctccttgtttgtttagaagcatgcaatttaatccttaatttttttgggtgtatatacttaaactgattgctaaaagtgcactactagattatttcggatgtagagaaagagccgaatgtgcactgtaatttacggttcgctgctattgatgtgtcttgtgttggtagactaaaggatttaagagccatgtgtacaaaattcagtttacaagcaaagatcaaagaatagacatgaactagggaaagagaaagaaaaacaaactgaaagttccatacctaaaagcgtcggcactggttgtcgcctaaaggaaggtgaatagacggaatctaaaaattataaactta

SEQ ID NO: 30645 - DNA, 5858 bp, Zea Mays
cgctctgcaccgcgcgcctccttctctgctgcggcaaccgggaactgcggctgcggcggcggcgacttaaaccctcgagctcgctccaaggccgtcgctggtcgatcgggcggaagaggcagaagccagccagccagccaatggcccccaaggccggccgtggcaagggcaggggcggcaaaggcgacaagaggaagaaggaagagaaagtggtgcccagcgtggtagacgtcacggtggtcacccccgacgagtcccaggtgacactcaaggggatatccacggaccgcgtgctggacgtgcggaagctgctggggtcgaacgtggaaacgtgtcacctgacaaactattcactctcccatgtggcgcgcgggcaccggctggaggacggcgcggaggtggtggcgctcaagccctgcgctctccggatcgtcgaagaggagtacgcgacggcggagcaggcggaggcgcacgtccgccggctgctggacatcctcgcctgcaccaccgcgttcgccaggccccgggacggcgccgccaagcacagggcgtccaggcacggccgccccgcgacaccgccctcctctcccacgcccgcctcgaccggggcccatggcgtcgccagcggcgaggccgcgccgccgatatcggaggcgcacgacatggccgccatccggccgccgcccaagctgggggagttctacgacttcttctccttcgcccatctcaccccgcccgtccactttatcaggaggaaggaggcgaatggcgcttctcaggaaggcgatcacttcgaaatcgaggtgaaggtttgcaacgggaagcttctgcacgttgttgcttcagtaaagggtttctacttgtcagggaagccacacaacgttagccactccctggtggacctgctgcaacagctcagcaatgcgtttgctaatgcatatgaggcgttgatgaaagctttcgtggatcacaacaagtttgggaatttgccttacggattccgtgcaaacacatggcttatccctccaatatatgttgactctgccacaaggtgcccagcactgccagtcgaggatgagaattggggtggaaatgggggtggctgtggacgtgatggaaagtatgatcgcagacggtggtcaaaagagttttctgttttggctagaatgccttgcaaaactgaggaagaacgggtgatcagagaccggaaagcttttcttttacacaatctgtttgtagatacagcaatttttagagctgcgtcaacaataaggcgactcattgatcagtctatgaactcagttggttcacatagtggtacacatggttcaaacgtatttgaggaacgtataggggacatgaatataactgtgaagaaggatggtgctgatgctagtttaaaggtggaggacaaggttgatggtgttgccttctgtcaaacgggtgctatggatattgcacaaaggaatcttctgaaaggtttaacctctgatgaaaatgttgttgctaaggattcttcaacactcggggtggtgattgtcaagcattgtggatatacggcaactgtgaaggtttctggacgtgcaaaggacagtaatgatgttaaacaaacaaatgacatctctggtaaatttgatggaatgctgaccattgatgtacatgaccatccagatggaggttctaatgccttgaatgttaacagtctaaggataccactcccgagagttatccatccagaaactgttgttggtaaccagcaccatagcccaaagtctcatgctagtaatcctgcaaagaaattggcacgtaaaatactcaaggacagcttggtaaagctggatagcatgcctagcataaattctagaattattagatgggaactggggtcctcctggctgcaacaattgcagaaaaaggatactccagcgtctgagaatggtaaggggaatgcgatgaagactgacaaagaaccagctgtcagaggtcttggaaagcattttgaacaattaaggaaacttaaaaagaaagaatgcaacaatgaaggttccagttctgagaaggaagaatgtagcaataactattcatcaatgaatggtacacaagtatcagatatgatagctgctgatgaagcaaataacggggctgatattagcaagttaatgtcagaggatgctttccttagcttaaagagtttgggagctggccttcatgaaaagtccctcgaagagctcacaaagatggcccataatttctatgatgatactgcactcccaaagctggtagctgattttgcgtcccttgagctttctcctgtggatggaagaaccatgacagatttcatgcatgcaaggggacttaatatgtcctctttaggcagggtggtagagctagcagagaagctcccacacatccagtctatatgcattcatgaaatgacttgaaaatggtgctgacacggatgcccatattgacaataatttgcgactgaaatgggtagagagcttcctttcaaaaagattctgctggaaactgaaagatgaatttgcacatttacggaaatgtatcattctgagagggctttgcagcaaggttggactggagttagctgcaagagattatgatatgaatagccctaacccattcgacaaatctgacattgtcagcattgttcctgtgtgcaagcatgtggtctactcatctattgatggtcgaaacttgcttgaatcatcaaagatggcattggataaaggaaaattagatgatgctgtgagctatggaacaaaggcactgtccaaaattatagctgtttgtggtccataccatcgactggcagctaatgcatacagccttcttgctgtggtgctttatcatactggagattttaatcaggcaactatatatcaacagaaggcacttgatatcaatgaaagggagctgggtcttgatcatccggaaactatgaagagttatggggatttatctgtcttctactaccgccttcaacacattgaaatggctctaaagtatgtcaaccgtgcgctatatctgcttcagttttcatgtgggctttcacacccaaattcagctgccacctacataaacgtagctatgatggaagaaggcatgggaaatgttcatgttgctcttcgatacttgcatgaagccctgaagtgcaataagaggttgctaggagctgatcacatccagactgctgcaagctaccatgctatagccatagccctttcaatgatggatgcgtactccctaagtgtgcaacatgaacaaacaaccatgcagatacttcaggagaaactaggggaagatgacctccgaactcaggatgctgctgcatggctagaatattttgagtcaaaagcattagaacaacaagaggctgcccgaagaggcatgccaaaacctgattcatctattgcaagtaaaggacatcttagatcttcttgacttcataagcccagtccaggaaagaaaagaaagcaatgtgcaaaggaagtgtcggcgtgcaaagaataataccagagctcatcatggtgaatcagttgaagaaaaggagaatttccagcatgactcaggatctcttggagcaagtaaagacggttttgaagaagaaaaacctgatgtgcatcctcctgctgtattagaagaaaattatgctgcccatgaagagcagaagcaatgtgatgttttatcaccagaagaatattctgatgaagggtggcaagcagctaatatgagaggaaggtccgcaaatgactggtttacagcctcgaacaaaaggggagaaagatgattctgcaactgctcctagccagatttcatttggtagctttttaaaaactgacaagttgaatggggatcccagcattgctgaagataagtctttgaatggtactgctaaaccagaacaatttacaaatccaacaggaattaacaggccaaccagcattgcttccaagtttatatcatacaaagatgtggctgtttcgccccctggcacagtattgaaaccaattttggagaagaaggaagcaaaggagaagggtagtggacatgatatttatctaacactgtcatccgaggaagaagatccacagtttacagaaaatgagaaggaaaagccaagtgaggacagtagcaaagaggttctttcaagtcagcaagacttagagagtcatgtagaaacacctgacagcaacagtgatgaaaacccatctgcacctaagaaggcatctggaagcaaactgtcagcttcagcgcctccattcaatccaggatcactcttatcaatgtcccacccatacagcacggtggcaatatatgatgctagtgctgttattcaggcagtaccaaaccaagcaatggagattctccctcatgccattgacactagagtgcctcgtggccctcggtccaccttgtactatcgtactgggcattccttccaaaggaagcaaggttacacgcacagccagagcactattgtaaggggtagttactcccccacaaccatgaacccccatgctgctgaatttgtgcctggaaaaacttcgcagcaatctgatgtggctgacagagaacccagtcctgctaatcatgtggccaattctgatctggatgttgtatcacagaccacagatgaagtgaaggctgaaacacctgccactgaaaaggcaggtcaagttgagaaagtcgtttcaggtaaaggaaaggaaaacagagggaaagacatcgtgagaaactcatacaaaacagaacttgcaaggcaaattttgctcagtttcattgtgaagtcagtgcatgacagtttaggttccgcccaagctgaaccagagaggaagccaagtggatcagatgaagctagtaataaacagagcagcaacttagtcaagaatgcttctggtcgcaaagattcagataaacaagagaaatccatggaggttcccaagggcctgaaggatacagagggatttacagtcgtttcaaaacgtcgaaggcggccccagccattcatgaaccccataaacggcctctgttctcagccgtctatttgcacctctgtcagttaaggtctcattgcattttcaaagacctgcaatagtttggaagatggaccattgcttttgcttaggggttggtagaagaattttgccgtatccaagcgagcagcgagcatgtagtcaaactgtacaaaattttccaggataccctttgtaataataataaaaaaaaactgctgtaatctgcagtagctgtagcgctgaataaagtattcctttgtatgttagatatgacagaatcagaggaaatagcaagcagatgtttaggttaatccaatatcccagtagtgcttctcttatgccctagtgtttctgcagtttctcaagatgtcgtggggatttatcgttgcaatctgcaaatgctgtcagagcagaagaaactgaatctgctaggcgccaagagtttgttcatgaaggcatgtcttttattgcttctttcccctgtgcccagactgctcagtgtggtcattggatgccttgtcagaggacggagcagcgtttcaccgtgaagcaattgcagctgcagaccagatcaccagaccactgaggccaggcgtgaactgggccggcagttttaaagctgttggcagctacgtatactgtacgagtctaaggagtagcctgcagctaagcgtagctgcagagaccacacaaatgtgaatcaaatcagttcagttccaaactgtcattgctgggagccaacatccgagactgaaaaatatgttgtgcatacgtatttttcttttgcatttaaatttgaaaccggctcattgtgtccattgc

SEQ ID NO: 30646 - DNA, 2316 bp, Zea Mays
caaccttttcgttgctcgctcaccgaccggcgccatcactcgctgaaatttcttttcccaatccagttcattctgccgctctccaatagtccaatccggtcgcggcgaagctcggccagacggccaccccaccccaatgccgtcacggtcgggctcccggggcaggcggccgcggccggccccagaggtggctgctcccacggctgtacaagtgagctcgtccggctcgagtgaggaagggagcgatgaggaggaggaggaggggagcgagggatccggtgacggtgcgaggagcccgggcggctctgccagcaagtataaggcggcggagagtgaagccgaggcggaggacccatgccttcccagctgccccatttgtatggtcgcgtggaccgctgatggttcgcatcgcgtgagttgcatcccctgtggacatgtctacggcagacattgcttagagatgtggttactgcagtacggcaagaaaaaggcaccgtgtcctcaatgtggcaagagatatacacagaacaacatcatcaacctctatgtaccagagattgttgttcccaataatgatcttgaaaagcaagtattgtccttgagagagagaaatgaatatcttgagaagcaacaagcaaaattacttgaggagataaaagagcataagaggcagattatgttgcaacaaaatataatatatgaatcaaacaaaaagagacagagagtgacagagcagtcatcagatggaatactaggggcagagctaattgcctcgcatacaaaggacattgaccacaacaatctgtcaagttttgctctccagaatgagtttttggtcgatggagctcgggtcatgggtatagatgcatccagtcaaattatattgacttcgggaagggcacatggagttagtgctgaacacatacttacaaaggttagcatgtttcatggacatggaatggagaaaatccaccttcctcctgatactaaagctattagggatatctgtgtactgcccgggggccatgttgtttttgcatcactgggcaggaagttgtctattttcagcatggctaccaacaatgttgtccttcaatatgatctgccggctcctggttggtcctgttcaggggattatactacttcaagtcatatttatgctgggttacagaacggcatgctattagtctttgatatccgtcaaacttctgcacctttgcattctagcatgggtctatcaacacacccagttcatacaatacactgcgctgtagatggcagtggttccaggaaggttttttctgcttcttctataggaccctgcgtttgggatgccagcgaaaacaggccgagtttggtaagtgggatggaaaaccaaggggtctgcatatctcttgcgtgcagctctccatcaagtgatgtcctggtggcttcatatcgcccgagagttgagctgccagacgctatcgccacatctcaagcgtctacaccacaatcaccggcacccaccggttcaggaaaactaggatgccacacactccttaggagaaccaccgccacatcctttgccagggaccatatctgcagtggtagcgtaagtgagttgcgaatgtcgaagtctgcaataataccctgcagagacaatcagcatctatttgcctatggagatgaatcgttgtacggagtccggacttggcggctgccttcgtttcagcggtacaccgatctcaagccccacaggcaaccggtccttgatctaaggtatgctgaaagttcaactggggagaggtaccttggttgcttaagtgccgaaaagctacaggttttcacaattaggtagcttgacagaggcattagcttggtttctggaattctggtagttgtgcttgtgcatgctaacatttgtttcttcagcagctttgctgtataagtaaaggccattgtccatccgtacagtcttcacttaaaacagcgtgtaaaaccatgctgtacatttcaaacaatctgttgtaacttgtaagaggctccagcatacaatacaccagcgggtgaaggattgcatatgctgtagtgttgtactgatgcagcattgcattttgtcatgaatcaaggaaacaaatgggtagcaatctgtcacacctttgaagcttcctgctgtgctcactcgctgatgttttcagtttgtaatcgtcattgtacttcactacaaaacgtaacgtaacatcaggcatgcacttcttcgtgtaccttatattcttctttctatgaaattgtactttcatttttcataacataacttgataatgataattctgc

SEQ ID NO: 30647 - DNA, 1445 bp, Zea Mays
aagctcttggaaagtgtgagcatttctttctagagttgatgaaggtgccgagggttgaatctaagcttcagatattcgctttcaagattcagtttcagtctcagagatgttagaaagaatttgcagactgtgtcatctgcttgtgaggagaagctctgagaagttgaaggttatcatgaagaacattttgttaattgggaatacattaaatcaaggcacaccaagaggccaagctgttggttttcgcttggacagcctcctaaaacttatagacacccgtgccactagtggcagaatgacattaatgcactttctatgtaagagaagtcaccggaagtaatggattttcatgaggaacttgtcaacttggaagcttcttcaaagttgcaactgaaagcattggcggacgagcagctggcagtcgtaaaggggctggagaaagttgaacaggagctaactgcttcagaaagtgatggtccagtttctgatgttttccgtaagactttaaaggagttcattgattgttccagtgctgatgtacgctccctatcagcattctattctgaagtaggtaaaagcgcagatggacttgctgtttattttggagaagaccctgcaaaatttccttttgagcaagttgctacaacccttctgacctttgtggggttgttccggaaagctcatgacgagaacctcaagcaaattgaggctgaaaagaagaaagcccagaaagaagctgaaaaggaggcaaaccaggacaaaactcctgtaaaatcaaaaaatgggaatgcagataaatcgccaagatcaccatcaaccttctaatgatgtacggcagaacttcacatggtcatcatttcttcctcaacgaatgcccgcctttgctggcctgggcacaatttcgcaagcatgaacagtatacaaatccataaattccttgtggacaaatgcttacaagacaagatggttttggttcaacatctatgcatgtatctcatgacactgtacaaagctcacaccccacacaaaaaactaggttcttctgtacaaaatccatactagatccccccccttctgtctatactagcagcaggagtaggtcaatgtttgtaaagtacaaataggagtgtaggtagtgatcagtagcaggtcagaagcaggattagtgctaccacaggcaggttcctaagcagataaagatgagtatcatagccatgtcctttgactccttgactagagcaattgtgagcttcagtgtttcgcctcattattgtcaagagaaaaaagtggccacctgttgcttatttgcattgtgttgcattctcctccaacaatcgatgtggtttttcatggcacaagtttctggcgtagaaaatttgaaaactgttccactaggactgcaaccatgtgactccatacatggggatcatctcaacatctgatga

SEQ ID NO: 30648 - DNA, 2190 bp, Zea Mays
tgacggcgaggaacggctccgtgggcgcctccgatgacgacgctctccaggatgctgccgcggttgcgctcctccgccacgcgcgccctccgcaaggtgttcggactggaacccgcggcgccgccgcgacggctccccgcccctgaagccttcgtcgcgtctgagagatcactcctgcgccctcttcctggcctggacctcccgccgtgcctccccgacaacctgagccgcagccccacccgggtcaccacgctccccaacggcctccgcgtcgccaccgaggacatcccgggtccttctgcgtgcatcggtttcttcgtcaactccggctccgtctacgagtccggggagaccaccggcgtgtcatacctgctggagaggatgggcttcaaggacaccaagcaccggagccacctcagcatcgtgagcgagctcgagcttgccggggccagcgtcagcgtctccgcctcccgggagcagatggtctacagctacgacacactcaagggatacatgcccgaggctctcgagatcctcatcgactgcatgcgcaacccgctcttcctccaggaagaagtccaacggcagctggtccttgctcgagaaggattccaggagctgcagaggagccctgaaagatttctccatgaacagcttaacattgttggattttcgggtgctcttgcgaatccactaatagctcctgagcatgtccttgctagaattaatgacaggattattcaaaagttctatcatgaaaattttactgctgatcgtgtggttctagcagcagcaggtgttgatcacgaacacatgctaggctatgcagattttttgttgaaagattggcacaggggggccccaatggaaaagccaaagtctacatatgttggtggatattccaaacacagagcttattcagatatgacagatgttgcattagcttttgaagtgccagggggctggtttcaagagagagacgccgcgattatgactgtcatacagactttaatgggtggtggtggttcattttccactggtggtcctggaaaagggatgcattcacggctttgtaaggcttgaactcttgatgattgttcaactctttggattgctatagaaaatgtactcgtaaaatctcaaaactgtgatgcacttcagaattatgtcacgtgctgcattatctatatttttgtttctttgtttgtttttctgtattagagacatagtttttttggtgggtgaaatatttctgatgaaggctatgctcaattcttgttcctttgtagctctacgtgtcctaaataaatatcactttgtcgagtccctttctgcatttagtaatgtatatgacaacactggcctctttggtatctacttgaccacgtcaccatatcatgtggcaaaggctgttgatatcgcaataagtgaattaattgctgttgcaactcccggagaagtgacagaggttgaactgcgacgagcaaaaaactcaacgatttcatctgtattaatgaacctcgaatctagggtagttgttgcagaagatattggaagacagatgttatcttacggtagcaggaagcctatggacaacttccttcaacgtatggaaggaattactctagatgatgtcgcaacatttgccaggaagatgctagcttcacgacccacaatggttagctggggagatgttgacaaagttcctccatatgaatctatttgcaagcggctacgataagtacccctacacaatgacctctggttgactttgaaggatccttccgttgaaaactaaacaatcgcttgtatgaagtgccctagctcaggaactgcttttctttggggcattcaatttagtgagcttaggatttcagcagctacgttcagttgtaactgttccatagtagattaggaagactggcgatcatttttatgtccattttctgcgactatggatagcaggagtattctgctggcctgaattcccggtgtaaacggcttctgaaattttgaatcattgataaactaatagtgtttggtttgaggaaatttttatttgtttcatatagaatggaaattgtaaaccatgacactgattagtcaaatgttccaagtgcaaatgacccaaaacactgttgggcagaagccgatggtgattgctatatactcgtttggctttatatatac

SEQ ID NO: 30649 - DNA, 325 bp, Zea Mays
cgaggtcatatggctggactcgagcccgtgctccttgcccgcacatgagacagagtgggagtggaggacgagtcgattgccccatcggcaatccagtaccacccatgtctcttgcctcctccgaccctcatgagcacatcgaggtcgatttgctcggtgctaggatcatattctgtgccatggacctcctgcgccatggcggtgtagtcatgaaggcaggggttgctgtaggtctcgggcccgtcatccgggttgtaggtgacgtcggacgtcaccttgcccttatgggccatagcataggccgagaagatggagcaagcccgac

SEQ ID NO: 30650 - DNA, 3938 bp, Zea Mays
aaggggaaggggggcggtggacatggtgactgacagaggcctgtgctgtgtggatcgagtttattataaactggggggccacggcgatctagatctatccgctgccctgccatgccatccctcctcgaccaagaaaaacaaagcgaaatgcgcttggaaatgctccgacccagcagaccttgcttccttccaggaaccactccggaggaaaccggaattcgcgcgcggggtccctcgtcccctccacggggcccggccatccatgccgtcccgagaaagcacaaggaacagtgaagaaagcatcagggtcagggttatagatagatagcgatgcgcgcagcgcgaggtgcgcactcagagctgctccgctccctaccccctactccccttgtagagtagagtagcgtagcgtagcttgcccgacgccgcgacctccgggggcttggctttgggaaatggaccagccgctcactgcccccagtcagtggccgcgcgccgcaccaagtgagctagctactctctaggcggagtgaagcgaagctagcttagctgcctcgagcttgagctgagcttgctcactcttctcccctcttcttctagtaccggcacacacaccgcagctgcgaaaaaggaagctctctctctctggtggtgccggtgcgccgtgcttgcttgcttgcttgcggctgcatccatggacgcctacgaagccaccaaggtggtgttctcgcggatccaggcgctggacccggaccacgccgccaagatcatgggcttcctgctcatccaggaccacggcgagaaggagatgatacgcctcgccttcggccccgaggcgctgctgcacaccgtcatggccaaggcgcgcaaggacctgggcctgctcccgtcgccaggcccggggacgcccacatccgtcaccgccgccgcaacgcactcgccgttcctcctctcgcgccagaactccgggcgctgcggcgccggcaccgcgccgtcgccgctctcggtgtcgtcgccctcgtcgtgggcgccgccgccccacttctccaggaccaacagcgtcgtcagcaatggcgcgccggcggaggccttggccgccgacctcatgagcccggccgccgccgggaacgcgccgccgtcgcccttctttgccgccggggaaccgctcctcgacgagctccagctgcaggagcagctcgcgttcctcagcgacgccgccgccggcggccaccagctgcccctgttcgacgccagcgagtgccggagccccggctcaggagacgccgccgggttcttcccgtacggcgccctcgggtgggccaacggcggcccggggcaccgccggagctcgtcggtcagcgagctctgcctcggcggggccgacgggctcggctggaagccctgcctgtactacgcccgcgggtactgcaagaacggcagcgcttgccggttcgtgcacggcggcctcaccgacgacgccaccgctaagatggacaccgccaccttggagcagcagtgccaggacatcctgctccgctccaagtcccagcgccttgccgccttcccctactccccgaccggctcggtcccgggctccccgtccgcggccaccaagtgcctgagcttgctcttgcaccagcagcagcagcagaacgagaaccagagggtggcagctgcagcggccgccgcggcgctgatgctgggcggcgacgacgcgcacaagttcattgggcggccgcggctggaccgcgccgacttggcgagcttggtgaacccgggctcgcgccagatttacctcaccttcccggcagacagcaccttccgcgaggaggacgtgtccaactacttcagcatctacggccccgtccacgacgtgcgcatcccgtaccagcagaagcgcatgttcgggttcgtcaccttcgtgtacccggagacggtgaagctgatcctggccaagggcaacccgcacttcatctgcgacgcgcgcgtgctcgtgaagccctacaaggagaagggcaaggtccccgacaagtacagcagctgcaaggcgagagggcggtggatttcttctccaacgggttagacggcagagaaaaccacttggatctgcaccagctgggtgcgaggatgctccagcactcgcacagcgcgaacgagatgctgctgaggaggaagctggaggagcagcagcaggccgctgctgccgagctgcagcaggccatggagctccagagccgccgcctgatgaggctgcagctgctggacctgaagccgcgcgcgtcgccgagccccatcggcagcatgcccctgggccccacccaaagggccgtcgactcgccgcccgattccggcagggaggagtcgtccgccggcgacgcgagcccgaacgcggacagcgaccaaaggtggaattagcggctaagcatgcgtcgttatcgccatcatttgttgcgtccgtgtcgcgttttgctgtcgtccagcagcgcagcgaagcaacatctcaccaactgattctccatggggggactccatgcagcgccgagcacaacctgccggacagcccgttcgcgtcgccgacgaggtccgcggccttggctcgcgaccctttcgcggccatcgaccgggagatggctgcctcgcccggtcgtcgaaacggcgccggttccttcgctggcatcagcagcagcagcggcgtcctcgccggccatctgaggccgtcggctctggacatcccttcgccgttcttccccatgtcgatgaccaggctgtcctccgatcacggcgccggcgcgatcgggatgtaaagttatatagtcctcgctgctacttgcctaatcatagaatacttaactagaagcaaaggaaagaagatatagtagtgggagtagtataggagaaacaaaacatcgcagcgtagttcctttttttttactttgtttgtttgtttgtttttttaccatgaaaccaaaggtcagcagatggcagcagcaagcaacagattatagcgcttgctctcctattacattacattacatgatgcatttagcactaattagtagtagttactattaccagcccatctaggtagctgctcctccatgaccatgatatgcacagcagtactaggggggaggaggggtgtgtgatgcacaagaagatgctgctgctacccacatgggactacactggatgcagacagacgtgacagaccagctggtccagcgtgaagatctcacaggattagaagaaacaaacgagtcccggtcccaccagtgtaggtgtcattgaaggaggaccggcccacagcctgctgctgctgctgtgcaaatcattgttggctgcgtcccttcagccctctagcactagcagtagcagcgccggatgcagctcactacaaacaaacaaaaaagttgtgttttttcctgttctttgaattttacttttgcctctgtcgaatgaaatctctactctagttgatacaaagaaatgaaagtggaagatatggaaataatttgctctggtgcttttctccgtggctggcactggcgtctggcatctggcaacgcaacgcgtggaaaaggcgatgcttttggcgatgatgctgctgctgctggctagtgcgatgcagcagccaccaccagcagtacttcagtcgacggagtagcagcaatatcaagagacaattagactaatctcttatgtacccatatatcatacacacaaaaaatatcttgtatatgttattcagtgacatacaagagatgagtataaatttcacaaacagcaatccgccgagccccagcgacgacatccactgtccacatctcaaacaccaatgttaagattggctatgcttcttgctccgggattatggagcatgattgacgcacacaggtatatttaaaacatgctagcccttgcagatgaaccagcgcggt

SEQ ID NO: 30651 - DNA, 1619 bp, Zea Mays
tctgattctaatctgtcttgtgttgcctgttttataccgagataactagttacagaatggctctcgagtgtgccagaaatgctttgctacaaaataccatggacaacaaagaaaatacagataagttcagagctgatctcatgaatattgctatgactactcttagttcaaaaatactttcccaagacaaggagtactttgctgaacttgcggttgatgctgtcttgaggcttaagcaccaacttggaatctattcaaattctgaagaaacctggaggatctctcaaggattcatttttggacgaaggattcattcttgacaagaaaattggcatcgggcagccaaagcggattgagaatgccaaaattttggttgcaaacactgctatggacacagataaagttaagatatatggagcacaggtccgggtggattcaatgtctaaggttgcagacattgaagctgctgagaagcagaaaatgagagagaaagtccaaaagatcatagctcacggaatcaactgtttcatcaacaggcagttaatctataacttccctgaggaactctttgctgacgctggcatacttgcaattgagcatgctgactttgagggcattgaacgtctggctcttgttactggtggtgagatcgcatcaacttttgataatccagattctgttaagcttggtcactgcaaggtaattgaagagatcatgattggggaggacaggttaattcatttctctggggtcgcgatggggcaggcttgcaccattgtcttaaggggggctagtgagcatgtgcttgatgaggcagagaggtccttgcatgatgccttgtgtgtgctgtcccagacagtaaatgatacccgtgtcttgtttggaggcggttggcctgagatgctgatggctaaagaagtggatgaacttgcaaggaagacccctgggaagagatctcatgctatcgatgctttctcccacgctctgcaagccatcccaacaatcatagctgacaatgctggtttggacagcgctgagttgatctctcagctccgagctgagcaccacaaagagaactgcactgctggaatcgatgtcatcactggcaccgttggggacatgcaaaggctggggattcaagagtcgttcaaggtgaagcaggccatactcctgtctgcgacggaggccgcggagatgatcctcagggtcgatgagatcataagctgtgccccacgcagaagagaggataggatgtgattagacacgctgtttctcggtgtagtggggatgcttgttaccctagttttgatggtggttctggggcgttcaagttggtcacatttcaagtgtttttggctcctaagaacctagtaattgttatttcgttgaaacaaccaaccgtaggcttttttttttctagattctcatgatgtaccatttggtagcgaagttcttcctctgttcttttttatgtgtcgagttttagtttaaaactagacaacaaatattcgataatggaggtagtacattgtttacgatatgcttgtgccatgtgcctctacatgttctcctattccttttgacgtaggaatgactagcttgtctttgtttatgtgacg

SEQ ID NO: 30652 - DNA, 1293 bp, Zea Mays
atgcacgctgcggatttcgccttcctcaagcaccctaagatgtgtgcgctgccgccccaaccccacttaccaccccaccgggcacgccatgacagggagccaccacagccggtggtggctgatgcagttccagtgcgcgctcatggctgcaccgcccatgtcgatccccatcaagaagttgtcctggaagaagagcacccgcatccgttggcctccaccgacgccaccacctcgcctgtgaaccagttctcgttgaggtcccagccaaagagcaagttgatgcactatcaaaggaattgtttgcgctttcaaccgtcacaggatctttcaaggcagtgtaaaacttgtggccttcgatttaaatgccaagaggagcatcgtgctcacatggactggcatgttacaaaaaataggaattcaaagaaccgtaagcaatcttcacgtaaatattttgtcacggtggaggaatggttaagagctgcagaaacagtaggaaacgatggagttcctgcttttgtgccctcagacccagtcccagatagaaaggaagagagagaaattgctgttcctgcggatgaggagcaaacagcctgtgcattatgtcaagagccatttgaagatttctacagtgatgagactgatgagtggatgtatagaggtgcggtctacatgaatgcaccagacggtaatattgatggtctggaaaggtcacggttgggacctattgtccatgctaaatgtcgatctgggcccagcaatacttagggtgggcatggctgggatgacttgatagcttttttttccgttgcggctgtaggcatgacctgtaaactactggagactcagaatttgggtttctgcagcacagttgttgtcaggacagcggtttatggagccatggtctcactggacatgggaaacaatatatttcaatagtcctgctttcttcctcgttaatatcttgtgcaggatacataccagttctctatgttggttggtagctttggaagggaccgtgcaagatgaccaagagtgctggccactatttatgcctaagtattgaaagggactagatactgtcattaccttattgccaatttttttagtattttcctttgtaagttgagagcattgtttgtgactattattcttggttgcttgtatagttccatcttgctgatatgtttatactccaaaatgtgggtcagaatgtcttatcagactttattctttattctggttggtatatgctccggcaaactattcaatggaacaatttgggaatattttttc

SEQ ID NO: 30653 - DNA, 164 bp, Zea Mays
aggtccgccacctcctcctcggtccgcagcaaaaatggcgtgggagatccgccagctcacctcctcccattaccgcgccagcgcctgatatggaaggtcccagatttcctctccccattcctttctcctaattggttataaaaagtcacttagtggccctgccg

SEQ ID NO: 30654 - DNA, 1921 bp, Zea Mays
acgtcgaccagtacgtcgaaaaggaacacgtcgcccccatttcccacccgctttctccccctttggcctccccccctctctctctctcatctcctgccgataagaagcttcgccgccgtctcctctttctccgtcctagcaaaatcctccccgtattgagagccaaagaagaaaaaaaaaaaaggcaggaggccggcgaactacgcgaggaaaaattttctttcccgggaggctcgggagtcggacacgccacacgctttggtcaaaatcgtttccggttgttagcgcggctgctgctgccgctgctgtcgggggcgagcaggaaggggagcgaacgagcttgggcagctcaagaagaggggacgggggagggagcctgtggaaggcacctgagtacgcgtgaaggagcccgcgcgagagtaggggggaaaccaaatcgagagacatggactcggagcactggatctcgcgcctggccgccgccaagcgttactacgcggcgcagctcggccgcgtcgacgatgtgcccgggatggggacggaagaggtggagatggaggtggaggacgacggggacatggagatggagttggagatggcgctggagctcggggacgcgacgtggccggaggtcgcctgcccctactgctacgaggaccatgacgtcgcatccctctgcatccacctcgaggaggaccacccctacgagccccacgccgcggtgagtcagtcagctcgcttcttccttcaggactcttccaggtagtgaatttgagcctgagacgtgatgtgcacagctacagctcttgcttcttcctccgattggagctggaggaaacgttgtagcttactgcttaaggggttgacctgatgaatacagctcatgagctctcgtttttgcggtatagtaaccttgtcggaggattttgactacccgtgtgctgtctagttgccatatgcaattttaggggagccaaggttaagtaaatagctgaactaaaggttatggcttcgtagcttcacgcgaagagcagcagtttggattagaaattgtggcttagtgacaaataggatttcagaggaaataatgtagcttctagcttagtccgagttcaagtttattgagtgcttcagactgttggtttaatgacaacacaatttctctgagctcaaccaagacctgtcggctgtagctggctgtcctcatcaccatgctctggcgcctttgggattgggcaaaatggcgcaatctttttgtgccgagtatccctcactccgtcgtgttattaaatcaacgtgtgatgattttgtcatctggaccaaacgattctctcctgagcctcttaattttgatttgtgctgttggtatatttaccttcaaacttataaatctatgatcccccatgtgccggtgtaaacctgtgtacccttcgcttctgcaatcaaattctaggtggggatccccacacccactcaaaaaaacctctaagaaactttgttgtcacatgagtgcttgagaaaggttttggatggttcgcattgtttgacggtagatgaaaaggtgtcgagacactagaaaacttatgggagaagtttctctgtttaaatgtgtgacctgattccattagtttgagaggcaatagttgggataatggattcaatcattacatatttacatctggctcggtatgtaatactaatcttaaaaagtcaccttcttgtagcaaagatagtgccaccttagtttaagtcatactaggtggtccaaaatagccccttctgtatcagaccgcctctatggaaggtcattcaaaatgagcacctcatactggttttgtttacgctgtactgtaaagactgctagcagatgtagacactagacatgtagtgttctcattttcatttttttctctcatttcag

SEQ ID NO: 30655 - DNA, 2560 bp, Zea Mays
ccttccggtcccccaccacgcgccggacatgaaatatcccactcaaaccaacctaccgcccacagacccaaatcggcaccccggaagcctcaaatccgctctattcctctctccccctctctcccccatcgcaccagcaggcgagcgcgaggcggaggagtagagatggagtcggaccagggcaagcttttcatcggcggcatctcctgggaaacgacggaggagaagctgagcgagcacttctccgcctacggcgaggtaacgcaggccgccgtcatgcgcgacaagatcaccggccgcccccgcggcttcgggttcgtcgtcttcgcggatcccgccgccgtcgacagagcgctgcaggacccccacaccctcgacggccgcacggtcgatgtgaagcgggcactctcgcgggaggagcagcaggcctccaaggccgcgaaccctagcggtggaaggaactccggtggcggaggaggcggcggtggcggcagcgatgcaagtggtgctcggacgaagaagatctttgtgggcgggctgccctctactctgactgaggatgggttccggcagtacttcgagacctttggcatagttactgacgtagttgtcatgtatgaccagaacacacagcgcccacgtggtttcgggttcatcacctttgattcggaggacgcggttgaccgcgtgctgcagaagaccttccatgatcttggtgggaagctggttgaggtgaagcgcgcattgccccgtgaggcgaatcctggcggctctggtggtggtcgttctgggggaggtgggggttatcagagcaacaatggccataacaccagctctggtagctatgatggtagaagtgatggtggcaggtacgggcagacacaacagggtagtggtggtggtggctatcctggctacggtgcaggaggctatggtgctggggcagctggatatggatatggtgctaaccctgcagttggatatggaaattatggggctggagggtatgggggtgttcctgctgcttatggtggacattatggaaacccaggtgcagctggttctggttaccaaggtggacatccaggctcaaatagaggaccttggggcagtcaagctccatctgcatatggaactggagggtatggtggcagtgctgggtatagtgcttggaacaactcttctggtggcggcaatgctctgaatagtcaagcccctggtggacctgcaggctatggaagccagggctatgggtatggtggatatggaggggatccatcatacgctagtcacggaggatatggggcttatggagcacgtattgatagtgctggcaatcctgctactggtggatcatctggatacaatgcaggctatggaagtggtggtgccaactctggctattcaagtgcttggagtgatccttcgcaaggtggtggatttggcggttcggtcaatggaggtgctgaaggacagtcaacttatggcactggctatggcagtgtgcagcccagggttgctcagtaaagagaggcattttgagtgtgcgaaatgaaccagtgcatctgggcagtctatgtattgatttgtcattccagtctctctggttgctctcagcattttgaagattgcccatttgctgcttaaatcagtatttatccgggttggaatgcttgatcctttagcggcttactactagaacgtctagtcaataagtagctaaaatgtggagtagcagtatcttgcggaatgcttttattaatttttacatttagctttatccatctgtgtggtttgccatgagtggagtttcaggttgcttcatctctagttataagctagagtagcttgactacttatgggcaaaattatctagttgtacctctattctacagatcatatatttgtgtttgacattagtatttatgctggatcttgctctacctatattctggaatgttctctatttggtggctgtattgacatgtggtattatcaacattgatgggtttgaaacagatgcaaaccctgaaatatgcaatcatagttacttgatgctgtagctgcttctaacagtattttcaactgtagtgcaagtgtttttatgtagctggaatggtacacccttcaagtatatcaccaagctatgaattccatccatttggtcctagatttcaatattttcaaagcagcagtaagcttattagcagcaagattgtagcgccaagtttctgagtgatttacatgaactggcgagaagttccaatatcggggttctgacagaatgcaagataccagcttaagtgcttcattttctgaagggtcttgtgctgtgctacaagatagtgggtatgtggatcaaagattctatattcacgttttgtttagcaaaatccttttgactctggtacttgtcaaagtgaaattctagacaactcttagtttgttcatttagatttactgtgtaccatatccatcggtgacaggaaaattgaccacaaacgtgtcagtttttacttttgagcaataatattgtgctagacatttatattgaccacac

SEQ ID NO: 30656 - DNA, 5968 bp, Zea Mays
cctcccctgagtcccctcccctcccatctctatccacgacaaccgacgccccactccccgatccaaaccacctcaaacccccgccccgcccagatccagatccacgcggcgcggcgcgaccgcggctaccggatcccgccgcggaataatggcctccgcggttgcggcgccgccgccaaccccgccggagtccgacccgcgcctcgtcgagatcttctcccccttcctcgagaagctcataaaaaatgcctcgtggcgcaacaaggcgcactccaagctctcgcacaccgccaagtccatcctcgaccgcctccagaagcccccgccgccgcccgcagccgaggcgcaggcgccgtccacgccgacctcctccccctcgacgccgacctcctcttccgcacagcctggtccgttgcgcagcctgtcgctcgcggactcggagctgctcctcgcccctgtgatctcggcactcggctcgggcagcgccaagctcgccgaggccgcgctggagctccttcacaggctgatcgcacactcctacatccatggcgaggccgacccatctgctgatccctcagcacagctcgtcgcctcactcctggacgccgcctgcaatgcgcttggccttgatgacgagcacattgagctcctcctcctcaagacactcctctcggcggtcacctctacgtctgtacgcctccacggcgattgccttctacgtgccgtgcgcgcatgttatgatatgtacctcgggagccgtagtgccgtcaatcaagccactgccaaggcttcgcttgtgcagatgctggtgattgtgttccgccgaatggaagctgactcctcgaccgtgcctgtacaacccatagtcgtggctgatgtgattgagctacctgatgcaatttcgggctcctcgcccactgctgaccccaacgttgtacagggattcatttcgaagatcattggtgacttcgatggtgcactcacacctctggctcggacaacttcatcagcaggggcaggacccaccgttgcccatgatggtgcatttgagacaacggcagcggcagaggaaggggcaaacccagcggatttgcttgattcaacagataaggacatgcttgatgccaagtactgggagatcagcatgtacaaaacagctattgagggtcgtaaagatgagcttggtgtcgagggggcagtggttggcaccttggacgatgatgctgatgtgagaattgggaacaagttacggagggatgctttcttagttttccgggctttgtgtaagctttccatgaagacaccacccaaggatgcaccagcagatcccatagtaatgcggggaaagatccttgctcttgagcttctcaagatcttgcttgaaaatgctggggctgtgttccggaccagtgagaggtttctcggtgctatcaagcagtatctatgcctgtcacttttaaagaactgtgcctcatcccatatgattgtttttcagctatcttgttctatttttattagcttagtggcaagattcagaccaggattgaaggcagagattggtgtattctttcccatgatcatcttgagagtgttggaaaatattgctcaaccaaattatcaggcaaagatgattgttcttcgttttttggaaaagctctgtggtgattctcaaatcctagttgatattttccttaattatgattgtgatgtccactcatcaaacatatttgagaggatggtaaatggtctactaaagacagctcaaggacctcctgctggtgtccctaccacattggtaccacctcaggacaccacaatgaaaagtgaagcaatgaaatgcttagttgctattctgaggtccatgggagattggatgaataagcagctacgaattccagatcctgcttctcctaatgtagaatcagagaagaacgacaatgatgatggcaatgagcttccgcaggcagataacaatggagatgagtctagtgaagcatctgattcacattctgagttatcgaatggaatttcagaggcagcatcattggaacaacgtcgagcttacaagatagagcttcaggagggtatctatttgtttaatcggaagccgaagaaggggattgagttccttgttaatgcaagcaaggtgggggagacaccagaggagatagctgcgttcctaaaaagtgcttctggcttgaacaagactatgattggtgattatttaggtgaaagggaagatttatcgctgaaagtcatgcatgcatatgtggactcatttgattttcaaagactggagtttgatgaagcaattagagctttcctccaaggcttcaggttgcctggagaagctcagaagattgatcggattatggaaaagtttgcagagcgttactgcaaatgtaatccaaaggccttttccagtgcagatacagcttatgttctggcttattcagtcataatgcttaacactgatgcacataacccaatggtcaaaaataagatgtcaccagaagatttcattagaaacaatcgtggtatcgatgatgggaaggacctacctgaagaatttatgagatcattgtatgaaaggatttggaaaaaggagattaagatgaaagaagatgaatttgttccacagcagcaacaatcaacaagttctaacaaaattcttgggttggataacattcttaacattgttgtacgcaagcgaggttcatctatggagacaagtgatgacctcattaagcatatgcaggagcaatttaaagaaaaggcccgcatgtctgagtctgtattttatccagccacagatgtagttgttttgaagttcatggttgaggtttgctgggctcctatgcttgcagcattcagtgttccacttgaccagagtgatgatgaaattgttgtatcccagtgccttgaaggatttcgctctgcaatccatgttactgcagccatgtcaatgaagactcaaagagatgcatttatcacttcacttgccaagtttacatcacttcactctgctgctgatattaagcagaaaaatgttgaagccattaagatgaagatggaaattacttgcaagaagcatgggagcatatattgacatgtgtttctcgttttgaaaatctacatcttgttggagagggagcacctccagatgccactttctttgcgctgcagcagccggaccttgataaatcaaaacaggctaagtcatcgattcttcctgttctgaaaaagaaggctcctaatgctacttcagcttctaaaagaggctcttatgatagcgctggtgtcggtggcaaagcttctggtgtggatcaaatgaataatgaggtgacaagcctcttggagcaagttgggatggctgaaatgaaccgtgtatttgtaagaagtcaaaaactcaacagcgagggtataattgattttgtgaaggctctctgtaaggtttcaatggaggaattacgttcggcttctgatccacgagtttttagtctgacaaagatagtcgagatagcgcattacaatatgaaccgcatcagacttgtttggtcaagtatatggcatgtcttgtctgatttttttgtcaccattggctgctcagaaaatctttcaatcgcaatatttgctatggactccttgcggcagttatctatgaagttcctggagcgtgaggagctcacaaactacaatttccaaaatgaatttatgaagccttttgttgttgtaatgaggaagagccgagctgttgagatcagagaacttatcattaggtgtgtctctcaaatggtattggcccgtgttagtcatgtgaagtcagggtggaagagtatgtttatggtctttgcgacagcgtcatatgatgatcacaaaaatattgtactattggcctttgaaattatagaaaagattttgcgggaatactttccatacattactgagactgagacaacgactttcaacgattgtgtgaattgtcttatcgcgtttactaacagcaggtttaacaaggatataagtcttaatgcaattggatttcttcgattctgcgcagcaaagttggccgaaggtgatattggatcctcaaggttgaaggacaatccttcaaacagtaatccaccctcgcctcatttgactaatgatggaaagcaggaatgcacagttcttgttgacaaggaagaccatatacacttttggtttcctttactagcgggactgtctgaacttacctttgacttaagaccagaaatcaggaaaagtgctttgcaagtgttatttgatacattaagaaaccatggccatcttttctctctgcctttatgggagaaggtgtttgattcagtgcttttccccatatttgattatgtacgtcatgctattgatccatctggtaatcctccacaaggacaaagcgtggaaaatgatcctgcagaacttgatcaagatgcttggttatacgagacatgcactttggcacttcagttggttgtagatctctttgttaagttctatgatacagtcaatcctcttctaaagaaggttctgctgctcttgacaagtttcataaagcgtccccatcagagtcttgctggtataggtattgctgcatttgttcgtttgatgagcagtgctggatctatgttcgtggatgaaaaatggctagaggttgtattgtcattgaaagaagctgccactgagacacttcctgatttcacttatgtttcatctggagcctacctggaaaatgtgccaacagaaaatggagtctctgctgacaatagagaggacgaatctgaaccagtagcggatgacaatgaagaatcctctagatcaaggaatctatactttacaattggtgatgccaaatgtcgagctgctgtacaactcctgttgattcaggctgtgatggaggtatataacatgtacagaggacagttatcagcacagaacacagtaatcctcttcgaagccttgcatactgttgccgcacatgctcacaaaataaacagtgatagtgatttgcgttccaagttgcaagagttgggctcgatgacacagatgcaggacccgccattgttacgccttgagaatgagtcgtaccagctgtgcctcagtatccttcagaacatatttctggacagctctcctgatcatggaagcacagaggtggtggagagtcaccttattggcttgtgcaaggaggtccttgaggtatacttgagcacagcaagaccttctcagccttccagtggcacacagccgctaggccattggcttatccctgttggttcatcgaagcgaagggaacttgcggcaagagcacctcttgttgtctcaaccctgcaagctatcagcggactaggtgactcagctttcgagaagaaccttcgccagttctttcctcttctcgctgggctcataagctgcgagcatggttctagtgaagtacaggtggccctgagtgatatgttcagcacttgggttggcccactcgttctccagtcttgctgatgctgaacatcatgttatacatagtagtatacatcccatcgtgttcctcctttcctccattatgttatgttaatcttttagtcgctgggagttcatattgttgtgctgaactgatcatgcagatcaatttttccttgacgttattttcttgttcgtatcgggaggagtgtatgtcactatagagaactgaattatgtacggtagtttagctaaaattgtgcccattctgttcctaatgtgctgatttctagatttttaggcatgttttgcatgcttttgctcagtagcgtttctcctttctggaattctggaatgtggtagggttggattataattcttgcgagttgggtgtgttaggctatcttcttttatcttaccttctattttaaactctattatgtaattagtgcaatttatagtataaaacattgttttgcacgtccatttacac

SEQ ID NO: 30657 - DNA, 1318 bp, Zea Mays
gaccagcccgccgcgacgcgctcgcagcggcggcccgcggcttgccctgtgcggtagcatgcgtggccagcctgcgcggcagcctgcccggagcgcaactcggtgcggccttccgtggccctgcgcgccctagcgcagtgcctttgcccaggcgtgctcccctgccggtgtagccagcggcccccacccagtgcgacgtgcgcgtgtgcccgcccgtcgcaccttttcccgtcgggctcgtcctgccggagcatcgccatccccgtcgagcttgtcgtcgcgcttgcctcgtcatcgccgcgcactcgccgtctggagctcgccatcgccgttggctgaatacccgtcctcgttgtgcgacgtcccgagaatgcgatctgttttcgagcttcgaggaatgacgatcaagctttgacgaccaagtgaacgaactctttgagttctacgagatcgaagaccctgagcatctgtttggtgaaggcaagtgtcctctgacccattatatcccatttactttataattcactgtcccgcatactatgaacaacataaggattgactagctttctatttaccttgtccttgattaccttttgggttactatggttagcttcatgctagcgctttactttaatcaatgaacatgatgagatacaatgatgatattatggtttttttctggatatgatgatatacttgtgtcatttaaggggactcgagcggtttctcgagtgcctctccgtaaggacctgttcgttggatgaccgcccaggaaaacagtgcaaccatgagggtggaatgggacgcccttagctgaataattagaggaactggggtgtagttcgcttcgctgtcgtgcctgttgggggccttcgtcttccgaaggtcctcaaaaacatgattaacaatgtttcccaagcataatatatgtataggaaccttcggactcaggatgaagttgtacacaatatggaaagcaggatcggaacgaaggttgaaccagcgccgaagctacgcgcaaggatgcttcggctcagtagcagaaagaggaaccaacttaagaaggaaaaggctatctagtcctcgatagattgttattaagttaatagtgtcaatagtgaatatgaagggcatgaatgtaattttgcgcatgctgcgtcctgtgcctataaatagatgaacagtacccccatactgttcacgctgacttgtactcgctagtgcgtcacgcttgtatctttgccttctgtcaagccgaaggtacaaatgtaactcaatgtttttcttattcattcatgattatataataaaagatat

SEQ ID NO: 30658 - DNA, 5312 bp, Zea Mays
ttattccataagttccaagagtctgtatggggaaggcaagaaagaaaatacaaaaggaaaaaaaaaaatagtcgtcttcttcctcgtgaaggacggtctaggtgagattgtcctcttgtcgagatcctcacgtcccggtcctcaccaccggtggcgacggggtgtgacagttggtaccagagacggtgtatcctcggcgtggggggcgacggacggccaccagctcttctctgcgctagctatcggggtggcgacgacgattgttggcgcgtcgacggcggatccagcggtccggcgtggtgacctcattgatccggcgcgacctacctccttcagctaacggtggcgctccagcggcccttggctcgagttccgttttgttccgcgatggcttccctttcccccggcaactccttcatcgaggcggtgtcgacggcggtggttgcggcggatttggcggtgctgggctgacgggaggtctcgatttggcggtgctggtggcggcgactccatcaagttgcctgtgtgctccctcaactttcttcctcagatccccttcggcaggcggcgtgcccacgacgccactgtttgggatatctggtgacgagtgctctcagtcacggcactggtgacgggttccctttctctgagactccaaccactggcggcaacacgggatttggtgcgtgtgtgcggcagctacgggagattgtggagctcgagtggctctgcatcccgctcgtagcgctcagatcgtgattggctgctttcatcctctacaatcactagttgagcagattttgggtgagcgcggtgttaatttgttgatgctaaggcaagccagtaacctggcacacaacatgttcgatgatatgtcatttacagaggtggtctgggatgatgaaggggcactattcgatgaaatgcattgcacggatgtcatctgggatgaggagacacatcatggctttgactcacatggcctattgcagcaccatgctgaagcaatggataaccagatgcagggcaaggagaaattggctcaaagtggagattactatgatgagaggaaagtcaatattgaaccagacatcaacaacttgctcattcatgtcaatgaccatttctctatgttggtgattggtgcggattctaggcgaagtgatgttgtgtgggacgaggacatgttatctgacctcgatactcatggtggcttattacagttactggcatgttgtaaagatgatgagctcaaccaggacagagacactccttttctcttgggccttggtatggatcaggtggatgagatgctggccagcccgtccagccttggcatgaatgaggacttgccatctgtacctgagacacatggctcgttattgcagcaagtggcatgggacaggaagcactttgcttatgaaatgtgcacgcttattgctgagatggtcctggaagatgttctcaccgatgttggcaacctcgctttcagcattgattcaagcatgcagatcagtgatcaaccttccaaatatgcgctagtcatcgatgcttatctgctgaagacgcagtacaaaaaaccatacatttctataagccaatgggatccaggaatttggtgcaaaggtactatggcccatgagcagcaacagcttgagatatataggatgtttgagaaacaatgggattcagttatccttaaatggttcaggaatccttttgtgctgctgcaatcatgcaatggggaggatctgaatgaacaaggcacagtgcctgtaaatgacattttcgatgtattggctgctggccaggagttgaattttggcaacgtcaccttgatcatttatgggggatgccaaggagcaatgggtctgcaggttctttttgcagaattacacccttggcaccacaatgtctttacctccatagaattagcaatacagtcatggagaatcaatggtttcagtccaggaagctgcaagctcaacagacaatctatacttgttgctactaacttgcagttcaattataaagcttccaagtttgtatcctttactgatacttatcagatatacaagaacacatgcatttgtatcggagaattggaacctgctagttggagagatacttgttggctacctgagatctcacatgccaatgtgtccacacttgctagtgaggaaatagataacatgcttttccaggttggtgattttcatccaggagagagtgagcagcttgagctttacatgataacattgatacagtgggatctaggtccagtagaattttacaaatcaaactgtaggtgccctgctgcagaactgatagggtggtgctgattctagtttgttcatacaatctgtttatgttatgctgaaagctagtttcttctttatcatgaggtactacttggcccaacagtcatggaatttctgggatctttagtcaccaagatacaattcatggtcatgcggttgtttggggacaagcaaccatttgtgggggtggaaaggatatatggcaacacaggttaaagtcgtgttttaaaatggaaatgcatgctacagtcctgggtgtcaatgatgtattgcagcatatcagtgcttgttctctattcctgcagcttggtcgcagaaaactatatagggtggtgatgacttctgttctaaggcccagagatttgctgctgaagagctatacaacattcttgaccaagtcgatgaactattgttgcttcctgaccaaaagctcgggagaccatggtgtgacactgatctaatatgtgaaccgattctgtcttggagactcaatggtggcagcccaagcaaatgtttgttgcaactcaagacatacatagtcagacagtgggatccaggaatttctgggatctttagtcatcgagatacaattcaaggtcatgcggttgcttggggacaagcaacattttgtgagggtggaaatgtaacatccatgaatagcaacatgtccagggctttagctgacaagcgggccacccacccatgggacccaggtggaagaccagatgctgggtataagttccaagagtctgtatgggggaaggcaagaaagaaaatacaaaaaaatagtcgtcttcttcctcgtgaaggacggtctaggtgagattgtcctcttgtcgagatcctcacgtcccggtcctcaccacgggtggccacggggtgtgacatgatactaggagatgtaacggagcaaagaattctgagaggagccaaagatgaggataagggatactgaagatcctcgtcgagctggacaaggatctcaagtctgctctgtgcgatttggaagacgtcctggatgttattgaatatcgctgaatcgagaagaaagtcatcggtggtgacaaaaagttgatcagcactactatttgcatctgggcgctgcaagctattggcgattggatcacctactggaagcgtagctcgttcgggcaaaagctgttgcagtgcgcgcgcccagaaccagtatcagaagctcagggaccttggagagaagctgcagaagtgcgctcaggatctggatctgaagttttgggaccttgtagctaagctacagcagtgcgcccagaacctgaatcacatgttctgggactttcaagctaagttcttgcagtgcacccaaagcctgccactgtatatccatcagggagcagctgggcaaccaccaatgcggcaatgcctgattcacccgccgcaagatccactgcagaattcagggatgacattgaacaaggaccatcgacgcctgatgatgcaccctcgaatccaccgtcgcctaatgccctcccgaatgctgctggctccaccactggcaatcaacacggatcagctgaggaggcaccgacgcctgatgcaccctcgaattccctggtgcagatgatctgcgactgattggtctatgggtttacagcactccgttctttttatttggctgcgcgtcatcttcgggactggtcatatgaaccgattggcatcaaagaatgatggtggtactgcaacagattgggaccttcctactaatgagataatcagcttgaggaaaaggataaagaacatagaatatattgtcagtgagacaaataaatcacctctgtcgaaacatagtagcagcagcacaaagaatgaaattgatgacaaggaaagcagcagcaccaagaacagcggcaatgtaaggagcaccaaacagaaggaaattgactacgtatacagaagcattgaaaagaaagttaaagttttcggtcgagacaaggtccatgaagatataaggtgcttcataatggaccggctaccgatgcaccaagctccgactccagtaaaccttattctgtgattggcatatatggaattacaggttctgggaagactactctggcacaatatgtttgtgagtatgagaagggtgaggtttcaatcctatcatgttcatccatgtgggaactacattcagtgccggtgaaatattttgtgatatgctggaccagatcacgcaacagcggccctctgatgccaacggtcctaaaagcctaaaaacagagttaaaagatctaacactacagcaaacgccaaaatatacagctactcttgttgactgtccaaattcaaaatacacagcttataagcaaggctgtatatgtttgctactaactcatacctataggcagctaagaccggtgttatgccaagtgacattgaagtgtacatagctgaccataagggaccagacccttccaaacctgaggagttgtgcagtcaggcttgcacagatcggctgaatatggtcaagaaatggtgaggcgccatgaaaaggactacgaccggagaaaagcaccaatcgatcccatggtggtgtatgctactggaggcagaaagagtcatgggcggtactccatgtttaatggagtgattgactccagagaggttagatctcagaggtcggggtcttcctccgaacgatcaggggctagaactcatcgccaatcagagcatgagttggaggttgcaagggtgcaagaggagataaggcaacgtgatgcattccaaaggcacaacatgagtactttgcctcattcttggcgcagcagcagaccgtgcttcaagggataaacgtagtccttccacaatttcaacctccaccactgccaccaatatggggatcgggtacccaataccttctgcaagtcaatcaatggattctagcaaaacctgcttcaactagcaaaacatagtaaatgtaagttaaacccgatcacttcaacctaaatttgcttactt

SEQ ID NO: 30659 - DNA, 3261 bp, Zea Mays
gccgccgcccggcttccagtctcgccgattcgaggagacgacgaccatgccaaccacagcgccaccggtggatgcagaacctcccgagtgcccggtgtgcctctccccattcgacgcggcctccgttgtgccgcgcgtcctcccgtgcggccactccctctgcgggtcttgcatcgcggccctcccgcccgcctccgcggccgcaggcgcctcctccctccgctgccctctctgctcccagtgcgtcccctacgcccgcgcgctcggcccctcctccctccccaaaaacctcgccctcctcactcttctcccctccccatcgcatgctctcagcgccgccaccctcgtcacagcgccgcttccccacccccatccgctccacgccgcccactcgcgcctcctttcgcgcttccgccatgccgtcctccccgagtccgcctccccgctcggttccgagccaagccccgtccacctcgcgttcggatccctcggctccgacctcggcgcgccctggttctgcgcgcggggccgccccgtgagcctcctcccgatcgagacccaaccagtccccccgacgaagcaggaagccgaattctaccggcccagccacgcgacgcgggtcctcgccgcggtcgacgcgctcagcgacgcgaccaaggaggagctggccggtctgatcgcctcttccgcgaggctagcacggatggtgagcaggctctacggtgtctggatgtcccctcacgcgccgccactatggatggtctctgaacggcacccacgtacggtttcccaattgttggaggaggagattatcaatagagaggagacggtggtgcgggccggattccttgtaatggaggcatgtgaagtgatcatggggttgcacagcgaggggctggtgctggggtgcctcgggctggactgcttctgcctcgatcgttttgggcactgcatgcttgatttgaatcaggcgttggccttgtgccggggagtccaagctggggctagctcgaacagtgttcgagctttcatcgctccagaggtggcggcagtgctaggtgacacgttgcggacggagggtcgtgattttgatggtttggttggctgtacctcggatatctggtcgttgggttgtgtgttcgtggcacttcttactagggatgaacagcttgtgcctgtggcaggttggaactctgaaggactgtatgatgattgggagaaggaagtggttacaaggcttgatgccacattgcttggtactatacttgaaccattggctgcagttatagcatcgtgcttgagatatgatccaaaatcccgtccagagattgctgatgtttggaaatgtattagaggcttgttgacaaaatttggtgatgttactttagctcctgatgatgatgttgcagctcagaagagttttagatgtttactccttggggagttatcctccatgtttgttgattctggtgctgttgagtcagatgataaaacacaactgtctcgaggagctgatggcaacagttcgaatcaggatcatggaagtaatgatggtttcttaaacaatagcggaaatgatttgtcaggaatcgatggtccacagtctgtcggagtgtttaaatcatcaacactgcttgcccaccgtgattgtgtaacaggattagctgttggagagggttttgtaatgctggctcaagaactgcctattttcattctttctttcactgcaggtgggttcttgtttagctcttcttatgataaaactatcaatgtgtggtcactgcaggacttctctcatgtgcattgtttgaagggtcatgaacacaaaatcacagcaatagttgttgttgacaatgatagccattctctttgtataagtggagacagtggcagcggaatttttgtctggcgtgtggattctactctgaaggaagaacctttgaataaatggtatgaacataacgattggctctatcgaggggttaactgcttggctgtctctggaactggttatctttacactggtagcagagacaaaactatcaaggcttggtcactagaggattattcacttcgctgcactatgacaggtcataaatcaactgtgtcttgccttgcagtggccagtggtattctttacagtggaagttgggatggtaccattcgtttatggtggctcactgatcatacaccattgtctgtcctggaagatgatgcagcaggaagcatagcccctgtattgtcgatttcagcaggaaccaattttgttgcctcgtcatatgagaatggctattttaaggtctggaagaacgatgtgcttgtcaaatcagaaaagcttcaaaatggtgctgtttatgcagttaaattgagtggcaaatggctctatactggtggatgggataaagtcataaacatccaggagttgttggatgatgagtcagaggtagaactccgagacgtcgcttccattacttgcgactcaattataacttcgatactgccctgggatgaaaggctgatagttggactatccaacagggaaataaagaagctgtcagaagccgaaacaaacagggcctaggtgtcgcaatggccctaggccaaaaacaaactctgttttcgtgggaactggtgccttgaagactctccgtttgaagcatcgatgtgtaagactctcttcaacggtggacgctagcgccccctcccctctctgtgacggctacaggcctccctctaccgctccctctaccgctacaacggtgccccctagcactgctacagtgctagcggctggtgggtgcgcaccctacatcaagggataccacaagggctccccttgtctcggtttgtgtgtacaaaagtatttattagttgggaaaaaattgataatagatggtgaataggtatggaaaatagtattttatgattatagtggagtataggggaagtatttagggggaaccgctgtacagggtggagatatagggggaagagaatactgacgtggcagtgggatatagggggagaaatttagggttaaccgctgaagacagtctaaagcctatgccagaggcgtctcctagaaggagagtaccaacatcttgctgcagccgcatactcgcatacaaattaccaaagtagttgtagcagtagcagactaggactctgtttatggtactggtaacttggttgtggtaattatttgagtatctgtgtgattaacaatatacaaaacatatatgcagctccagtcttttaccc

SEQ ID NO: 30660 - DNA, 1739 bp, Zea Mays
gttaccagcactcacgataattaacatactatccttcagtgctatgctcgagttaccctgtggacctaacagatcctgagtatgatcacaagtctatatttgggaggacacattctgttgtggcattcttgccaaatttaaaagctggtaaaaagaagagcttgctaggagattcaaaagagcctgaagaccaagcaccacataaggtactggctttcagggacataaacactcaagctccaacacacatcctcatcatccccaaagtcaaggatggactaactggtctgtcaaaggaaaggatgacattaaaccacaagaatacatcacaatggccaaagcacatccttaagcgtggattgtctattcaagatgaaggcactcgagctgctattgcaacacaactccaacaaaatactcttgtttatttcttcatctaggtctacgacggatccatcctgctggacaatcgctcaagcatcgtgtcagagatgttcgccacacccaacaacaactcgatgtgcgggtaccccgtagtcgatgccgtcaaggcggtgctggaggaggtttgcctaggcatcgtctcatacgttgacatactggagctgagaaagggacaaaacaaagaacgaacttcaaatcaaagctaaagaagcggatattcaaaatcttaaaaagccaccacgtggccgctcctcatcctggtgctcctcaactgcatcaagagggcatcttggggaagaagcatggtgccaccaagagcgttgtcgttcggatgtttcgcgttgttgaccagtgtgtagaggatctcaagctatcagacacagttaatgcttaatccttagagctgcatataaccaagtggtgcttacctggatttgaggacctatgatgcttgtttatctcaagagtaatgtaggccagcgagtgctcgggcagatagaagagagagagagagagagagaggagatgcagcggctcacggggcgggacatgtgggacgtggaggagtgccagagcccgcgcatgggcagcgtcatcctcggcgtcggcggcaccagcaacaccgtctgcgtctgcatccccgccgccatgcccttcaacgaccccctccccgtcctctcccgcaccgtcgccggctactccaaccacaactccgtcggagggacatatttccaagccatgtcaagctgttcgtggagaacgacgcggtggcggcgctggccagtggaaccatgggcaagctgcacggatgtgtgctgatcgcagggacagggaccatagcgtatgggttcaccagtgatggtagggaagctcgagcagcaggtgcagggccagttctgggtgactgggccagttaacgaagtggagcacctgaactagcagtcacgtctgcaatatacacaccagcaaaacactcctgtaacactaaacagttcatgcatatccttgactgaagacgatgttgcaaaggtttcagacatcagctttggcgttgacaagaaacaagatgacgagtacaatgctcctgatgagtacaacgcagtgtataaaattgctttgtactacaacgcagtgtataagtttgctttgtactgcttgagaccatctctggaaggcgttcatattttgacgatgatgtgctcctatattttcctttctgaataccaaattctttaatatgtcctcttgtgtggaatcaagttcctaatttagctagagcaatacttgaaaagagg

SEQ ID NO: 30661 - DNA, 1810 bp, Zea Mays
ggctggggacgggggcgtggagcggccagcgcgggcacgccgtcgaggcggcgcggcgttggctgcgctggtgcgccctatacgcgtcggcccgcctggtcctggtcccgttccggctctccgccgcccggcgcatatcctccctgaaggtcccgtggaagcgagaccccgccctcgacgctgccatcgcccgggaccgccgcttcctccaagcgtcccgcctcgtccgcgaggtgctcctctcgccgggtcgccgcctcctcttccgctacctcaccaagcgccgcgagcgcatcaagctccccgtccacgtccccactttcctcaagcgctaccccaccctcctcgccgtctccgctcccccggagcccgtcgcctcgccctccccgcacctcctcgctttcctcgacttcgcctcccgcctctacgagcttcatgcccctctcctcgcctccaggctcgccaagctcctcatgatctcctccacgcgtgctctgcccgtcaccaagatcgccgccgccaagcgctacttcggcctccccgacgacttcctggcctcgctggtcccgaggtaccctggcctcttccgcctcgtcggtgaccccgggcctgacgcgtccgggaacgcgttcctcgagctggttgcttgggacgatgagctggccaagtcggtgatcgaagctaaggctgacaaggaggccgatgtcgtcggaattaggccgaggccaaacttcactgtgaaattgcccaaggggttttacctcaagaaggaaatgagggaatgggtgagggattggcttgagttgccatatatctcgccgtacgcagatgcatccggtctgcatccggcatctccggaagctgagaagagatcgattggtgttttacatgaggtgttgtccctgacagtagagcggaggatggcggtaccaattatcgggaaattttgtgatgagtataggctgccaaatgcatttgctaatgcgttcacgaggcacccaggtatcttctatgtgtcacttaagggtggcatcaagacagcagtattgagggaagcatatgatgagaatggagagcttatcgatagagacccaatgcttgagctgaaggagagatttgtggcaatcatggaagaggggcataagcagtatctagaggacttgaagaggaagagagaggcactgcagaaagacagggaggatgcaggtcgccaggatgcaaaggcagagattgaggatcgggttgaggaggaatggcacagtgaggcttcagaaggagatgatgacacagatgatgcttataggcagtaggaggccatgggaatgcagtgttgttagtggctcttctgcttgtagttccatttgtccctggtcaagtgttgcctggagaactggcagagaaatttggttggtttgcctatgttctttctttaacctgctggctgttaatacaagatatattggaatttaacacactcttagggctagggatttgagtttccaaactggcacttaaggactgacatcgaacaatctgacttcgtgcggctcctgaccctggttggaagtgttcgcttcagctaaaacagctccagctgcggcctctctctgcagatcattgtagcagcagcagcgctgccaagggattagttgttgcatcctatgatgcaaccataatatgttcatgcagcaactcagttcagttgtactgtttgactcgagaaatgtaacaagctgtactgttaaaccaggtgatcctattggtgtctcggcgtcccaagttctgtgacactgaggccagagttcgttgt

SEQ ID NO: 30662 - DNA, 2019 bp, Zea Mays
ccagcccattgcccactaaggcatcattccgccaaagacccaaagtggcaaacgcccaaatcgacaaaccctaatgacctaatccccaacccccagccggcagccgccgagcaaaccagctcatccggtcggtcatccactcatcctcatcccctgcccatctgatccgatcggtcatctcatcctcatcccctacccgatcggatcccctgctcatccgccgagcaccaccaggcagcaggctccagtcatcgagcaccagcaggagcacggcgcgctgcccagtaggagcacggccaagaggatgacgcccgcatcctgcctcttctcctctgctactggagcctctactgctaggagcacggctaggaggacaacacccgcatccagcaggagcaccagcaggaggaggacgcccatgctgctgccgttgagcgatgatctgatgcgcccccatcatggctcttctcctccctcacggcctcgcctcgatctgctgctgccggtgatctgctgctgccggatccgagcgccgtgcccacgggtcacggccagcgatatgcagggatcaagaatccaactttgagaaaaattgctcgagatgtaaatggcgccgccggagtaccagcagtacctcgtgcaggtgaccaagtaccaggccgcacagaactgcaaggtcatggtgatttcacgtccgttaggctcgagaggtggactcaaacatgacatccaagttttgcaagttttgatgttggatgttaaatttctatgctcacccctcgtttggttattgatgtactatttccatctcatgtcacaaatttggcataaggaatgggtattggtggctactgactgtgtttgtttccacgtattatacatgtacaatggaacagttgataatagttttgcatgaactattggtgttggctatctaaaggacagaaaggcagacatgagcaacagatcccgctccatgggctgaaactgggattcgtgatggcagaaagtgctactgtcgctctcaattgtagcggtgtggtactgggatccttgccaataagggtgagcccgtccaagatgcccatgcgtccccgcgcccctcgccagctgatgtcgtactaggctaggggattgaagaagcacttgaagaggctcaatgcgcccaagcattggatgctcgacaagcttggcggagcttttgtaagtaaaaaatattttctagctttggtacctacaatcttctgtacttccccatttgtctaatgcttcaggttgttcttttttctgtagatctgtgtaccttatccttgctatactgtccatatatgctgtgtgcatgaaagtcttgcattgaaaatgtcatgtgctacaatcgttaggactattaatagatgttgctctgtctatctatccatttcatcgctggaaattcccatgccctttcatagtacgcctgtgaaatgctcgctgcttttctattggtttgtgtgcagttcatgctctgcaaggtgaggtctgttcagtttggccagaaaggtatcccctacctgaacacctacgatgatcgcaccatccgctaccccgacccgctcatcaaggccaacgacaccatcaagatcgatctagagaccaacaagatcatggacttcatcaagtttgacgtcggcaacgtggtcatggtgaccggcgggaggaacaccgggcgtgtaggagtgatcaagaacagggagaagcacaagggcagcttcgagaccatccacgtgctgcttggagctttttgctatgtctagttttttcctatttgttgtacaagaaaacataaaatggaattcaactttggtggccgcaaaagtttagagacttgatttcatataaagttaggctgaacattactgcaaacagttgtattttagtttagatttagagtacacttatgtatgtgttgtttgacaatgcttatttatgatatattgaatggtacttatttatattatattaattataatgttgttcaat

SEQ ID NO: 30663 - DNA, 1720 bp, Zea Mays
tctccatcttttaacctttccgttccatacatatctctctctatttctctgggacaaaggaacaaagagcgagcgagagagagagagagagcagctctcaaggtcatggtcttatggaggacaggaggagcatggtggtgctacctagcaagagctccccactataaagcgcccccacacaccataccacagctcagagcttcttctcatcatctggtagaaagaaagagtgagagtgagatcgatctcaccacgtgcctgcgtagcaagccactctgtatgcaccatcaccaccaggaccaggccatgggcgacgcgctgtgggacctgctcggggaggagatggcagcggcgggcggggagcacgggctgcccccggggtttcggttccaccccaccgacgaggagctggtcaccttctacctcgccgccaaggtgttcaacggcgcctgctgcggcatcgacatcgccgaggtggacctcaaccggtgcgagccgtgggagctccccgacgcggcgcgcatgggggagcgcgagtggtacttcttcagcctccgcgaccgcaagtaccccacgggcctccgtaccaaccgcgccaccggcgccggatactggaaggccaccgggaaggaccgcgaggtgctcaacgccgccaccggcgcgctcctcggcatgaagaagacgctcgtcttctacaagggccgggcgccgcgcggcgagaagaccaagtgggtcctgcacgagtaccgcctcgacggcgacttcgccgccgctcgccgcccctgcaaggaggaatgggtcatctgcaggatactgcacaaggcaggcgaccagtatagcaagctgatgatggtgaagagcccctactacctgcccatggcgatggacccttccagcttctgcttccaggaggacccaaccgggcatcccctcccgaaccctagcggctgcacccccttccaccacggccacccccaccatagcatgcagccgccgcctccattgccgccgagcaaccatgctggcaaggccgtcttcaccggagcagcagcagcctgctgcatgcaacaagagccggcagacggcagcaacagcgccgtgctgcccatgccgccgttccctcccttcacccccatcgtcgccggcaagccggcggccccggcgccgccgccccaggttgtcaacgccggtccacaggagccaccgccacctacctggctggaggcctacctgcagcacactggtgggatcctttatgagatgggtccaactgcagcgcccaggggcgcgtgatccggaccgtcggttccttagggttaccccctacgtacgtactgaaacactgatgatccatcgatttacctggtctgtaatgtgcggtgaagcttagtatttccaagtgacatatttcgacaagcacttgtagttattaaaaaagagttatcttgtattcggtggcatcattagtcgtcgttgttatgaaatcatgtgtgctcataacatgcatgaatgcatgcatttggatcatcgatcagagcagtcctgagcttgtacgtgctacgtactgtgctcatgcatccatccacatgcaaagtggtgcttgctaaaatgtactatccaaatgtctgtttgtttagcatgcatgcaatgatatatctatcggaacttgtttcctttctagtttactgtttgtttcggattaatgtcagatgttcggact

SEQ ID NO: 30664 - DNA, 4285 bp, Zea Mays
caaaagttcctccccgtcgctttctcaggtaaccgcgagctccgccgtgacaaatcctctcctcgttttccccacctcctcgtgctcccctccctcctgtctttgcggccggatccctgcccccaaaaccggattggggagggctcgctgcgttcaggcgagggcagcggcggcggcgtgccgtggttcctcagcgccgaggtggtcagaggtcgggacgtgcggtagattggtggtggcttcgtggcgctatcaatgctggtggatttgagcaggggcggtgggtgcgcggatagacgcctgagaaatccgggtgcccggggcagtgctgctccggaaatctgacctgccggcggagaagaattacactaacggccatgctgatggcccggtgaagcgcaaggtagccgcgatgccagcagcggcacctactactccaaggaggcacccgtcaccgaatgccggcggtcgggcgtcgtccccgacgccagctgggtcacaggcgaagaggtcccagtccaccgaacggcggccggtgactccgtcaaggccgtcttccggcggctcgcggccgagtactccgtccaggatctctgccccggcatcgccatcgtctgcgacttccagcccgtcctcattctctagctcgtcgacgccagtgggtgatgccgttccagaaacgcaaatcgctctgaggaggttgcctggtggccgggctcctgatgggctgtggccttcaatgcggagtctgtcttcttctttccagctcgaatcaaaggggaaaaagatttctagtagctcctctgcagatcaggccaagacgagggatgcagcacccgctgataggaagaggagcccattgagaggtagagctacccctgagcaatcggagaatccacatgccaaggtgattgatcatcatcgctggcctgctatgatggggggcagggtgtctgcaagcacaatgtccaagagcatggatctcactgataagatcagtaggtctgctcttccatcagttccgtcacgtggtgtttcaccgaagcgaacaacagtgtcctctgctgcaaataccttgtcaagaagtattgatcttgctgataaaattgatcggctggtctcttcgtcaatgtcatcacaaggggaatcaccaagaaagtcaccttgtaatggtgcagatgatgtgtccaaaaaggttggtgttcgtaaagatctcaaactctcatccttggcaatatcaagaagggtgtcaccagtaacaacagatgataaaattgatcggctggtctcttcgtcaatgtcatcacaagggggatcaccaagaaagtcaccttgtaacggtgcagatgatgtgtccaaaaaggtcggtgttcgtaaagatctcaaactctcatccttggcaatatcaagaagggtgtcaccaataacaacagctgcatcagatggcactagaaccttatcaggaagcatggatcttactgaaaaagataacagtacactctcgccagtttcatcacccagcatttcaccaagtgcatcattatcaagtgtgtctaatgccgcatcacagactactacaaagtcatccgagagattaattggacctgtttccaacctgtcctcatcgagaggactttcacctagaagaacaacttctggtggcattgttgatttaatgaaaagcattgatttccctgaaaaagataggagaccagcttcatcaagagggttttcgccaaggaggagactcgtgtctgatggtgttaatgatattgggaaaaatatggattttgctgaaaaggatagcagagtagtcagctcatcaattccatctcgaggggtttctccaaggagaagacttgcctctgatggtgttgatactatgtgcaggagctcggagttttctggaaaggataacaggccatccacctcatcttccacatcacgtggaatgtctccccgaagaaggcttgcttctgatggcataagtgctgtaaccaaaggcatggactttggtgataatgctaacagaccatcaacctctaaaggagtgtcacgagggatttcaccaagacttcaattagcctctgatggtgttggcaatgtatcaaaaggcacagatcttgctgatggactggacaggccatcaacctcatatgcaacaccgcgaggtatgtcaccacgacgcagggttgcatctgatgccagcaatgccacttcagaaaggatcaagttcaccaaagaggattctggaactgtgtcctcttcagttgcacctagaggggtctcaacattaagacaacttgcttctgatggtgttgaatctgtctcaaaaagtatggatcttgttgagaaagatactagacctactacctcatcagcttcatcacgagggctttcaccaagaaggcgactttcctcagatggtgtcaatgtgatttcaaagagcatggatcttgttgaaaacaataacaaacttgtcaccatgtcagctgcagctcgaggggtttcaccaagaagacggctcgcctcagatggtgtcaaagtgacatcaaagagcattgatcttgttgaaaacagtaacaaacccttaacagtgtcagctgcaacacgaggggcttcaccaagaagacggctcacctctgatggtctagcatttatatcaaagagcacaaatattactgaaaaaagtatcagaccttcaacaccgtcaatgtcatcacgagggatgtcaccaagaagacggctggcctctgatggtatcaatgctgtattggacacagaatttgctgacaaaaattgtagaccatcttcctcatcagctgctttacgaggggtttctcccagaagcaggtctgcctctaatgccatatcaacaggcatgactaatgctgaaaatgacagcagaccatccacaacatcaagtccgtcatgtcagactctgcagagcagcaggcttgaatctaatggtgttaacatcctatcaaaagatatggaaatctcatcaactgtatctggttgcacttcagacagtagacttgatggcgctggtgctctagtaaaaagcatagatgtcactgagaaacttactgtgtcaactgaagatggtggtggtgaagacgatcctggaagaatagattctagtgacgtagttactagtgcagtttcatcatcccttgcatctcaagaggtatcatcaagacatgttactgatgacgttaagaatgcgtcagagagtgttggtgcaacgcaaaaaggtaacagaccattatcagtgaaggttccatctcgagtagcttctccaagaagacgacttgcatccgatggcattgatactatatctaaaagcatggattttgctgagaaagataagaaacccatgacagtgtcagttccatcacgtggaatgtcaccaagaagaacagcaagatctgacagtgctgatataatgtcaaaaagtatggattttcctttacaagtgttttctacaagaagagtactaggacctgatggtgctaatgccatgtcaagaagcatggatctaactgataaaattagacagaaaatatcttcaactatgcaatcatccagagtctcaccaaggaaaatgcctcttgcttataacagaataaaaggccctgaaattttatcaggtgatgctgagagccctggttctgctgatggaaatgaaagtcaagaggagaatgccagttcaagtccagatgcaccttcaaatagttcagaaaaatctacacctccaaagcagctagctaggagatcaccttcgccatcacatattttaatatgcccttcatcatcatccaatgcttcatcgacaccatcatttgtctccaggagattaccaagcccatcaaggactagaccttcaacacctgtctcaccatgtagttctgccagatctgattcagcctcttcaattcttagctacattggtgatgctacaagagggaagaagagcccaactcacacggaagatgcccatcagttgcgcctcctgcataataggaacttacaatggtgttttaccacttcttatgttgatgaactgctgtcaattcagaagataagtgctgagactatgttgtatagtgtatgggatgctaactcaaggatgtgtgactctatggttataaaaaggaactatgtacaacagctaaggcaagaggtcaaattgggaattgtcttgaaggagcaatcgtggtaggatcccagatcctatcaatctggtatcggagattttgggtgacgacgactttgagaagca

SEQ ID NO: 30665 - DNA, 757 bp, Zea Mays
cgacgaccgatatatatgtgttgttgcatctcatctcgcagccggaggatgggagccgcgacgaggtggacttggagttcctgggcgacaaggccggcgtgcccatcaccctccagaccaacgtcttcgtcgacggccgcggcgacagggagcagcggacgcgcctctggttcgaccccgccgccgacttccacgactacaagatcctctggaacccataccagctcgtgatgttcgtggacgacacgccggtccgggtgctgaggaacctgacgggcgccgtgccggggtacccgttcccggggaagcagacgatgctgatccgcgcgagcgtgtgggacggctccgactgggccacggacggcggccggaccaaggtggactggtccaggggccccttcaccgccggctaccggggcttcgacgtcgacggctgcgccaacaacgggagcgacgcgtgccaatcgcccgacctatggtggaacgccgccgagtaccggaacatcaccgcggagcagcgggcggcgtacgaggacgtgaagaggagttacatgaactacgattactgcgccgataaggccaggttcaacagcaccaccgtacccattgaatgcaactacgcttgataagccagctaggagtggcgttgtatattatacatacacgaaaagatatgtctgcttatttgttgcattgcaagggtttaaatatgcaaatgcttataaggactacaaaaatatattactttgtcactaaa

SEQ ID NO: 30666 - DNA, 80 bp, Zea Mays
aagtcaattcatctttaagtcggttcgaccattcatcttgagatttgtctttgtgccgaagctttatagataatagcttc

SEQ ID NO: 30667 - DNA, 2180 bp, Zea Mays
cgtggagcaaatccaccggaatccggactggattggattgcggcatccattccattcgcattcgcattcgcgttatgcattccaatcgcggccgccgtcgctatcctcgtagcactcggccgtgctttgctcggcccacccaaccccgtccctatcgccccccatcgtctccctcaccaccagtcaccaccgccagctccccgcctctgcctcctccaggcgaccaggcccccagctttggcgtcgacggacagatacagcggcgccatttccaaagagagacacagatcgcgctgcccaaggaaaagaagccgcgccttctcccctctcccttctttcttcccttttattgacgggatcgtccgccggttccattccaacactaattcctcacgggggttccatttggattcggcctggatccgcgagatcaagaaaaacgcctgcaattaaactgccaagattaacaagaaaaatataaccaaccttgattggctgcaataatctttcttcaaaaaaaaggagagagccttcggcggcggccgatcttggctcggatggcagcgccgccgcagccgctggcgtcgctggactactggcggtgcttcttcagcggcgcgcgggctagcatctttgacgccatcgacgccgccatccgagtagccgccgccgaccaccccgacgccctccgcgcgcgccgcgacgccatcgccgagcgcctctacaccgcgattgtcgcgcttcctgcaacacaggaggcgccggggcagtccaccccgggccagccggcgctcctccttcccgagggcgccgccagcgtgcccagcctctgcagctcggaccgcgccgaggtcgtcaacaacgacggcggcggcgcgccgctgaccaacagcgatgacgacgtggtcgccgaggcgttccgtatcaaggcggctctctccaatgcccaagacaagtcggaggccgagttgctagagcttctggggaggctggggcagctggaattcacggtggacgccatcagggctactgggattggaatggacgtgagaccgttgcgaaagcatggctcgaaacagattcggcaactcgtccgatcgctcattgaaggttggacggctactgttaacgagtggatgaacaatggagatcccgttgtagatcatacaccacaatcagtggatgcttcttgcctggatgaggaagaagggggtctgccatcccctcccatggatgaggcagccttgtttgcagcaccatgtacctcaatcgagctatccgagttcttcgatgaaatggatgacgacggaaatattagggccgacgtcaaggacggcgggcagcgtaatccggcaagccaggagtcggtcagcaagcagtcacctacggtccagcagtatgacccagagcagaactggaagctagaccagtctgccacgaagcaactgcgaccaaacgaggcattcggctggcagacaacgcagcggtcgaattcgggggcgcaagcgaaggcgtcgagtgcggcttttggtccagggagacctcaggcgtcgcagatggggaggccgagatgctcggaggtgaagccagagcagcagcagcagcagcagcgagacgtctcggtggctcaaagaagaccgaaaccgacagtgcctaagccgccgccaactgagcatgatgaatatccagtccgcgcgaagcaacagcaacagcttgcaaaggatggcaagctggaggctacgaagcgtaagctacaggagggttaccaagaattcaacaacgcgaagaagcagcggacgatccagatggtggatccacaggacctgccgaagcaagggagccggaacctggcgctgagcggcaagccgaggaacagcagcaacatcaggaaccggctggccgtccgccgctgacgctgatcccgtccaccccatccatgcttttcactagttctggagacccgccctgcttgtatactataacctggatatatggatcagtctagcgtttctttcttttggggtccagcaccatatacacatatacttgtagcccccctctaacgtctttgtcttgggtcatacttatagagatatattaacggtgcattacatggatgtagatttatagtatatcggtgttccgaggccttgtgtgcctcttagctttggtctgtcatg

SEQ ID NO: 30668 - DNA, 2478 bp, Zea Mays
gtaggaataatcttctgtgatacaacaaccatgtagccaccgatcctaatgagtcatgcataatagcagacacaggcaacagtgccccgtgagcacatgcaggatcagcagtacgacctccgactccgagctactgctcaccctctcgggctctcggcccgcccgtatgccagtctgtctctggtacactccttcatttcatcgcctagctagctactatatagtacgacctgcctgccttgctcttgccctgtgagcagcggcgtgcgatcgatcgaggcagtcgtagtaataagccaacaaacaaaccggccggaacgccatgctggaggagtacaaaccgtgtgcggccatggtggtgacgcagtgcatctacgccgctctagcgctcttgtccaaggcggcgttcaccggcggcatgagccccctggtgttcgtcgtctacaggcaggccgtcgccaccattgtactcgtccccgtcgtcatcgcggccaacaggaagaagatgaaggagatgacgacgggccttggactgacgggcttctcgctggtcttcgtcgcctcccttgtcggggcaacggtgaaccagtgcatgtactaccaaggggtgaatctgggctcgtcgtcgatggcaacggccatgaccaacttgatccccgccatcaccttcgtcatggcggcatcagtcgggtgagtgtctactactagtttgacagagaagagacggtcgacccgtttcatcagcgccgcgagcaaaatttagttgagcaccgtgcgttttctctgctgctccaccgtacgccgtctaatatgggcgagttggagatggggtgtcctggaccaacgctgccacctcacctcacctcacccacctgcgcgccttaattcacaagtatctggtgtagaccggaaatcaaacatttacttcagttaacgaagaccaaactcccatgaacaccgaacagattggctatcacatctcggttgctgcaaaatgcagttttaagcaatggcaaaaatggtcagtaggttcaatgcactaccttttcgtgccatgttaaattgttttgagacgtccactagctcccagaatattctcccggagtattctctgttcagattcctccctgaatatgtttctgagttcctcagattcctcctgcaaagaattaaagaaaaccccgtttcaattcgccgctaactgtcgtctgtctgatgcctcccactccgttccatctgacgattccatcaaccgacagcctagagagggtggaggccaggaggccgaggagcctggccaagatcttcggcacggccgtctgcgtgagcggcgccatggccatggctttcttcaagggcccgaagctgctcggcgacggcccgaacgctctccagctcctcctccacgcgggcggcggcggcaggtgggtggccggcgcgctcttcctcgtgggcagcagctcctgctggtcgctctggctcatcctgcaggtgcccatctgcaagtcgtacgtggagccgctggctctgtcggcgtggatgtgcgtcctgtccacgctccagtccgcgctgctcgtctccttcctcctgccggaccccagcgcctggaggatccactcgctcttcgagctctcctgctgcgtcttctcgggcgtgttcgggtccggcgtcacgttctacctgcagtcgtggtgcatctccgtgaggggcccgctctactccgccatgttcaacccgctctgcaccgtgatcaccaccgtgttcgccgccgccgtcctccgcgaagagctgcacgtcggcagcttgctgggcgcgatcgccgtcatcgcggggctgtacgtggtgctgtggggcaaagcgggcgacgccaacaagggcggggtggagccagagcaccactcggacgatctggagaagacgtcatcagcgcggtcggatcccaattcgacggccggcgtcggcagtggcatcgccgagcccctcctggcgggcggcgatccaacggagaagtagatgggattttgctgctcttcaagtgttctgtgcgtgcgcgcgcggtgttttcagggtcggtatgctagtgctactgtaacagtgccgtcccagttttgtcatgtacactagtggcagcttcaaatgactccgtgctgccgatgtgtattatccgcacaattttgttaagcaacgcggcgtccccgtccaaagtcgtcgtcgccaactccgggccgctccgctccgctcgccgtcgtctccaactctctcttgcttgtggggtggtcaggtcttggcctgctgcgactatatggcccatatgccgccgcatcgggtcaggtccaagcaggaagcactttgttccagtagaatcagatgacataaccagacccatgtattagacatttagacccaactcggaaaccaggccccgttcttattttaacttattatattttatctctttaaaatatattaacaccacct

SEQ ID NO: 30669 - DNA, 2512 bp, Zea Mays
gatccgccaccgcccacccttccgtcgttttgcccttccgtttcacttactggagcacactgcctcgaatgaggaggttatttctggcgtgctgccgctacctgcagttcacatctgtccctgatgctatcagagctacttcacctgttaacaatgtctacgggtcatggaggaggtatatcttcacaaacgctgataaggttctaccatgggaggcgccatcccgtgaaattctgttgaggaagataaattgtgctatgaaggatgggaatgttgaagaggcgctgcaatctttgagcaattacaagaagcttcacggtcttcctgagccgcgggtactgaatagtataattgtgtcgctgtcctacatgtctagtaggaggtggcttcagagggcatttgacatggttctctcagtttatcaaattaatagaaatcttctcaattgtggctcactgatgaggctagcattggcgctcgcaagagatcagatgcctatcccggcctccacagtcctgaggataatactagagagtagaaagcttcccgatgttgatatgctgaccatgtcgtttctgcatatgttgaagtcacaggtaggctcctaccttgccactgatgttctgattgagacttgcgagagctttttggaccaagttacagataggcgggagatgaaaaaactggacccaataaaaaacaatgccaccttgttcaatatggttttggagtcatgtgtgacctttaaatgcattatcaaggcccagaaaataatggaactgatgtcattgatcggagttgtggccgatgtaaatacagtggtgatggctagccgtgtctttgagatggttgggcaacgggatgagttgatacatatgaaaagaagcatcgattctttaacatctttgacatttcttcagtactacctgcatttttatgacagtctattgagcctccatttcaaatataatgacatggatgctgctgcaaagtttttaatcgatctgcatcagcaaccaaagcctggtgttttattttgcaatggtttgcagaaacaaagtatcatacaaattggctctggcaatctgaaaagcggatataaaataatgtttgatcccaaaaaagttgacaggggttttgtgttgggtacagaaagccaattcggccttgttgttcttactgatggaaaccttcttcatactgaaaaggctcttgctaaacttatcataggctgtgtgaaatcaagaaatatgcatatactgtctaacttttttattatgtcatgtcaatatggtctagagctaatttctcctcaagatgtggttactgcttgcattcaaatgggatggttgcatgctgctcatgatatcatagataacttggagtcagccgggattccagttgggattactggttacgtttctcttctgagagcatatgagaaggagaataagtcagaagaagtcaatggccttcttcaacagatacaaaagatggcatctaccatggatgatgttcatactgattcaccatttactatcaataatattgccgaagtagtgaaatatgaaatgtccttcagtagttcatctttggttgctgctttggctgatgaaattaaacattacaaccctggagagcacttggcattagagctcaataattcggttcttttcttctgcaaggcaaaaatgatggaagatgctctttgcacatataagtgtatgagagagcaaaatatcagacccacatctcatactttttgtcatatgttgtgtggttattcttcaatggacatgcatagggagatcaccatgttgtggggagaaataaagcgcagacatgaatatggagagctagatttggatagggacttgcttgatagcttggttttgaattttcttaaaggtggatatttttcgagggtgatggagatcattagttacatgtcaaaacataacatttactgtgacaagtggaaatacaggcgtgccttcctgaagctacacaagaacctgtataggaatttggattcattgcatgacaaaacagaagctcaaagtaaaaggattgaagatgtccgagctttcaggttgtgggcaagcattaagtagggacagcgaccaatttgatccctctcattttcaaattgggtaaagacacccctttgatgacttgtagtgcggtgccaagcaagcctgccttgttgccacctcaaggattactcctggcttgttgccctgaagcctcccttgagggaaaaaggcaaagaggcatcgatggtgttcgcagcacctgcagcgggggaagagggttgaggctgtggagagctttggggagctcagccttagggaggtggtgatgtttgcgctgggagaggtgggcctctccaagcagacggagatccagttggttgacgtgaccagcggcgtgttcggctcccacaccggctctagaaagacgttcttctacttgctccttgtttattgttcagacctaggaggacctggtt

SEQ ID NO: 30670 - DNA, 3917 bp, Zea Mays
agctcaaatccatccaactactgtaataaatgaagaagaatctcaagtcttttccctctccctcctctctctaatgtacatctttggtattaaaaatgttattacacctcaacagatcaaaattgtgcagcgataacacctaaccaactccattacagatcccagcctcctggcagccaacactgtttgttcgactttccacgcagcacgcccacggcaaagggagtggtgcatgaagctatctatctatgccacacaagctacttgtaaaagctggcaacacatcccagccacacaaagttgctgttgttcattgatgtctcagcttcacaggtgattgtcactcagctaaaagggtatcacgtatggcagagcaatgacatcagcatggtcaattttcagagcctgagcccacacttgggggactccatcagcctcaggcgctgaactggccggcttccttggctgggtgccgcctttgtcgaacagccagtcctcaccttcctgcccaggcaattccatcatttgaggtgcttcaggaatgctgtatatctggctaagatacttgcagtcggggtgaggtggcttcctagagcttgtgccattctcataagcagccaccggatcgactggacctcgctgctgaccctgttggttgccattgaccttctcttccttgtggagcctttcagccttttcaatatttatggcttctttgtaagtaaccattcgtttcatggttctttcgcttcttcaggttctcatcaggcacaacagattttccatcatcaactggtggggctaaaggagggaccgagtgcttcaagttaagactatctatgggataacttatactgttttctcttgttttattatgctctttgtggttatgttcccttttctccttctttgcctctttctcctttttcttctctttgtgtttatctttctctttccttttctttttctcatgccgatcactctttttgtcctctttcttggcaatatctggtgccccatctctgaccttctccatcctttcagctctcccatctgcagctttctccacagctggaggctttgacataaccagtttctgatcagttgaaatattagcctgcagcaaccttccaccttgttccttttccttgcccatagcaggtgaaaggcctcctgcatcaggtttcttagcagagacagaaagattttcagctggtcgtaccatgccattcggtctccgtattgtaatgctcgggcttgggatggatgacctaggtgctcctctatccatcccccatgttgcacttgatgttgatgggctgccaaatctctgcatggatccttgtgtgttgtccattggcctaccaaccttgccatttcccttatgcatagcattagcaggatttggaggcaatggagaggaggtgccaacttctttcttcgcgacatctttgtttgtgttctcagttctcttttgaagcgatatgctaatgttactgattcgctgtccaaccccctcttttctgggtgcagcttcattactggatgaaagccttgcagctttgaatttatcctccgttgtaggtgctggtggaaagccaccagcagttcttcgagcagaagtggtgaagctttcagaatgttgtactgatgtcccattcttttgtcgattggcattgatgctctgttgtataaatccctcagttttccttgaagcattaccagactgaatatgcactttattatgcgcggacctttcagtctccattgcaggtgaagcaatgaagcctttgcgatttcgatcatttgaaacagcataattttcaatagtttgactcgctgcccctttctcatcctgtactcctctgaccaactcctccctgaatttaagatccttaatttcttcagaccccctgctgctctctccaaccttctgaccatggagagcctcgtcatttctttgaattccttcgcctgactccctgtttttatctttgctcttgtcttttttctcgtctttgtgtttttctttacgatctttcttatctttgtgcttatccctactcctgtctttatccttcttttctttaccttcctttctatctttgtccttcttgtccttcttatgtttcttctctttgtgtttctcctgagatgacaacgttgtttcaagtcaagtaaacgccagttacagaaaaaaaaaactagcaaatgagtaaaaaataaaggccaggagcaagccttagtgaaatacagtacataaaataaccattaactaaaatgtacaaaacgatgaacagtgatgttttagggtgaacggtgacatcaatactccatttgcacaactattcaaggccacactgcctaaaagcatactgaatgacaagttattaactgcaaataaagttgtatccatggtacaacaaatctgcaaggtgcaaagtataggcaatatgcaatacagatcactgaactacattgacaccctattaggacatctaccttctcatatgtgcaagggacatgctacatttgaaccaaattcacaaaaactggaaataaattaggagatagctggttttccaactacaactttgacctatgaactatgaaaggaacaagatagttattagcctattagtactttatgcgctctcaagttaatgtcttcaatagtaaccacaaattaggttaacctgtgcaaatttttattaggctgcatccatatgcatggaaggattagacaggccatgggatgtccgaaaatcatgcaatcaatttcaccaaacaatagtgatcggttaaaaagcctaaaccatcacacttttatacatctttttttttctgcattggctagagcctacagccaaacctactcatagtaaacatgatcaataaaacttctataacaacacaaagctccaggcaaaacttatccatcttaagggctactttgggaacctcaaatcccatttgggattggaggggattgaggtggaaatgaactaatttcctctccaatccccttcaatcccgaagaggatttgagtttctaaactagccctaacaagtgctacaggcctacaatatttaagttacatggtactgtcgtgtaacaacatttctgaattttcttgcactagtatcaggttcatagattccagtattgtccgagggagcaattttgcattgttaatcttgttaaaacttggtattaggcactggcaatccaaaatgtactgtttcaggccatatttttagtttgtcatttaattataatcaactgtcagaagacacaaaaaattgatcatgtggagtccaaaacacagcaaaaagaatgggatacataacttgagttgccaagaacaatgatataaggacccccaagccaatgaatacagcaaacaaagtagctactgggctgtatgcagccattattcatttggaatgtagtatgacaccagcaatttcatggtaccctctatggtgccctggcactgatttcatataaggataaggacagataacaagtccaaaacaggaaatatgctgattaaatatctaaagcatatcccaccatgtcatgaatcatgaaatgacaatagtagaacacaaacagactaaccaatctaactcttcgtgtttgccttcaactatagatgaaaagatatcgatgcaaggtggtctactctctattgatggcttgaacatttttttcccacagttggtagctaccagaaacgacatctgactataacaattattcacattctagtttgtacacacgtagacaattttttagccttggtaatcatattaagctgcctttcaaaagcgaattctgttgccatgataattgcactaaaatctaacctgcaatatcaacctaacgaataaccccaaaaaatgttcggaat

SEQ ID NO: 30671 - DNA, 2305 bp, Zea Mays
ggaagatcccttcttgtgcctgcgcccatagaccaaactcagagtatatatatcaccttttattcatggcacaaggtatagttcttttggtcgacattttacgaaggtggagaaacttgttgagattgttgatagacttcactggtatgtggaatctggtgacatgcatcacttctgctttgaaaagagggattggatgactgtgcaaccaaatgaactgcctcgtggatcccaactaattatggggcttaatcctccttttggagtaaaagcaagtcttgcgaacaaatttattgacaaagcattgacattcaagcctaagctcattgtactaattgtccctaaagaaacaaaaaggttagataagaagaagataccttatgatttgatttgggaagacagtgagtgtcttgctgggaagtccttctatttgcctggttctgtggatcttaatgataatacagttgaagggtggaatgcatccgcgccacccctctatttgtggagtcatcctcattggacaaagaagcacatgcaagtggctgaagagcatggtcacacttgcatggggaagatagcttcccatgttgaaaagagaaatctgtcagatgatctgcccgtgaggaaacaatctgaggctgcaaacaaatggaactccagatcagggaaagagactacatgcaatgacagaaaggacaatctacttgatgatgttactgctaagaagcaagcaggacctgaagaagaaaaggaaactctagggaagatggaccaccatgtgaaaaaggctactataccagatagccttacagtgaagaaacaaactgaagcttccagcaaagctctctctcattgtggaaatgatagaaagattggcaggtacagcagcaggaaatatgatgactggagaagtaagcggacacctgatcacgaagagagcttcccacctgaaaagcaagtggaagttgcatatgaggagacaaaagttattattccaagcaaaaagattactcataacgaacaaagcggtgcttgccgtgaaaatagaaagaattcttgtgtggaggaaaccaagaacgtggagtacaactatgagcagcagactgcagcagggatgaggttcagagagggagaggattctgacatgagtatctcacccccctcgagaccagttgaaccctttgatatgatagctcaccccattggctctctgacaaaagaaccttttgaccctgtgctcaatagaggggctactcatcaggacagttatgcagtaaccaaagaggaatacctgggtcaatttaagaggaaaaacgaccgtacctttactgacattgatgatagctcaaggatgaggggctccagcatcgaagaagtgaccaggccctatattgctgctccaaccagtgatccctacagcttgcggtatagaggagatggcagcttctacaggcatccgagctcagaggatttaaacactacaggcatcagtgcaggatatggacaaattggtggtgacagttacccacaagcaacaggctcgcaaacacataatactagaatgcatggtggaacaagtgatgataattacctgtcggcgagatactcccttggatattcaggttctcgctttagccaaccagcttcaactgttcccgcttttgggctctcaggtgcaagttcacaacgaggctcagtaatagacaagtattcctatgggctctcgggtcccactggaccacaggattctggtattaacagatatgctccaccggacgacggaacgagcacaagatccaagagctccttggctgaacaacagtacccgttcggacaatctggctcttccggtggcgagtggcctcatatctgatcgctggaacttgttgtcgaagtttttttttcaaggcaaaaactgtgggaagttctccacggtacttcattttcatttttagaggggattacatgttatcaaaatcatgcagcttttgacctgacctgggtgtaaattggagtaaaaccacaagcatctatccatgcggggctggtgttaaaaagcaaagttgtttcttataaaactgtctacagcagtctatccatgatttacccaaaattactgttttgtactgtagactgcattgtttgcataatgaagtttgaatatagatgaggatgggtaagagatagactaaggtagtttcatcatacatataagagttgtaatgacatataagtttgaatatagatgaggatggctatccgaggacatgccctttgcacagaaaaaaattcaggactactgccg

SEQ ID NO: 30672 - DNA, 1859 bp, Zea Mays
cggccggcgcctgcacggcgcccgcggctccgcgcgctcgtcctacttgccatccgtcactggacgggccacgcgactgcgatccctgccacacgagcgcaacgcgccatgggtccggcgtgccagtgagagcgggagaagctcggacatctccgtggagggacatcttctccagcgattcagcgcgggatcctgctggactggcctgatccctccgtgctggtgtcggcgagcatgcaaggaaggatgcgaggcgcgcggcggagcgcgcgcggggaatcgtcccggaaggcggcgggccgcgaggtggagccattcacgctgtgcggcgagatgtcccatctcaccagggccacgtcagagccgtgccgcagggctcgcggcgccgccttcgcccgccgggcgaggcccttctcggcgtacgagctggtgtcggcgcgggaggccggccgcgcgggcggcgccgggttctccgcggccgatcgagcctacctcggcaggcagcacatccccaccaaggggccgtggggcgtcgacgacgtggaaagcgaggcctacgtctcgcagttctccgccgatggctcgttgctcatcgcggggtttcggggaagccgcatcagagtctacgacgccgagaaagggtggaagatccacaaggatataagctgcagaagtgtgcactggacggtttcagatattgctctctcacctgaccaacgattccttgcctatgcaagtctgacacctattgttcacattgtgaatgttcagaatgctggaaaggaatcacatgctaatattactgaaattcatgagggattggatttaaccggtggtgatgaggatgaggactttggaatattttctgttaaattctccaaagatggtaaagaagttgttgttgggaacaatgaaaagtcaatatatgtttatgacctttcagcaaataaagtgtcagcccgcatccgtgctcataaagctgatgtcaatgctgttaccttcgctgatgaaactggaaacgtgttgtactctggaagtgatgatagtctctgtaaggtgtgggacaggcgttgcctttcaggggaaaagtcagcagtcgcccagtgagtctagtggactgggactataggtggatgccatttccatcagaagctcataatcttaagcatccaggtgatcagtctgtggccacatacagaggccattcagttctgcgaacacttatccgttgctatttctcccctgtgcacagcacgggtcagaggtacatatacacgggatccagtgacaagtctgtacatatttatgacgtggtaaccggggaggctgtcaagaggctttcgtggcatggctccatcatcagagactgcacctggcatccatactacccaacgctcgtcagctcctcctgggacggcttcgttgcccggtgggaggcctcgggcgacgacgacgaccattcggtgctcgtcgccgacgagatgagaggaagcccttactaccggagatacggcgatcccttggtgatgtagagatgtctgcaaagtggttaacaccaaatggtagtgagcatgtactttgctttgttgtttgggaattacaactgagcagcatgtacagtgccgtttggctcatgtggttgtatagccttacgataaataatatgtagggatacagaaagaacacatgagatcgaagcgactttataaatcctatggaatttatagaaacagacaagatcctctttccttgtttttaaaaactttataaatactttttcgaattttgattggattggaatacaccgttgttggattcagaaattatccattcatctcactcactatgggacaatgtac

SEQ ID NO: 30673 - DNA, 2892 bp, Zea Mays
taatcacccttgcaagttgactttatatatggaagcgggtatggacgtatggttggattcctgcgtggcgcaactgggccctcggtgagagggaaagattctaacaaataaagaaaaacaaaattgccatggtggcccccacagtctttgttgttacgacaacaccagaaaacgaagggcaaaaccaagcgaagccaggccaagcaactttcttgttgtcctttcgtctcacagcggcagcaggatccattagatgctcctcgggtggagcactgagccttttccggcggtgagttgagctgagcagaaccgtgctacctagctaatccacaggaggaagagaggagaacgggagccctttttatgacaagaagggaggcgccaggcgtgtgattaacagttctgaagggagagttacctgcatctgcatggaagagggaggagacccgcagcttccgagcatctccgcaccacgcaccacgtccgaaggcgcggggggcgtcgacttggatctccttgagcagctactgtccggcgacaacggctggctcgaggtggtctcacgctcgcccaactcggtagcgtttcctccactctcagccttcttctcggctgacgcgacagccaccacagtgacgacggcggcgccggccgcgaacgccagctggtggattcagacgggtggcgcgagcccctcctccgtggaggagcggttcagccaggccctgtcctacatccgggatacgcagagcgacggcgacgtcctcgtgcagctctgggtgccggtcaaccgcgatgacgggaaactggtgctgaccaccagcgagcaaccgttcacgctcgaccaccgctccgacagcctcctccggttcagggaggtgtccaccaagtaccagttctcggccgatgttaagtcgggggattcgccggggctgccagggagggtctttatcggcaggctccccgagtggtcgccggacatcaggtacttcaccagctacgagtatcccagggtaagggatgcacaatacctcgatgtccacggcaccatgggtctgccagtgttcgagaagggaagctacaactgcctgggcgtcatcgagctgatcatgacaaggcagaagataaacttcacctctgagctcaacaccatttgcagtgctctccaggcagttaatctcagaagtacagaagtttcaagcattccacgcataaagtgtgccctacgaccctcaaaagaatttgcaggcagcatggtataacccgctggccatcgcgaaagatcaagaaggtagaccactctctaagaaagcttcaacagatcattgattcggttcatggagcagagacagctttccagctaaacaccctgtacaaggatatcacgaacacctcaatatcatctgacaacaatttgtcaggaagtgtcacggttcctccaaccaaccagagcaatctcaccgacgtcaacaagcaccaaccccacaagtcaagcagtaatgtgccatcaacttcacactcacactcttcgtgcagccacagttctgagtcaagtccctcatgtagcggtggtgcaacaaaacatgcacaacagggtataattgatcagatgaagtcagaaaatcctgtgaaagacagctctattcagactctgcaaacagaaaacacttcattatttgagcatttctcagttaatgagactccaattgatcttctacaggatgttactgaaaaggctaatggtggacatcattcttctcgaagcccgtcgtcccccaatcccaagcagaacacagatgcaaatatgagagtaaaggcaacatttggctcagaaaaagtgagattcagactgaacccagagtgcaattttcaagaactgaagcatgagatagcaaaacgtttgagtatagtagacacaaaccccttggttttgaagtacttggatgatgattcagaatgggtcttgatgacatgcgatgcagatctacaggagtgccttcatgtatacaaactagcaggaatccaaacaatcaaaatttcagttcatttagctgttagtccagctacaagggtgacaactggtcacactggtttgtcatgacaacagtatgaacctcaccactttgtgaggtttaatcagaattcaacctggatcacttggttttatggttttatacaggggaaaccaattccaggagtcccgagttggtagcctatgcaatgtactatgtgccaccaagtcccagttctgctgttagatcgattagtcttcgatctgttgctcaggttaggaactgatgatcaaacaaaagtacttgacaatgggaaagtcaattctaggaattaggataaaccgaagtaagcatgcattgcttgtaaacactcactgatgaacctaaatctctgaaaggcaatgcaattgattgaattaatagggtgatagggtgaagtatacctacaaatcagatttgctccaactccaagtatgttttggttcttggaatactgatgtgcaacaatccttgatgacttctttctgataattgatcagctacaatgtcccttaagatcccagcattccttcatcgcccgagtgaccaacatgctctgtctgttcaatggacattaaattctgcttctgaaattgcaactttctgcagcaagggttagatctaaaaaataggatgataggatatttagtttgttcaatttgtttgtcctttgccaaaaaaacattgtatgctatactacagtgtggtcctctttgaaagaacgcctgctactgtagacgttatggattgctttccttttaagaagcttccgtttataaaccgtttggtatgtcaattgtcaagtatcaatatagagattagattatgtcaatactctaat

SEQ ID NO: 30674 - DNA, 2669 bp, Zea Mays
atggctaacgccgggacagggaggggaggacagacaccggagagcacgcaccagcacaccttaagaacggcggtgagcaacaccagggaggccgcggagagcccgcctttggctgtcgacgacaagattttcgttgctgtccccgaagaactcaagcacggcaagagcaacttgctgtgggcgctgcacaacttggccagggacgcctccagctcccggattgccattgctcatgtccacgttcctgcccagatgataaccaccaactgctcaactgtgcccgaagagattaacctgtctgattataggcaaattaatattttatgcacgaaattttgtcatgaggttaattgcgacatagtagctattcaaaatgacgacatagctaatggggtcatcaatcttatttctttacatgggatcaaaaagcttgtcgtgggagccgcatcagataaaaaatattcaaagacaatgaaagcaccaacgtccaatacagcattgaagataatggaaggagcagcttcaccatgcaagatatggtttacttgcaaaggatctctaattgttgtcaagggcggcaatgcagatacacctacagtaccatcatcacaaaacacagcaccattaccagtattcaacatttctagccaaatgagatcaatgatgatccacaattcaaaggacaaagcatcaagctcaaatttaagtatggcgaacgatatgggagaatcaagaacagatgtaccttgctctctatatgaaaatgctggtgatacactgcttcaatcatttgaagatgttgagtccactttcaaaggcaagccaaggagactacggagtttagaggacttcactgttgactcaggcagatcgcagacgcagaactctgattccagttgtccaccaaatgatggggcagccagtatctctagaacagcagtggttgataacgataacataagtgaagttgcatcaaatatgcatctttcaactaacaattcatacgaccatatttcaccaacaccacatgacctggacaaacttaaggaaactctcactaaaatacagcttctagaaaaagaagtgcaagaagaatgcaataaacagcaaaatgctgaaagagaactgcaatcagctcttcaaaagagcaaagaattagaaaaatcgtatatgaacgaattaaggcagcagaaggcactcaaggaaatgcttgaaaaacagaggcaggagattgatgtgatgagaagacagcaagaagaagcatatgctgcgctatacaatgcaaatgagcagaaggtcacactagaacaacgaataagtgagattgagctatatgttaaagataaggaagatgagctagcaagaaacaaacaccaactggaagcgctccaagcagattgtgacaggatacaacaagaaagagatgctgccataagggaagctactgaactgcatgaaaagaatcggctgggagtttttgcaccatctgaagccctaaacaccaagttctctcttattgagctgcaacaagcaacacaagacttcaatccaatgttcaaggttggtgaaggtggtttcggaagtgtctataaaggtttcctccgcaatacaacagtagctataaagttgctacatccagaaagcatgcagagacaatcagaattccatcaagaggcttctgttctcagcacagtaaggcatccaaaccttgtcacgctgattggtacatgcccagaagcttttggtctagtatacgagttctttccaaatggaagccttgaagattgcttgggatgcaagaacaacacgcgaccactaacatggcagacccgcactcgaataattggagagatgtgttctgctctcatttttcttcattcaaacaaacctcaccctgtggtacacggtgatctaaagccagaccacattcttcttgatgccaattattctagcaaattaggagattttggaatttctcgattgttgatacagacaaacacctgcagcacaaatctttaccgaacaacaaacccaagaggaaccttctcttatatggatcctgaatttctgaccactggtgaactcacaccacggtctgatgtgtactcctttggcattatcatcctgcgactactgacagggaaacaacctcaaaggattgccgaaatagtggaagatgccattgagaaagaaaatttgcattccatcatcgatagcactgctggaagttggcctttcatacaggccaaccaacttgcgcatattgccttgagatgtgctgagttaagtaggagacgaaggccagatctaacagtggatgtgtggaaagtggttgagccactaatgaaggcagcttcaatgacagcacgaccactttcatgcacagctccatcagatgagacttgcatcccatcgtagttgcagcggatggattcacttatgagggtgaagctattaggggctggcttgacagcgggcatagcacatcacccatgacgaatctcgacctcgagcgcagccttctcgtgccgaacagggcccttcgttcggcaatactcgagtggaaccagcaggagaggcagtgacgacgacgaacgacccatgcatggatgcagatgatgctgttttgccatcgtgtgactgtaagttacaaagttgcatgcgcagag

SEQ ID NO: 30675 - DNA, 1765 bp, Zea Mays
aaaaccaaacgctttctaaaccaaacactccttgtcggtcgccgctagctcctccaacctcgttggccgttgccgtctccgtctcgcccgcccatctacgcggcgagatctgctcgcgccgcgccgaggcgcaggcgcctctccttgccaggcgtgacacagacgaactggtgccgcctctgctggggcttggtcctcccagccgagcgcgcctcatccggatcttgcgacgacggtgcccaagctcccggcctccctttcgcatccctgctgcgagccgtcggtctccggaaagagttagagccgtcggtctccgtaaagaattggagccgccaggcgccttgagaagggttttgtcccgggatgtcgtcgtcggggaagatggaggggccgtctgccccggtggtgcgtcgggatccctacgaggtgctcagcgttcccagagattcctccgaccaggagatcaagtccgcctaccggaagctcgcactcaagtaccaccctgacaagaatgctagcaacccagaagcatcggaactcttcaaagaagttgcatattcttatagcatcttgtcagatcctgagaaaagaaggcagtatgatactgctggttttgaggagttagaaaatgaaggaatggatatggaaattgatttgtccaatcttggaactgtgaacacaatgtttgcagcactttttagcaagcttggtgttcctatcaagaccacaatatctcctactgtgctggaagaggccatgaatggcacagttacagtgagaccactccctgttggaacatcagctacgggaaaggttgataagcaatgcgctcatttttttggcgtaacaataagtgaagagcaagctcattctggaatggttgtcagagtgacttcacctgctcaaagtaaatttaagcttctttacttcgagcaagaagttaatggaggttatggacttgctttgcaggaagatagtcaaaagactggcaaggtaacatcagcaggcatgtatttcttgcatttccaggtgtatcgtatggactcaacagcgaatgcgttggcaatggccaaagatcctgaagctgccttctttaaaaggtgacaattttttcaagccagctagctatatgattgaagcgatgtgcgcaaagagttatgaagacacaacagagaggctgaaagagatagaatctaaaattctagctaagcgaaatgatctgcgtcaatttgaaactgagtacagaaaagctttggcacgatttcaagaagtcaccaacagatatacacaagagagagaagcggttgatgatatgctgagagagagggacaatatccattgctcgttcacaactgaacgaactttggcaaaccctgttggtgtcggtagtagcagtaggtataccatcgagcagagcattcctgagagccctgagaatggtagcgtagatggcagagacaaatctggcaaaaagaagtggtttaatctaaaccttaataggtccgacaagaaagcctgatgaatcttttgtcagggaacgtcatgtgttttcactttgttgtacattttggaatccctattgtattcatgccgtatgagttctttggttcccagttctctgggagttttgtagcatatagcagttttgggtacaactttctattctcatgtatgtattatcctaagtgactgcattgaccccatgcatcccaggcgaagttgaatcgcccgaccaagttattttatcgttataatttcttctatc

SEQ ID NO: 30676 - DNA, 876 bp, Zea Mays
tggtgcttgcatgcatttaaatcactgtgagggtggtgacaaagacttcttcaagttcaaagttggatcaggacaggtcataccagcttttgaggaggctatatcaggcatggccccaggaggtgttaggaggatcattgtaccaccggatcttggatacccagataatgactacaacaagttgggtccaaaaccaacgacattctcgggacaaagagctcttgattttgttctacgtaatcaaggcttaatagataaaactctcctgtttgacatcgagcttctcaagataattccaaatcagtagtgtgagattctaatgattacctttgaagaaaaaagctcatgttattcaggtccgtcgaagatcagcagtaaatgtatgcaattgaatatgaaaatatttttttaggcatacgcacatacaacatgatgtgaacacatctacctacatctccattaactacgcctcttttaaaagatgccattgtgtgcatctgcggtttctacagaagctctattagatacgtctgtgatcatacctcgactgctgagcaaatagagaatgaccaaatggcgaattgttgaaatgaaggcattctagttggaaatgttgtaaataccccaaatattgcctgtctgtcgtaatagttcatttgggacgtctggggggtgcatggtttcttttggtgattggtcgccccagacaaatcagaactctctactttaccagaaggtaccatccaaacaggatttcaatccagttttagtgaatgttcaatatgttttagtaaataatgtaaaaacggctttttattgctccaaatatgtaattcaggtttctaattttaaatcccatttaagaaatattttgcg

SEQ ID NO: 30677 - DNA, 226 bp, Zea Mays
tttaattctcatgatccacaacctccaaaagcctataattaccgggaggaacaaggatctcatccatacctagggtttccccaagaaatcttcaagaggagatgggaaagaacatctctttgatcctctcttcctcttcaattcaacgtgcccctccttttctccatccttgctgcgtagggggagatcttgggggaggaagcaatggaggatggctgccataggg

SEQ ID NO: 30678 - DNA, 1194 bp, Zea Mays
atataaagaatatgataggatagacaggcgacagctgcacttcagctgttcacccagcgcgcgcgcgcgctcgtccgccgtcgccctgcccagcccttcgccggtcctttcccaggccttcgacgcgtccttcgccgtcgaagagtccccagcagcaccatgcccttttctcggcccgccgttggtttcttagttagactggttggggtccggccaagctgctgtcctccttcccgtgcatttgcagctgtcagagctcaaaagattcagcttcccaagaaaaaaaggcgattagatgaagtgtgcttagaaaggtttcaacaatacagtagaacatacatccagtcatggattcttcaaggcaaagtcattgtggatggaagagttgtgaataaagctggaacacaagtatctgacaagtctgtcatcgaaatcaaggctgaaatcccaaaatatagcaggacataagcttgaggcagctatcaaaggatttgatattgattgtgatggaaagatagcccttgattcaggattatccacaggtggctttactgactgtttacttcagcatggagcatcacatgtttatggtgtagatgttggctatggacaggtggctgaaaaaattcgcacacatgaacgtgtttcagtgatcgaacgcacaaatttaagatatctatctcaactgccagaaccagttgacttggtgacactagacctatcatttatctccattctcttggtcatgcctgctgttatcaaagtaatgaaaacggattctacattgataacacttatcaagcctcaatttgaagcacgtagatcacaggtaggaggtggtgggattgttcgagatcctttggttcatcaagaggtactggatagaataatttcaggcgtggaagaatttggattctgcaataagggttggatcgaatctcctataaagggtgcagaagggaataaggagtttcttgcttgcttcaacaggatccaatatcagagtcacagccagaggcaaaggaacctgtaacctaggatgtcagcagaacctattctactggtcaacatgttcaattgcaggtgttaaaaattttgtgtatcccttattactttatgaggccactaatttcgaaattaaattactaaattataatttattaaatatgtacttaatttacaatagggaaacaa

SEQ ID NO: 30679 - DNA, 2489 bp, Zea Mays
ccccgacagttgttgtgtgtaagaaaaatagggtttcagtggcggcagcctccactcacgccgccgtcgcctccgagccccactgcccgatccagacaaccaccccgcccagatccagatccacctgtactggatctcacagcctccgcttctgctttcctttatgtcgtcgaccgcgatgtcttgggacgggtacggcgggcagatctaccctggaggcggtgttccagcagcctgagacgaccccccttgcaggcgccgacgggggagatggagctgccgagcaacgctggcgacggcgaactcctgcccatggaggagcacaaggagcgcgcgctgcggcacctactccgccgatccaagcgcccgctggaggagttcgtggccgccgtggcagacgtcgcggagcagctggtgagcgcgtatctggacctgggcgtcgagtggcgcggcgcagactggcgggagcggttcctggccagtcgtacgatagcgcgagctcgatggccaggcgtaggtacccaactgtcttcttccccttccttttagattccattgagattcgtcagaacttttatgcgagttccttttttagccgataattatgtcagtatcttgagataagatggatgaattggattcaacacatatatatttgttgtggatgtagccacctttcttgcttcgtgaattatttgttgtggatgtaattccaatggaaaatatatattattgaggttagcttcagctgcgttccagttatatcgcagttactcctgcttttgggattgagctggcgttttggttatttagagtgttaatttgactcttttagttgcattatagggatctgacatcatttaaaataatttaggatgatttcattagtgatatgattctgaaaaatggtaaaggatgctttagtttcgtccagcataatttacctaataattttaggacactaaatttggttgagaattccaaaaatgagcttaaatcatgtgatcggtccgctagcatcacatagttgttgtcttcctgtcgtgcccatgtatgtatcttggaacaagtttgtgtgaccaaataatttgcatcagggcacacgtcacaccgggtggcaactggcagggcaatgcccgatcaggtctccgtcgtcgattcgtctgaacagctatcctcatcatattttaatgtctcgagcataatacggagtacatatctgtatttacgtcagcgttattgcaacgctctctctccgtggtctcttctacatactataatagtagtacattagtactaacaatgtggttggccatggcatgcttgcttcgagatcaacatgaacaatggaagcacaagtacgggaatccatgtagaaggtgatgaaaatcttgtatctgtaatggtttttgttcagatatcttctgattttgatggtttgcagtggattgttttccagcgtgaagattttccggtgccaattgccacggaataatgccttctactcagctcaacctccaaagcatgatggctctgacaaaccactctgtccaggagctcctgtatgccactggtgtggtacctggaaaggtgataaaatatgtagtagctgcaagaaagcaagattgatggctcttgattgctgtttcttaggcactgcattggcgtactggtcataaaaatgattgcctccagataataagttctgttgcttcaaattcagttctgccagctgtaggaataggtgattatctttttttatatggctgacaatgatagtatactcagtatcaaagaatatagtttttgaattgtgttttctgctaggtacgacatctattaatttttttgtttgttatatatgttttttctccacaaacattctttagatttgatagccttttaagcgactagttatatgggacctggaagtctttttatgtcttctagtgtacttcactatgcacttatttctatctcaagaattgctgctatgattagtcagcggttagtgacacttgtttttttccccactattgctttttagaggtgatgctgatgtgcaagcatcttcaccttgagttctgccttgccagaatgaatcaagtttattttcccatcctgctccatttgaggcaaattgaacagggatttgtttggcttccaaatggtttgttggtcctaaaatagtcagaatcacatgacatctgtgctatagatatggacctcggtggttttctccacattaggaaagctggaagagccttttgaactcagtttttttgctaacagtggtgttatggtgaaacagagttttgtgtgtatgtaccaacagataaaatgtaaacacgacattatcatagttgagtacaggaataattatctcgtatatcttattgcaaaatctgaaacagttctcctgtagatggttagcttgcattttacgctacattcgttattatgaaacagatggacgatttacgttaaaa

SEQ ID NO: 30680 - DNA, 666 bp, Zea Mays
aacctacaaacgtatattcttaaataccttccccggcgcgatggccgcggccgcggcagaaacacagatgggcgacggggctccgccgccaggggctctatactccttcggaacgccgtggccggagctcaatcaaggcctcacctacaccgacacgttccgttgcgctgatgcggacgccgctaccaccttgattgagttctactctactaaccacaagagctcggcgccattgccagggtggatcaagaggattcgtaatgggcagataaccgttgatggtgaagttgtcactgatccagatatgactctggtggatgggtctaagttggtatatcatcgttttccttggcaggagccatttgcgccgtatttgctggaagtgctctacgaggatgatgacatggttgcccttaataagccttctggcttgcaagttctgcctaaaggactgtttcagcagcgaactgttttagcacagcttcaattgaaagactggaagatggcctcatcttgccggttcaagagaaaagatgtgcagtcacatccagtacctgttcatcgtttagggaggggaacatcaggcctcctgctttgtgccaagacaaaagttgccaaagttcgacttgcatcttattttgctgaagttcaagtgattgagatgat

SEQ ID NO: 30681 - DNA, 1537 bp, Zea Mays
cccgcttttcatttgctggtttcttgcacgcaaggacttggtatgtctgggtcggcaagcaatcagagcactatacccgaaagagaacagacagagagacgcccctatcacaggaattgaagggagaattgtgcctgatcatcattttgcaaacgtctaatcaagatcacaaattcatcccgttgccgccatgggtgctggaggagatgagcagcaacccggacatcgtgtacacgctgccggtgcttaagggccggacccccatccaggtctacaccgactacatgcgcagcttccgcgagagattccgtgactacctcggcaatgtcatcgcggagatccaagtgggcatgggtccttgtggagagctgaggtatccttcataccctgaggccaacggaacctggcgtttcccgggcatcggcgagttccaatgctatgataagtacatgcgggcttcgctggaagcggcggcggtggcggcgggtcaccaggagtgggggaggggcggaccccatgacgccggggagtacaagcagatgcccgacgacacgggcttcttccggcgcgagggcacttggagcacagagtacgggcatttcttcctggcgtggtattcaggcatgctgctggagcacggcgaccgcgtccttgccgcggccgaggccgtgttcggcggcacgggcgcaacgctctccgccaaggtcgccggcatccactggcactaccggactcggtcccatgcggcggagctcacggccgggtactacaacacgcgggaccgcgacgggtacgcgccgatcgcgcgcatgctggccaagcgcggcgccgtgctcaacttcacatgcatggagatgaaggacgagcagcagccgaaacacgccagctgctccccggagctgcttgtgcagcaggtcaagaccgcggccagcgccgccggggtggagctcgccggcgagaacgcgctggagcggtacgacgaggcggcgttctcgcaggtggcgtcgacagcgcgcggcgccggcctggccgcgttcacgtacctgcgcatgaacaagacgctctttgacggcgacaactggcggcagttcgtgtccttcgtcagggccatggccgacggcggcgcgagaccagcactgccacggtgcgacacggggcactcggacctgtacgtcgggttcctcgacgccgccaagaagagcaaggcgccggaggctgagggcgccgccaccgccgcggcattgtaggtggatgctcatgcctgtgcgtgcacacagacacatgcgccgtgctgttgtataacgtgcaccggagaaggggaactgtatgtatagattcagggccttgcaggttgcagagttttataggctgtaatcgagcaggtcggtaaggaggcaggcatgtcagaacttaggctgtcttcagttcatttgtcccatttggaactgtattgttataagtctaatctctgtagagagaattctatatggtgttattttccatactaacataatatacatataataaaatataatat

SEQ ID NO: 30682 - DNA, 3047 bp, Zea Mays
gcgtagccgacgacgccgacgacgaggcagccatggccgcccccgccgcccggagaatagttggcgctgaggttcccatacccggctcggacaagctgcggtggatcgacctcaccatcccctcgtcctccgccgctgcgccggcgagcccctccgatcccttcgtctgcgtgcccccgcgtgctgcctcggggtgccacatcatcccttcgggcgattctcagtattacctctcgtggaggattcacgaggaacacccaaatgtgctggaggtcattgaacttagtccctccaaggagttccctagctttggactgcgtcttgccttccaggaggcgctatctccattcgcctttctatgtgaacgagagggtcgcaggcaaggggagcttgtatatatgctatatgtgcttaccgtttctggagttgctcttttgtgccacctacgcagcccattttcctacgtatctggttcagtgctgcatcaggatgatatagctgagtttaatctccaaactcaagctcagagcgcaaaggttacagcggtaacagcgaagccaggatgtattgtgattggtcggcaagatgggtccatctgttcttacagtcttggcaaattagccccaaactcaccaggtttctcgaatgaactacgagatgatgctgggattggacgtttatggactctcatgtcaagaacaaagactgtgggtcctgtgcaggacatagtagcaactgttgtaaatgaaagggacctgttatttgttcttcatttggatggacacttgcgcatatgggataatcacatgaaacttctcaactataatgtccactcaaatgacattgaaggccatccgtccaggctatgggttggtaaggctgatgatgatcaggagttgatatctttggcgattctgcatcaaaacactgtggttcaaggttgtgattatgttgctgtatatggcttcggtttttctgctgcggaaaggttcatgttctcttctgaaccttcaatttctactatacctttgctagaggggaagcttgcggacttgaaaatagccacatataagctttggatacttaaagaatttggctccatgctctatgaaatattacagtatgacattgacaccgaaactgcaaaatgttgtagtgagaaggtttgctgttatgtgctacaagaagatgctatcagtgaacagttgtttcaaagttctgacaatgcattggatgatttggtttggacagctgattcaatgttctcctccttgaaggcttttactttgatttcatccatgtttctgcggaggctacttcaaccaggagtaaaccactgttctgccctacgtgaaaccttactagagcataaaaggttcctatcagattctgagttccagtcacttacagcaaatgggctacgaaaagagatattatctattatagaacaagagggaagttcacagacagcaagtgctacagcttatcactggaaacaattctctgcacggtacctccacaattggtgctggcacaataagccctatggattgtttcttgatactacaaatgaagtgtttggtttagtaagaaagggttcattttctctattccgttgtttggagggtctggagatgcttatttatggttatgaccatggggtgaacttactcgacgatgtgtctgattttgaactcctcaatgaggtcctcagatgcatgggcaatatacaccatttgctggggagatcttccacagcagcatattatgaatccttaattagttctattatatcatctgatgaaattgtttcacatatagtaaagattctagagactggttttagtcatcagtcatcctcatccctcagtacattactaggaatggatacttatgtagaaagaaggcaggcagctcacaaaagtcaaaggaagttttctgttgagatgttacgatcttttcatacgttgcaatcaagatcagcatcctggtcggcagtattcgatgtgattgagaagtttatgaagtgtttgaacacaaacatgaacgtacaatcgtatggatcaaagagagtttgtaatgtaaattctgtgttactagttcaagctacttcacaggttgccagaacaatgtttgagtgtgcatttgatctgtttctgttccttagctatctggttggtgttggtgggcaggtttctttgttgcaaaatgatgttgccagaataaaactgaagctgttcccaatgattcaagacatattgggacaatggattgttctccattttgtaggaacctcaccaacctcaccaccaaccattgacgattttagctatcaactttcttctcttcagcttggtaaatcagatgaactgtctttgcacagaaagcttggctgctctgattttacattggcttctttacttgattttccaaaatctcctgaaggggacgttatgtcaccttgttttctcggtccagcggaaataataaatctagtaaggaggtttagtagtttgattatgcatggaggaaattttgaatgtgtacacactttcttgggatgcacaattaatctatcagctgttctcatcagacatagtcagtatgaagctgctcagaatctgctgggaattctggaaacatacttgaacaatggaaaagtatcgcatactggtcaagatgcagacactgcatgttcagcatatcttcatctcaatggattttgccttctgatgattgcacatgatgaagcaaatattattttgagagaatccaaggttcatgatgctatccgatgctttttcagggctgcatccgggtatgaagctccaaaggctttggagaacttttcattggaaacagggtttcaagtttctggggaatctagatctatttctttgtggagacttaactactatgagtgggcaatgcaaatttttgagcaacactccatgagcgagggggcgtaccaatttgctcttgctgcactagaactagttcttctcgacgggatagataatggaattgaagctgagggtctccagaga

SEQ ID NO: 30683 - DNA, 2525 bp, Zea Mays
gctggtgccgttcgcttggtgcttcctccctcagcgccgttgtcctttgacccggcgcggcggtgcccaacctcgctgctcgtccgacgcccgactcgtcgtgggggtatcatacaataacgaggcacccgaagcaccaccatctatcaaacaaaatggggtgaccgctgtacagggagaaaatctccacgacatcagtgtccgcggagaggaggatgagcagaaagagatgctgcagcaaatgactgacggagtcagagcaatgctgggctcaataggtgacggtgcgatcaacatttctgcctacgacaccgcatgggttgcccttgttaagagcctggaaggtggcaatggccctcagtttccctccagccttagatggatcgttgagaaccaactaccagatggctcgtggggcgacgaggagttcttcctggtctatgaccgcatgatcaacactctggcctgtgtgattgcacttgagtcgtgggaaatccatgctgacatgtgcgagaaaggtttgtcattcattcgagagaatttgtggaggctagagcacagtggttcagatgactggatggtcgttagtttcgagataaccttcccccagctgctggagatggcaagagacttgggtctcgacgtgccctgcgacgagccatccctgcgagctatctatgcaaggagagacgcaaagctcgcaagaatccctaaagaattactgcacgcttcaccgacaactctgcttctgagcatagagggaatgccgggcttagactgggagagactactgaaactccagtgctccgatggttcgttcatgtcatcgcctgcacccacagcctacgctctcatgcagaccggcgacacgaaatgcctcgagttcctcaatggaatcgtcagcaagtttagcgggggagtgccctttacctaccctgtggatctgttcgagcacttatgggtagtggacaggatagagcggctgggcatagggaggcacttcacaggtgaaatcaaggagtgcctagaatacgtacacaggtactggggcgacgaaggcttgcccgccacgagggacggtccggtctcagatgtcgatgacacggccatggggttccgtcttctccgactgcatggctacgatgtctctccttctgtgtttaagcacttcgagcaggacggggcgttctactgctacccagggcagtcgaacaaatccgtgactgctatgtacaacctctaccgcgcttctcaggtggcctttccaggcgaggatgagctccgacgcgctgaggcatacagccgtgagttcctctgccgcagacgagcctccggggagctcaaagacaagtgggtcatccccaaggacttgcctggcgaggtcgcttacgcactggacgtgccgtggaaagctagcctgccgcgcatcgagacgaggatgtatctggagcagtacggtggtgccgatgacgtgtggattgggaaggtcctgtacaggatgtctctcgtcaacaacgagctcctcctccggacagctcaagccgacttcagaagtttccagagacaatgcaagctcgagtggcatggcctcagaaaatgggccagcaggagaaacctccaagcatacggcgtgacgtcgaacagcacgctgcgatcctacttcttagccgcagccagcatctttgagccagacagagcgacagagcgtctgggatgggctcgcacggcggtgctcgccgaggccgtctcctcctgcctccgagacggtcgttgtagccgtgccgacggcatgctgagggaactgaccagcggcatccacctacgcaacgacgataatccggcagccagcttggtgcatgctctccatgagctcattggcctccttgcattcgacaatgcttcctacaacagccttcttgatgcctggaagcaatggctcgccatgtggaccgcccagggacacgaagggagcgtagcgctgctgctggttcgcacagtggagatatgctccggccggaggcgtagcgcctctgccaccgacgatggccaagcacacagcctctccgagtactcccagctcgagcagctcacgtcctcggtatgcagcaagcttgctgcagcaggcaccggagatggagacgacctttccccggcaagtgtggaggacgcagcagatcgccaccgtgtggatctggagatgcagacgttggctcggtgcgttctccggagccgcagcagtatcgacgcagtgaccaggcagacgtttctccatgtcgcgaggagcttctattacgtcgctcattgctcagctcgaacggttgatgcccacatctccaaggtcttgttcgaggatgtcgtgtagccaccgtttgggcctcgttttgtatctttaaagcagtgtttggttccagccagatttagtctcggccaaatcaaatgtttgaatggtaattacatgtattaaatatagtctaattataaaactaattacatatataaagactaaaagacgagataaatctact

SEQ ID NO: 30684 - DNA, 1447 bp, Zea Mays
ctctaaaaccccaaccgtcgacgttcactcctcaccccctgcggccctgctcttttgagcctcactcctcagtcttcacgccgccggggcagtgctaagatccaggacacgcgctgtcccgctagcaccacgcctccccttgtcatcgtcctcctcccacgtgctgctgtgggggtgcagacgggagacacatccggacctgattgatttcttcgttttgttctgctggggtctctaatggtttaaacattgtagatattgacaaaaataatggtgatcctcaaatgtgtgttacctacgttgcagagatatacagaaatctaatggcctcagagcttataagaagacctaggtcaaattacatggagactttgcaacaggacatcacagctagcatgcgaggtgttctaattgattggcttgttgaggtttcggacgaatataagcttgtggcagatacactttaccttacagtatatcttattgaccaatttctttctcagaactgtatccaaacgcacaagctgcaacttcttgggataactagtatgctgattgcctcgaaatatgaagagtattctgctcctagtgctgaagaattttgtaacataacggctggtacatatgcaaaggctgaggttctggaaatggagcaacaagtgcttaatgatctgggctttcatttatctgttccaacaacaaacacatttctcaggagattccttagagcagcacaggcttctcgtacagtaagatcagtacccaaaccacattgcaacgagtcctttcagtctatatgtattgtcctcaacactaagttggcaagctacatttccaggctcatctgaccactttgaattatctggcgagttatcttgccgagttgactttaatcagttacgatttcatgaaatttcttccctcagaggtggcagcatcttcgattttccttgcaaaatggacacttgaccaatctgaccatccttggaaccctactcttgagcactacacgtcttacaaaagcttcgatattagaacttgcgtgcgggctctacaggaactgcagcacaacaccagtaattgccccctcaacgccatccgtgagaagtatgggcagcagaagttcgagtgcgttgccaacctcaggtcaccggagctgctgcggtcgctcttcagttgatgtgctcccctgcactctgctgattcactcgccatttgctgcaacgatcctgacactgtataaaatatttcttcagtttctgttccatttccaaactttcttcagtttgaacatgcattctgtgacttgggtcaccgacaaaagaggcgcgacacactaatatatcaatttgtaactcaaagcatgtttcaccatttttttcataaaacatagaacagaaataaatgcacacactctgcccctacaccatgagtgcctttgaaaaac

SEQ ID NO: 30685 - DNA, 1507 bp, Zea Mays
gttctgtgactgcgagatcccacatctcgtcgcgaaatgaaggaggcgaggaatcactaccacacccggggctcctcgcgcggcggcggcggcaccactgccgagcgcgacctggtgttacagtggggcaaccggaagcgcctgcgctgcgtcaaggtgcagcgccgtgacgtcgaggccgccgctaccgtggccgccgagaaagccgccatcagccagcgccgcgccgcggccacagctgcccagcaccacccagacggccacacccaccaccgtgttttcaggaacacagaagagtttgcgatcatgaaatcgccagcacggcaacaacagaacagcaggatcgacgcagttgcttcaccggacagggagtgccctggtagaggtaacaacaacaacaacggaggtccacagacctgtccagatgacaagaaaggctcttcatcggggagtgaggggtccatctggccgaagtttgcagtcaccctgtcgaacagggaaaaggaagaggatttcctggtgttcagaggatccaagctgcctcaaagacccaagaaaagagccaaggtcatccagagaactgtcaatttcgtatgcccaggaacgtggctgtgtgacctgactcttgaaagatacgaagtccgagagaagaaggtttccaagaagcgccccaggggattgaaagctatgcacgacttggacagtgactcggaataaaaaacagagagagaagagatcactgaacatgagaagctgaacattagagagaaggccaggacagatgcagcagatggaggtcgaccataaagcttcctgatggaatgaggaccaacgggtcaccactcctcgcgattgatactggagatcgatttgtccaaaaggactaggtttttttaaaagcaaatggcaggagctctgcctatccattaagagagagggagagagagaaatttacaagaagtgagcacaataaaagcacgcccaaacataacgagggatcccaataagaagtcgtccctgctgctacaaaaaaaaaaggacttgtagcgatcggaggacgaccgagatgtcaggaagttgcacggaagaacagagaggagagctgcaggagctggagttcctgaacattagcaaactattcaattccctggaaagcagcaacgctgttttgctattctctcatgttaatatgaatggcgagctagccagtcctgtcgcgtctagtttgccttccgtagtttttttttatcctctggtgctgtatgaaaggtcagtggatattctttcaggggcatgagacagtgtccggcactctcagtccagtgcgagtggatcaggattcaggcaaacatagaccgacgatcggactttatgtgttttcaggactgccagacttgtaaattctgaaagtttcagtgaattttttttatagtttaaattttatataggcctaccctccgtataaaaaaattgagaactttttttacgtgatattggaagatgtttg

SEQ ID NO: 30686 - DNA, 2369 bp, Zea Mays
gccctttaaagaggcccaaatgaaagaaaataacatgtgaagggcaaaaaaaatctaaagagccagactctgcccaatccgtaatccaggatgaaatggctgcgccccagcacgtccgcgccgctcccctcgcacgcgcgctccgcgctaccgccaccgccaccgccaccgccaccgcctccgtccccgtacccgttcccgtccccgccggcatcaagtctcaggggacttcccgccgcgcactgctcggcctatcggagcctcagctccgccagcttgccatcgatctcggccagcaaagctaccggggcaagcagctgcacgacctcctctacaaatcaagagccaagcaaatccaagaattcaaccacgtgcccaaggcgttccgggaggcgttgcttggcgctgggtggagtgttggccggtcgccagtgcaccacgccgtcacagcctcggatggcactaccaagatacttctcaagttggaggataaccggttgatcgagacagtggggattcctgtcgatgatgacaacaaaggctcttctaggctcactgcctgtgtttcatcacaggtcggctgcccccttcgttgctcattttgtgccacggggaagggagggtttgcaaggaaccttcaaccacatgagattgttgaacaggtgttggccatcgaggagacgttcaaacacagggtgacaaatgttgtgttcatggggatgggtgagcccatgatgaacctcaagtcagttctagaagcacaccaatgcttcaataaggaactaaaaattgggcaaaggatgatgacaatatctacagttggtgttccaaatacaataaaaatgctagcatctcacaagcttcagtcaacgctggcagtcagcaacacataataaggaaccaagaagcagatgcagcatttccccccctgtaatttgttgctgacaagtctgtcgtatttgaaatcagtctgcatgccccaaatcagaagctgcgggagacgattgttcctagcgccaagtcttaccccttgggagcactaatggatgactgcaagagttacttccttgaaactgggcgcagggtatccttcgagtacactctgctagctgggattaacgatgaaaaggagcatgccgaagagctagcagaactacttcgtatgtgtggaggtggttaccatgtgaacctgattccctataacccaattgaaggctccgagtacaagagaccttacagaaaagtggtccaagcctttgttgatgctttagaagcacgcaagataaccgttagcgttcgacggacccgtgggcttgacgctaacgcagcctgtgggcagctgaggaatgagtttcagaagaatccactacttgagattgaaccgtcaccctccacagagcggaccctcgtagctgcttaattgaaacacctatcaggttgatgcagcatgttcaagcatacggaatcgtcatttaatttatggggacattaggtgttgtaaagtgacagcaagttatgcataacgctagagaattttggaacgttctgtccgtgcccatctgatgtcatgagtggcaattacggaattaccacacttgtctcagatattataaacccatctttgttacagaaagtcaccagaaatgaactcctactgtccatgatctgttgcattcacaacattgacactggccttttaaactgaacgcttatgattcatgaagctactctgtttctgtttggagaccctgggcaaacaacatcaaatcttctccccccgccggtggagctgctgcagagacgagggatgagaagcacagcaggagcaggtctgaggtctctcgtcattgatatatgcaaagccatccagggcaatctcttgggcgagaggaggctcagccgttggttgctgcggggtcgcgactcttggggcggacggccatggctttttttttctcgggcacatgagagctttttttttccctgggcacatgggtggcgatctagttttgcttcggtactgtggtttcgtactttagttggctgcgagaagccgaaagttttgtaccaaggctttgtatcctcttgatgtaatgtacttggtaactttaatataagctttctttataaaaaaaaatccagggcaatctcacctcaggctccgctgaaaaaggattagctcgtctcaagagaaaagaggatgactaccagcttactgcaataaccacactaactactaccaggaaccaagctctgatggcttccctgcaaagtagatgcatgtttcgttcgttgccgtcttttaaactctctttaagttccatttgtgttttaaaaaatatggctaagtatccattagggtgttcaaa

SEQ ID NO: 30687 - DNA, 2280 bp, Zea Mays
atctttataggcgtttcattttcttaatctggtaattgtgcatcaaagctggcgttactatcgggcactttatctacagactatcctggtgatatgattgatgtgcttttgaacctagattctggagttgtcgtagattattcgatgcttctgtggatgacccggacacttattcttgatcctccgcagacttttctgggttcctaggatttcccttacttttatgattgaacagctcgtgacttcactatcacttggtgcttcttgtgtgcatgtttctttgtaaaatagatagcttatattctctacatatttggtggaggaattaccttttcggcgtgtttgtgactttgttctctggtcatggctctggccttctaggcatgcaaacgagttttacagataccacgtagcaggcagtgtcctggcctcctggcctcctggccctggggcacctttctctccctgaaactaaagggagagagagtactatgagaaacaatttgccacattgaggtcctttgaggaagttgactcactagaagaatccaatgaaatcaacgaggatgaggagcttgcggagcaaatccagagtgaatttgctatgaagatatcaaattatgcaaacattgttctcttagcgttgaaggtatacgctacaataaaaagtggatcaattgctatagctgcctcaacactggattcactgcttgatctcatggctggtggtatcctttggttcacacatctgtcaatgaagagcatcaatgtctacaagtaccccattggcaaactgagggtacagcctgtaggcattatcatcttcgctgctgtcatggccactttaggcttccaagtatttattcaggctgttgaaaagctggtagtgaatgaggctccagataaactgaaccaagtgcaattattgtggctatattcaatcatgatctttgcaacaatagtgaaattaggtctgtggctctactgccgaacgtctggtaacaagattgtccgtgcttatgctaaggatcactatttcgatgttgtcacaaatgttgtgggtttggctgctgctgtccttggtgatagattctactggtggattgacccaattggtgcaattgttcttgcagtgtacacgatttcaaactggtctggaacagtgtgggaaaatgcaggaagtgagcctagctcaactggttaggttggaggtgtggtcgtacacccaaccaaccaggttcaagtcttctccagcttgaatttaggtgcctactttctctattttctctttgttgataatgaaaaaccacctactttctcttagctactataaatggattatttttaaccttgaagtggtgctaccgttacaaataaaagttacttgagccaaatgcttgctctggaatcacttcggactatcacctagagcagttgccacatgcagcaccaagattacttgcacgttacaaattggctaggactgacagacaaccttgttattgctatcctccatgtagtatcgctggtaggtgaatcagctcctccagaaatgcttcagaagttgacatatctggctatcagacaccatcctcagattaagcgtgttgacaccgttcgagcatacacctttggggtgctttactttgttgaggttgacattgagcttccagaggacttgccacttaaggaggcacacgccattggagaatctctccaaatcaagattgaggagctacctgaagttgagcgagcattcgttcacctagatttcgaatgtgaccataagccggagcattcaattctcaacaagcttcccagcagccagccttgatccgaacgaatcctgtgtggtagattgtcgtgcagaatctgctgcagttcttgcattggcgtcttgtgctgtatgacaaaactaagagttcaattagttttgtggcggtgagtttaagatcaggcgcatctaagactacgagagatgaaggtgccgaatgcagagatttctcgagtgtggaaccctttgtggttctgttggtatggtcttcgttttgagcgaaattaagcattttgctgttggcatcatggcatgtgattggcggcgatctagctgtgtgctatcgactacggtgatgtttagacatggtttcgagaaagagagtagatccttgatttctttaagcaaatctcagtgcctttttattttagggctagtttgatatcagtttctaagtgatttctattttttttattttttagaaaataaagtaattttacttgaaa

SEQ ID NO: 30688 - DNA, 1952 bp, Zea Mays
gcaggctcacctcgctcaccgacacctgggccctaaccccggcaactcgtgctcgccacccgattggccggtataaagccggtagcgcgtcgcgtgagccacacgcgcacggcgcacacatatcccttccttcactggctcactgcggtcccggcaaaagtcagtcaactcagccaacaagcgctgctgctcgggcacgggtggtttgggaggccggacgcaacgtcgggatgcagtcgctgcaggacaaggcgtcggagtggagcggggtggcggccgccgatgcctttgccatcgacgacgtcaacatattcgagtacctcggcggcactccgcagccattcgtcgacctctccaccaatttctacaccagggtttatgaggacgaagaggagtggtttcgggagatattcggggggtcgaagaaggaggatgccatccagaaccagtatgagttcctgatccagcgcatgggcggcccacctctattctcccagaggagagatggtctgcccaaaatgattgaagaaacgagtatcttcatgtgcgatgccactattgtttctgggccattttagttgtggctatcattatgacaccctgcccttataggacgacaccgaccattcttggttacccaccgagctgcagagcggtggctacaccacatgcaacaagctttggacgcaactgaaagcatagatgtggactcaaaaacgaaaatgatgaacttctttaggcacactgcttacttccttgttgctggcaatgagatgacaaggcaacagggccatggagtagcctgcaaacatgcaacaagtaaaccagctgagtaaccattttagccgtggagctggtaaccattggaataattactgataagccttttatccagtgtgcctttatagcattccgtatacaatggagttgaaacaacctccacattcaaagaaacaatggtactgactctttgtaggctttatagccattcttgagcagagagtgtactcaaagtggatagttgtagcttctgccaatatgtttatccttcttcgtctcttgtgctcaagagttattcacagcagtttttcaaatttgacctcaccctagcaaggttaccacaccacatgttaaccatgccacacttatttaaggtcatatttgtttaattttcataagtttgggagccaaagaaagtcattgcctatttaggtcgctgccgagtagagcctagctggctggcagggacatgcggaaaacttatttggttcattgaatcaaaaagatcaggctgagtggagcgtttgtttgtttggttgtactaggatatgttgaatcaaactgaaagaggaaacaatcactaagataatttttattttgcctgaatcgattgtataatacatattttcaccatattgaggcttaatttactttgaaatatatcagtatgccttaaattatgctaatcatatactaatactgttgacactttttcggagcgccaaatactcaagaagaaccggcggcggtgctctctggtcaggcgcggacggtccgcggcctggggccggacggtccgcgacctggcgcaggggctaaggtttcctgcctgacggccggacggtccgcgccctggggccggacggtccgcgcgtgcgcagtggcggcggaagatcgccggcggcgcctggatctcgctcccggggagggaccccgtcggggaggagagatcctaggggttgtctaggctcgggccggccgacctagactcctctaatcgacgtagagtcgaggagaggcggagaatttggggatcgagaggctaaactagaactagactagaactactcctaattgtactggaaataaatgcgaatagaagttgtattgattcgattgatgattacaaatcggccgtagacctctctttttatagaggaggggggctggac

SEQ ID NO: 30689 - DNA, 1596 bp, Zea Mays
aaacgatctccggggaatattttattccgtgggattccgatgcggccagtcctcctcccctctctcctgtttcttctagtagtacaaataaagaagaagaagctgagctgctcgaggcacggcgagggagacacaaggcgagtgtccctactccgagggcagtctcggtgtgcaagcgcatagcatagcaggagccacaagaaaaaaggcccatggcttccttctcaccgagtggccggatgacacggacggcggcatcttctctggcagcgcgcgtggtcctcgcgctcctcctcctcatcggggtatccggttccggagccacccaggcagcgtctccccacacccaccacagtcggcagctggatgtgaaccacaagaagccagtgcagacgtttcggcccatcaacattgcccaccgagggtcaaatggcgaactgcccgaagagacagcggccgcctacctgagggcgatcgaagaaggcgcggacttcatcgagacggacgtactcgcgtccaaggacgggcatctcgtctgcttccacgatgtgacgctggacgcgaccaccgacgtcgcggaccacgcggagttcgctggcaggaagaggacctacgaggtccaaggagaagatgtcaccggatggttcatcgtggacttcactcttgaagagctcagatcactgagggtgaagcagcggttcagtttcagggaccagcggtacaacggaccgtcgggatctacccggagatcaagaaccccgtgttcatcaaccagcacgtgaagtggtcggacggaaagcgattcgaggacaagttcgtggagacgctgctcaggtacggctacggaggcgagtacatgtccgatggctggctccggcagccgctgttcatccagtccttcgcgccgacctcgctcatctacgtctccaacatgacggactcccccaagctgctcctgatcgacgacacgacggtcccgacgcaggacaccaaccagtcgtaccacgagataacctcggacgcctacctcgcgttcatcgggagctacgtggtggggatcgggccgtggaaggacacgctggtgcctccggacccgacagacaaccgcctgggacgccccgccgacctcgtcgcgcgagcgcacgctctgcgtctccaggtgcacccgtacaccttcaggaacgagaaccagtacctgcacttcgacttccggcaggacccctacgccgagtacgcgtactggctcgacgaggtcgccgtcgacgggctgttcaccgatttcactggtagtctgcacaagtaccaggagtggactaggccgtaccggaaggagcaggagaagacgagcccggaggcactcttgcgcgagatcgcgggcatgctcaagaacgacggctatgactgatgacttaggttgccttcagttttccccgtctgtcactctctctgtaatggttaactaaataataaagcgacggtttcatggatgcatcatctggacgtgggtgtatcattaccagacactgaattttcagtaacgctctttaaaacatcagtggagtatctcgtttccttgggaacgggggatgttgccaa

SEQ ID NO: 30690 - DNA, 889 bp, Zea Mays
ccttgattcaagacaatgatgtgtaattgcaagaggtgtccaaggatatcaagtatgctgacaatcaaccaatagtgctttggggaccaagattctccagatcaacagtgaaggacatgcgcataaatatggcaatatcagcagcatttttcctatgttttgctttcttctgcagaatactacagaagctaagagctactgaaccactaataactccaatatacaatgaatatggcgaggttgaaggacgaggaataagaatggcaaaaagagtagtccgtgctctgggtttgatttttggatgtgtgttcactgcatccctggcttatacagcagctagtaacatggttgagctttcattgcagtatactccccgtatgttttactactatcaggagctgattgttactgtggctgcctccgttcttctgtacatcacggcttcatggtaccgataaacacgacaaacaattatggcctggcttagatgattgcgagatgttaggacatgccttgagtttcagatagagaccaacctgtggtgccttccgcatctaagggatagccaagaacccgcaaattctgtagcattcttccagctttgaggcaggtagttcttagtggaggatcatgtgaccagctatggattcagtagtacaatgaagatggccaatggatgaaaattgtttcgcgagaatatttgaacagcggtgttgtccatgcaatttttaattagatcttggacatatgcttagacgacatacttaactgtgatgtgcatgtgcttttttttgcctgaatgagtgctgagcttcttctgtgttaggctgcctctcgggagctcccatttgtcggacacccatgagcatgagtagctgcactagttaag

SEQ ID NO: 30691 - DNA, 1572 bp, Zea Mays
ccgcgagcgcccgcaactagctgccagccgcgcgcccgccgctacctgctcgcatccagcgccccgccgccacccctcgcggtgatctatgtgggcgacgtccacggctacatcacgaagctggagagcctctgttccaacctctaggccgcactccccgccgacgccttggccaccgcgctggtcatcttcctcggcgactacaacgaccgcggcccgcacacccgcagggttctcaactttctcctcgcgctcccgacgcgctacccagcgcagcgccatgtcttcctctgcggcaaccatgacctcgccttcgtggcgttcgttggggcgctgccgctgccgcccaacggctccctgttctttggccacctgcgcagcgccatctctctgtcctccctctctcgctcatcctcccccaccgccctgcttatttacgcccatttcttaagagaggatttgatagcctgtcagaataaaagagctcgaggaaattgcggcggccggaaattctggtcatggtgccacacaaacacgataatctgcttcatcctcgacggaattgccgtcggggtcgggcgattcttcggaggacaagcgcctctgtttcgttgagctagctaggtccatggggattagtcaggacactcatgagtcgatggcaacagatgcagccaattacctttgccaccagcttcagcatcttcttgggcctatctcttctgcgacgagccaaagtggcccctgggaggagaggtcggcgatggttaggttgactcagaagctgcagaaatctaagagaaataagcggtggcggcagaggagaaggaagcatgttgaagagctttttcagaaggagcgtgcggattatgatagagttgaccaggaagctgatgaatggagggctaagcaaatagccaaggacattgcaaaacagagggtggaaagcatgcagcagattgctagaaagaaaacaaatgtggaaagaaagcgcctagaatctgagctggagcttgccctaatggtcgagaaacttcaggagcttcggtctataagagttcaaaaaatgaagaaacaagatccatacttgaacacagatgcaagtacaatgtccccctttgagcatgcctcgatggtatctacctagcatgtggtatttgtaggttgacttggatttagagaattatgagtgtttcatagatgttactctgacgagggataacaatattaccactagaaatatatactagtctgtcattgagaaggagagaaggggtgattatattggaaagactttatagcttttgcagagagcgggccgggcgctctagctagcgtggcaacacctggaaggccttggagctagccgttgcatgtggaagcgtagctcctgttgtactttgcttttgcacgctgtctgtgcatgggtcggctcatgtcaaatctctgccctagatgcacgttgcaacaacacgctttttcctgtatggactacagctacagcaagcacagacagacagcaccagcagcagtatgcagttcatggtagatttatagacatttttcgtatca

SEQ ID NO: 30692 - DNA, 2487 bp, Zea Mays
cccgcatacgcccacagccgccccacgcgcgcatcccgcagccgcgcgatccgtccgcttcctcctccccgcgcccgcagcccccgccgccgatgccagccgccgcgcccgcgcaagggaagttgcttcccaaatcccgcagacaagatttaatcccgtgattcttcccatccatggcagccgtgcccgcaaaccgcgcctccccacgactcccacttccatggcgtcgcccccttccatccatggcagtcacgctccctctgcgcccttccatccatggctgcggctccctccgcgccgcaattcttcccatcctctccttccgcgcggtttgcggctaccaatcctctccctctgcgtcgtgttcttcccatcctctccctccgcgccggatctcgccccatgtccaccaacgccggtgtccgtgatggcgcgctcggggcagcggtggacgcagcctttgccaggcgtgtgctccaggccgaggccctcctcgggtacctctccgcgctggccaccagcccgcgtgccgagggcgacagggtggaccccgccgtcgccgcggcgcagctcggggcgctcggccggtggaagggctcggcgaggggccttcccgagtacacggtcgtccacggcatcgatggtgccgtcgtcgccgcccctgggagagccaaagccaagcagaggaggccgcagtcgaccggatttgggaatcctgctcctgccaaacgggatgaacggaaggaagcaaaatctttctggggttgatttggcttgaaggaagcgggatctttctggacaatggctgtctagcttcatccattctggtacagagggatggagtcttgtaagaaggtagctgcaagcttgaagtcgtgtgagccatgggggaacagggcatcctggacaaacgccgttgggccaggttggaagttgagctttgctgttgagccatggactaagggctttagcgcgtcgtgtgcggcgccatattctgctggagccacagagcatcaattatcgctcgatgagaaggtggataactccaccgttgcatctggttttgatgggtaaagttatctatcagctagattcatggcaggaaaggttttttctattgtcggtatccagcacctaatggcaattctgtgaagcccaaaggttccaagtcaccatgaaaaaattgaaatgacgagatctcttaatctaattgttgcaccttggaaggtctgaaccatcatagtttaattgtatcacccatttacacaagttcctaccatcagagttcaactgtatcacccatccataagcaattccttttgttgaaatttatgagaagacatatgcctctgttaagtctcaggaacttttttgctgggaagccaattccttactgatctgagggacaacatttttgtttgcctgatataaggtaaagtgtgaaagggaaacgcgaaaagaaacgtgtcctggtcccaagtcacctgccatactgaacacgattgatcgcagaaagaaacacgttctggtctagactgacagttttggagctggagccggccatgcgctcgatcagagttccgctgcagccacgacctctctcccgaacgcgcacgaggagaccaggtggaacatatgcaagcaggttctagagcaataaccccatgaatccagatcgggggtctgcatctacacgggcgtgtactccgcaccgctcccctccggccccgaccgccgtgtgctcgttgtagccggggtcgacctcaaccacgacgacgatgcggtctcctcgccccaggctcgacctcctcgctgacctcgccctgctccacctcaactcgcgatgaggattgtcggcacgttcacaccgcgccgttgcagaacgttggagcctctcagaactctagaagctgcctaccaccacgcaccctaagataggggcatatctgtaaatattgtactctcaaatggtgggttgctgcgtcatgggagtttgggtgaaggcctgaaggatgtgatgcaaaacgtcgatgtctgggatgtccgcctcattatggatcaaaattcatgacgttctaaaggtgtcggatgagtacctatatactccctcccagaaaacaaggcgcctcattacactattggaagctggacgacatggatgactctggcaagatgcggtgggagcacgacgacatggatgactccgaccatgagttcgacaggaagcctagcaacagtacgcagtagcaaggttgaccagaggggcagtggagactaacccaacaccccctcctccgaccgtcatagcgcttctttcctctggcttcatttcttacctattgacatgaaggagattgtcatgctgccaaagcacatcaaggacaatgcaaacaaggacagaggaagaccggacatgccatttccagagaacttctcaagggcccgctgtattatgcctgtgctataactctgacaacaatagttttc

SEQ ID NO: 30693 - DNA, 2195 bp, Zea Mays
catattatgcatcttttcttgtcaggtgcaagtcccttgaataatgacattctgttggactgacaaagcgtcgatattagacgagacgattgagtatctgaagtccctccaaatgcaagttcagatcatgtggatgacttctgggatggcgccaatgatgtttcctggtgttcaccaattcattccacagatggctctaggaatgaatccaggttgcatccctgcagcacagggcctaagtcagatgccaagattaccatacatgaaccacaccctgccaaaccatatccatctgaactcgtctccagctatgaatctaatgaatccactgaacgccgcgaaccaggtgcaaatcggtcacctcagggatgcaagtagccacttgcttcacctagatggcgggcgagcagcagtggtacctcaggtaccaggaccaggaccccatgttcatggacatcaaatagcacaagccgaagaacacaataagatactggaagtggcagctagtactgttataccaacttctaaggcagggcaaccaccaactttacatagagtttagagtgaccaaaatcatgccttgagctgtatatctgtacagaagtgtcagaagcatattctttgacatgtaagcttagttctagagttattatcaggagtcttgtataggttacaagataacagcctgtctaccgccgtattctatctacggaagaactcagctgcatactgctgtgcagactgcagtacagcgttcaagagagaattgaatgggatcaagaaagggtctttctttttctgggaaccgctgaaaatactgacgtgatgaggagcggatggcatctctgtagctgcgctgcgctgcagtgtatctacatcaatatggcaatgcttgtctggacacgaatgctacatctacatgtaaatgcagagttgcaggtagatagcaacccctctcccctgagatgccaactccgactcctgtcctactgtatgtactgatctgtacagcaagcaatattcaatcagcagtcaattcctaggatgtcgtaaggtactgtggaaacatttttccttcgaatactgttatactaatgaaaaaagggagtgtcgaaatgtttgttgtcaactgacgaaaatccagccagcaggcccgtcctacctgcagacagaatggataacaagcttatgaatccgaagtgcatatttatatcgcatatcatatattaatcaatcctgtctttctgcctgctcctatttgtaggtcacgacaatgatcctatctaagtacataagtcgctaacaccatttcctgcttgtggaaaggtttggtcttgcaggagatgagctcgccagacagtccatcacactgccggcttgattgcatcttcacaggacgtggacttgtgggcacatgctccacgggcaacggttcggcatcctcctggcgttcttgtggctggcagcagccgcgagaatctgtgtggagccctgggctgggctcgttgcaagatatgccagcctctcatcttcagactggaggaggaggggggggttccctctccaggctttttccatgatgttacaggcttacagcattcagagtgcatgttacactcacggccctatcagcacatgctgtgggcagccggtgatgataggatcagatgctcatatctcctgcggttttctgtctaccgcatttggattggatttggaccccccctgtactgtacttcctccttgctcccctgctgcttggcgctttgtccatgtgcctggttggaattgctactatacatttttggagggtaattgtttcaccggaacatgtagcgtggacgtgtggtaataacaattgaattgatgcctttactgtctgagtaataacaaagggaagcgatgagcagcacatggtaagcttccggtgccggttggaggcttcgatgtcgatgtctgcattgagtttatttgatgctgtgtgttctatagctagactaggctagagtttggatagagttcatgggacaatgttgtctgcatcttcatctcccctttagtttaggacttatctgagaggtacggttctttgcatgacagaacaaaactagcagcagcaaaaaaaaaaaaaaaaggaaacaacgacaaaatataaaaaattggcttcgcccgggttcgaaccggagaccttcagt

SEQ ID NO: 30694 - DNA, 2346 bp, Zea Mays
caaaccgcgccccctgtcctcgccctcgacggcgctgccctttgtgatggtgcccttccttccccagctcccccaaatgctgccaagtcccccaccaacgccgcccttccttccccggcagcccgcccccactagctccgcgctccgcgtgccccaccagccacgctagctgccgccgggatactcaccacctccgcgcccccaccaaaccgaaaggcgagatccgccgccagttccacgctccgcgcgtcaagagcagccatcacagtgatgccgcgcgagggagaggaaggaaggccgcgtgagtcgccgcagggaaagctgccaggcatcaccgtaaggtgagatccggttgcgcgtgagggagaggaaggaaggccgcgtgagtcgccgccgagaaagccacagggaaagccgccagtgtgagtcgccgccgggaaagccgccagtgtatgatggttcggtcatccagatgtgggtggcgtacaacgttgtcactcatttcctcctgcactgtaccgactgcaaggcgcaagctcactggcgtgttcgacctcctgaagattatgctatacaaggtgtgcgcaaatggctcatcggcgcttcccgattgggagatggaggccagcatcatggagttctacgctgttgcatcttctaagtggcatcaccgagctggacgacaggaaacagagaaaattgtgcctgaaaaaatttaggagcagggatgagcatttatcagaagtggacacaaagagggagcttgagtgtgggctctgcatgcggtgctttgagtattggtaatagctcttttctcctagcttaaaatcatgcataaagtttgattttttgtaggctccacatttaaacaaatttggtcatgttagcttatggatggcataaaagtactatttctcatgggttctgaagcagaattatagtcaagtacttctcgtgttgaaactatggactgggaaacatgacaaatttgcttttagtaaaattacgaagtgttgtcttttttaaaaatattggtgtcatgtttttttaatgaagcagtttcaatgtatgtggtcggtttggagcatttttaggagacatgatatgtgggatagaaaagctgatggagataacctaaacatagacaaacagccacatacctccagcatggacattccagtagtaattgaagaagctgccaacaaatacaaagcaccatatctctgcaggacaaatcaagataatacactgctaaaataagttgtattagaccattaaagtatgagcatttagctaagagttgccctgtgttttttgttttacccatgataactgtcagtacaagtgtacaacaaattttatagtagtactttggaggacaaaactggtgctggtcattttagatattcgtgcctctcaaataccttaagatggcttgaattcttattgttcatatacattatcgtttttaggcacacaataatgaacctctacagattgtttgtggttatcatgctcttcctcaaccacctcatggtggtgaacttgtattccacacccttgaacatgtccaacctctgaaatactcctggcctggattacccttgttgggttttgtagaggcgatttgaacatttaaagtagatacttgacctatcatgactctagcctgcagtatcattcctccatttctctaatcttgaaacttagaatatagatcaatttacatttggcgactgcagaagaagctcaacactcaagaccttttcttatgatataatattgacaaccaagattttcttctatctttatttttttgctgtttgtgaaattccacagataagacctgtatgctctggcgtgagttatttttctcaatcaacaggaagaagtgaagtgagagatttcattagttcttgaaccaaccaaacatttttgaactgtaaatacagtagggcactgtaacaaaagtttattagaactaaagaaacaccaatattttagctactttaaggcaggtccattcaaaaagttttgtttctcaccctgctcaggctttgtacagtcttttttttgtttgctgacgccttcctaggaaaggggatcttctgcgacgatagcgatgaagacgaagacagtgaccagggcaatgaaaagcaggagacacatttccataccattgttaactgcatcacagagtctctgaagacacaaattattggtagaacttatgatgaagtcgcaatatgtctctttaacactttattagttattgtcaatgctaaccatttcacttattaagtgataattttgcacatatattagtattactcaagacgatattat

SEQ ID NO: 30695 - DNA, 6835 bp, Zea Mays
gggaagagagagaatcgcaggaccaaaccctaaacccccgctcccgcctcctctcgctgctgcagcttgccgggagctcacgcggcctttgcttctcgcttctttcgctggccacctgatcccggttgttcttcgctgggctcccgagccgctgcactcgctgggtgctgccgcctgccaggaggagcggcacggccgtctacaggattaaagggagggaaggtttgtggtttaagttcccggaggaagacttgtggcggaactgtactgacttcagattgaagtcaaggagctaatttgggggaagaatgtcttcaaagtggcggtcactgcagcatcggcaccggtacacctacacctccattgtgttcccgaagcattaccttgaggccctaactctcgtgccagctgagatctcctcatccaatttctttgtccgattgagcaacttgatttccctgacctccacttactcccaagttgttgtggtcaaggatcttgcctcggcatatgtgcagtttctgtccactacagggactcctgatgaagcagtgctcgctgccacaaagctttatttggagatcctctttcttgagaattccctccctctccaccggacactcatatcagtgcttgccaagtgcaagaaattctccacagtgatcagtgggtgttttgccttgctctgtgaggagtatggtggctctggtagtaaggcaaagaagagatttatggtatctcgagcagccttgtcgcttattgggtacccaaagttgggatttttggatgaggcagtagagaggtgtgcagagatcatggcactggatgttgttgatgggcttgatggagtgacaaaagacattggtgaagggtcacggccatctccagtcgtgatggagcagtgccaggaggccatgtcttgcatgtactacttgctgcagaggtacccgtataagtttattggccttgacaaggcgtcaagtgtcttcaagagtgctgtcaggacaatactatctgttcttaagtcatctgccttttcaagggattgcctggtggcctctggagtaagcttctgtgcggcaattcaggttttcatgagcacagaggagatttcctggttcatttctcaaggtctatttggcatctatgcaaatcatgaagatagaaaaaatcagtctgtgcacaatgtattttcggactttgatctgtgtgaacaaatcagagacctttcagtgttgagtagactttgtctactaagagggattttgacatctattccaaggacagtactcaacatgcaccaacttcattccagtggacctttatggactgttttatatgatggaattttacctgagctttgcaagcattgtgagaacccagttgatagccacttcaatttccatgctcttacagtgacacaaatatgtttgcagcagataaagacatcggtttcatctgatatcaccgacttctctggggactataagcctttttcaagagatgttgtcaaccgtatattgggaatcatatggcgcaacctggaagatcctttgagtcagacagtaaaacagaaacagcttatgcgtacatagatgatgatgtttgttgtgctgtcaccacatttttaaaatccttcctggagactttaagaggtgaatgttggaatgacgatggtgttgagctaggatatgatgccttcagagctttgtgcttgcctcctttcatgcggggacttgtatctggaaattcaaaactacgttctaacttaaatacttatgctttacctgctctaattgaagttgatgcagagagcatattcacaatgcttggattcatctccattggccctagcacaaatgaaactaaactagatgttgttttgaaaaatgaccagtgtatagctgcactggtttctctgcttaaggtctcacggaatctggctcttgttgaaggggacattgatttagatcctgatgaattgtcacagattcagcagatggatagtaagggtgctgcagttatatctgttaaagggattaaagttacagttccttttaattggtttgctttggcactgacacacagtgatgaaagtctccgtatagatgcagctgaatccctctttctaaatccaaagacatcaagtcttccatcctccttggaactgagcttgctcaaagaagctgttccgttgaatatgcgttgtagctcaacggcatttcaaatgaaatggacaagtttatttcggaagttttttgctagggtgcgaactgcacttgacagacaggtaaaacaggggtcttggattccatcattaacgtctagtgttaaaggggctggctctattgatacttctaaggccactgttgtcaagagggctgaagatctcttccaattcatgaagtggctgagttcctttctgtttaattcttgttacccctctggcccttatgaaaggaaaacaattgcaatggagctcattcttacactactagatgtatggcctatttgccgctctgaagggaaaattgatctttatccttacaatgatagcataatattgccagactcaacaatttcatttgttgggtctataattgatagttgggacagattaagggaaaactcttttcgcattctactgcagttcccaacaccgcttcctgggatttccttgagtacatccataaatgatgttatcagatgggcaaaaaaacttgttctaagcccacgtgtccgggaaagtgatgctggtgctttaaccttccgccttatatttaggaagtatgttttgcagcttggatgtattcttgtattttctaaagaaagtgattgccttgaatgttatacacaatctatgaatggagatacagaagttactagtcaaaacccagttgcacagtatatatcttcactcattcaatggctctgtattgttgtcgaagagggtgagagggatctctctgaagcatgtaagaagagctttgttcatggagttcttcttactctgcgctacacatttgatgagatggattggaactctgaggtagtacaatcatgtatttctgaaatgaggtacctggtagaaaaactgcttcaactcataatgcgtgtaacttcggtggccctatgggtggtttcttcagacgcattgtctctgccatatgacatggatgacatgattgatgatggttccttcctctcagatatatatgatgatcaacctactaccacttcagaaagagaggagaagaatgcaaaaccagggagtaatggcaaaccagccgaacaagttgttatggttggttgctggcttgctatgaaggaggtcagtttactttttggaaccatcatcaggaagataccattgcctggctgttctcattcagcttcatctcagaatggcttgcctgacagtattgaagagacaagtatatctgaagaaattcttgatgtggggcagttaaagatgatgggtgaccattttttacaggttcttcttaaaatgaagcataacggtgcaatagataaaacaagggctgggtttactgccctttgcaaccggcttctttgctcaaatgattcaaggctgtgcaaaatgacagagtcatggatggtgctactaatggataggacaattgctaaagggcaaactgtggatgatttgataaggaggagtgcaggaattcctgctgcatttatcgccctgttcctggcagagccagaaggaacaccaaagaaactacttccaagggcattagaatggctgatagagtttgctaagaactctttagctaatttccagaaagactccaaccagaggtctggagtaatgaaagagctgttggaatcacagtcagaaactacaagtgtatattctaatggtaacctatctaaaggtcgagatgagggtgttgttcccactgtgcatgtgttcaatgtgcttaaagctgctttcaatgatgcaaatctggcaaccgacacttcgggtttcagtgctgaagcaacaatagttgctatacgagcattttcatctccctactgggaagtgcgcaatgcagcttgccttgcgtatactgcactagttcgtcgcatggttgggtttctgaatgtgcagaagcgtgaatcagcacgacgatctttaactggccttgaattcttccacaggtatccagcccttcatcctttcctttctagtgaactgcaaaccacaactgaacaactagctgatggagtgtccagcaatttggagtcacacattacaaaagcaatacaccctagcctgtgtccgattcttattcttttatcaagacttaagccttcacctataagctgtggaactgatgattctttggacccttttttgcttttgcctttcatccaaagatgtgctacccagagtaactaccgggtccgtatccttgcatcaagggcattaacttgtttggtatctaacgagagattgcagtacgttattagtgatatactggataatttacctcgtggaagtcacaaagcaatggctcacagtgttcagcatactgatcctgccatatcagctaatatgggaaaagcaaatgtacttctgctgtctaagtcattcaattcaatacatggccttttgctgcagctggcttctcttctggataacaactttagaggtttgacagacggtagcatgaaggatcagattattggcctattactggaggttctttcaagatgctcttggcttggctgcacgaaattatgctcatgccctatcgtaattacatcttacttgcgggtattggatctcatgcttgatgttgcaaggacagggaaaagcagacatactgaagtcattcaggcattgctgctagagttaacttcccagtgcttgagcaacacagcatcaacccagtacgcattccatgatccaacccgtattgaactaaaacaacaagcaactgaatcatttttgagctgtgttggtctttctaagaaaaccgatgaaactaacgatgatgatgtgcagttgcaaatactcggtgaaccaactttagagatgcctagagtggattactcccttcatgaagtacacaaggagatcctgtcatgtctcactgatccttcatatgatgttagaattacggtgctgaagaggattctttggctcacaaaatcaatcagacatggttatgcagataacattttgcaccagtgggcaggagttaatctgcagcctgctttaatggaacggttgtttgtggaagaacaccctaagtgcctttattataatctgaagatcatcttttcatggaacatggaattcccattcaacaatggagaagattctagcacacttttgtccttgtgggataggttagttcatttaaacagcaccatgtcacatgcaaaaacgagagaaatagttctatgttgcatgggtatgtgcatgaaattgttcactaaacaatctaggggtggtatttcaatggattgtcttaagaccagtgagatctctgcatcctttgtcagaatcaatgaaggggatggattatctgatgccatgcttagattaaacttgtttgtcacacttgtcaagaaccaaagtgaaccatcagaaagcatgaatgctcgacgggctgctgctgaggcaattgttgcttctggtcttcttgaagaagcaagctacgttgcttcatctgtgtccaacatgtactctccttcagaatttgatgaagaccataccaaagagaaatgcatggaagatagcgtttttgaatttgttagtctttatacatgcaagatacttgacttgtggtttgtatgtattcagttgctggaggatgaggatgcatatctgaggcaaaaacttgcgaaggatattcagaaaataatcgctaagggttcagctaataccttctgtgatgattccacaccactacaagttgatagagtcattgaattaagcttggactatttaacttctttgtttggcctctggctgaaatacgttgaattcttgttaaggatagtcttgggcactggaaacgctctgaactcccgtggcgatttggtccgtcagatatttgataaagaaattgataaccaccatgaggagaagctattgatatgtcaaatctgctgttcaaacattcagaaacttctgaattcaaaatgccagatggaagcaggagcagagactaaactgttcctgcagaattggagggagatatttctaaagcagctcacatcgctgactggtggctatattgagaaagaggggaagaacgattggattggcggcataggtaaccacaaggacgtgttcatatcagtgtatgcagtcctactcggtttatacgcgctcacgcagtctggctctctggatcaattggaggaccactgtgcagtttatttgcaggaatttgcaaaccttgaaaggtctatcacaccattcctcaagaacccgttgatttctaatctttacgctctggtaaaattgtcacacgagaggttcatatcatcagataagcctgaggaccaagtgggtgattcaggatcaagttttgacccatattttcttatcagatgattttcgctaatgtactagtaattcttcattgttattcctccgttgtaagactcaatactaattgcttttttatacaaattaccatactatagattctttacttgatgccccttctctgtgtatcagtgcattttaagtgccttgggttttctagcactcaaaaaatgtatgacaaggttgtgactaacgtccgaacaactgataatgatataaatatttttccgattaacataggactacatcaagattcag

SEQ ID NO: 30696 - DNA, 1735 bp, Zea Mays
ctagaaacgacgacacattttcttacttgcatgccacatttgaggaaattgatagaaaattaaaagatgctagaggaaagatttcccaaaaaggaacttcaacttcatttgctcttatcattgacggcaatgctctgacacatgctctcacgggcagccttaagaactcatttctggatctagcagtcaactgtgcatctgttttatgttgtcgggtttcaccaaaacaaaaggcactggtcaccagattggttaaaattaggacaagtaaaactactttagctattggtgatggagcaaatgatgttggtatgctacaagaggctgacattggggttggaataagtggtgctgaaggaatgcaggctgttatggcgagtgactttgcaatagcacagtttcgttttttagagcgattacttcttgtgcatggtcattggtgttatcgtcggattgcagctatgatatgctattttttcttcaagaacatcacatttggctttacgcttttctggtttgaggctcatgctatgttctcagcacaacctgcgtacaatgattggttcatatctttctataatgttgccttcacatctcttcctgtcatcgccctcggtgtttttgacaaggatgtctcttcccatgtttgtcttgaggtcccttcattacatcaagatggcgttaataatgtattcttcagttggtcccgaatactcagttggatgttaaatgggatgtgctgttcaataattatttactttggttccctcaacgctattctggttcaggctgtccgacaggatggtcgcgttgctgggtttgatatccttggggtgaccatgtacacttgtgtagtgtggactgtgaactgccagcttgctctctacatcagctacttcacctggatacaacattttgtcatctggggcagcatactgatttggtacactttccttgtcatatatggtctattttccccagcaatatcaaccactgcatatcatgtttttgtggaagcttgtgcacctagccctttgtactggctatccactctaatgattgtggtgacagccttgatcccattctttgtctacaaaatatcgagaacactctattatccacagtatcatgatcaagttcagagggctaactcaaagaattggtagtgcctgttgtataagatgctactgaatgaggggatgtacagtcagtaatttggtttaacataccacatgctttgctttgtagatcatgatgcagaggtagtgtatataaacaaagttggctgtttaacagatcttgtatttacggtctatgcccacaaagttacagtttcaggttgtggcagtgcgtctgtcaaatatcagaacacaatggtgacttcgcagtcacgcgaaggaactgcaagcggcaaattgattctttggacctattaccccactaggacacgtttttcttcggggtgccatcatggaagcagattgcaattaggatttatatagaatgatgtatagcatgtcgataactcgaacatgacttcctcgatatatgtagtactgtcttccaaaaaatagcattcttgtagcatcaaacggccaaacctatgttcgtggaagcatagttaataccctttattgctccaatggtttgtacatagttgtatgaatatatgagatggatcttgatgttgtttaacatttgatatgaaatgaataaatgatatgatgttatctct

SEQ ID NO: 30697 - DNA, 3359 bp, Zea Mays
ggttggcctgtctgctcggcccgccgtcgtctcagctcttgtgttttctgttacggaaaaaaaaagaagaaaaaacaagccggggacgacggcggcgaggacgacgacgacgagagggacggaactggaccagcgcacgtgccgagatggcggcgctggatgacaaggccatgacggacctggagacgctggaggaggaggaagtgctgcgccggttaggcacagcggaggaggcgggcctcaccgacaacgaggccgcgcgacgcctccgtctccacggccccaacgtcgtcgtcctctcgcaccacgagggcagcatgcttcatggattcctaatggcgctcttctcgctctggggatgggatcatgtcttccccaagtacaataacatggtccgggtcatacttaactccatgtcgtgggttacagtactgactatagttgtgtctcttgctatcacctcagctggccaaagatcatgcgagctggccatcataattttcgtagtagctacatgcctcatagcatgctttactgcaatgcttgttttagagtatgctaaggctccgctggaggccaaagcccacgcaccaagggccaaggttctgagagatgggaattggagagatgtacatgcagcaaatctggtcccaggggatatcatatttctcaaagttggggacattgtcccagccaatgctcgcatactccgatttcagaaaatcgacacaatgacttgctgggccaaaaggtctgttgattgtgcgcatggcttcctcctatactatgcttggactgtttcctgtggccaaggaactgccgttgtcattgcaactggacgtggcattcccagaagtacattgcggctctacccacaacgttatgctcgacctgggcagcttaaagaaggagccatgcttactggctgcttctgtgcttccctggtacttgttggcacttttgctgagatagtcttaagatttttgttccaaaaacaaaattacagaggcatgccactcgacgcccattttatgccattgattggtggaatcccgatggcaatgcctacttttttttacctggcattggcattgggatctgtaaggctttgttttctggggattgctagccggggaacagttgcacttgaagatctagcaagtgtggatgtaatcctcttcaacatgactggtactttaacgtgtaatcagccctgttttgtacgggacaagattgagatgtttgcagatagcgttaataaagaccatgccatagttttagctgcacgggcatcaagatctcaacatgagttgtacattgaaccaattgatgcagctattctaagcctccttgatgatccggagcaggcacgactcggtgttcaagtcttagagcatcatgccagtttctttgttgcactgaaactgatgttccagactacatacatcgacgaaggcaatagattcaagtgttgcgtattcaaaggtgatcctgcaaaggttgctcatcactgtggcagcagcaaagaagttaaagagaaaataagcatgataatggatgaacttgcccttgatggatatcaggccatagctgtaggacatcaagtagactcttgttgggactttattgcccttctgccttacacagatgaccttagaagcgatagtgctgatgttgtcgatagccttatcgatctaggtttagatataagagtcctcacaggtcattctgttgtgcatatcgccatatcctgctgtcgagatttttgctattgtcattttctatgataaacatgtcttcatcatatatgtatattgttttgtcctctctacagaaagtccattgtcgaccacaaagcaggtttgtggaaagcttggaaaactaggtaccaatgtggtacctgcacatatagtgtttgagttagctcgcaataacagagaagtccattcaaacatcaacgggatttctgatctctttccaggtctatctttatcttctatgtacctcctgcaaagttttgtttttgcaagttcttgttaccattttgctatcttcatatcttagtacagaggacaaaagcgatatagtaagaagactaagaaatttcggttgtcattgtgcaatggttgggtatgaatttcttgatcatgatgccataggagagagccatattgggatttcagttgctgatgcaactgattacacaaaaagtgaatctgatcttgttttgactcagcctgcactgatgcctgtttcttcagcagtgcaaatcagtaggaagatttgtcagatgctaagaagctacactatattcaccatttcatcaactgtccatcttgtgagttcaatttatgattattttctataatccttctaaagtacaggatcctgcaggtctaactccaatcttaattgtaatgaagtttggtgtccgtgtcattttacatttatggaactttgacttgtcaaatatcctggctttcatgattacagcttgtaattactgtgagcatcagttccaaaaggacaccaccattatttgcaatatgtattttctttttttattttccttgtttctatttttattttcaggtacgtcctttgcaatgttatttgaaagggtggaattgaacaagtcaccagataaatggagagttcagaaaatcattacaagcggtgctgcttttggaagctacatagttcttactactgccattttttatagggttgcaacaactgcaaacccttttgcatgtaaattcaaacatatatcactgatgggcagtgatgaggaaatcagatctgctttgttccttcagattagcacagtaaaccaggctattgcactctttgttcattctgatggttgctgtatcataagatggcctggaccttttgtcacatttgcctttgttgtttctcaaacggtggcaacacaaaaagttgtccatggcgacttgaattttgcactaacaaagggtattggctgtgttagggccggattgatatggttgtataacttagtcctacttttggccctggttttagtttgtcgcaaatggagacacgcaaagatgactagtgaaaagttgttgacaatatgcttgcgttcagctatcctacacatagttcttacctggtttctgtacgtaatacttgatgttagggtgcaacagccagtctctagtagatagatcgaacacatagttagggctttttccttctgcagtgtcatctgtaaaactctcaagttaattaatatcttgcataatagattttgcagttggttggcccttcatgattcagaacttgcaactgtgagaccactatattattttaagttaaaactttgctgaagc

SEQ ID NO: 30698 - DNA, 1748 bp, Zea Mays
ttcgtattagaagtactggatcaattctaagtggttaatcatgataatcatgtattggcatctactctttcattagttgtattggctcgtctgtgtttgtggtctatggtgtattggtgttattgtgggccctctaatttttgagctaattgaataaccatatggctcaaggttgtggtaaggttaatgggtttctgtgttgccttgtatctatgcagccccatctaactcttgttctttgatggcataatgtttttttgggtaaatcttccaccttcctgatttgtagggagaagggattacagagatcatgagtttagactcaggcctgatagaagacactcaccccatgggaggtattcccctgaaagagatatcaggcgtcgttcatttcatgataagagaccaagttctgaagataggggatctagtcattcaagatcacctattaggaagagtgagagaaaacatagtaaaagtcctgatggtggagaaaccgattcatccgtaagtgttcgaagtcctgataacgaagacagaggaaaagatgaaaggtacttaagcagtgatgagaaaaatggtcatgaagatcaactgaaacaaatgcatctggacatggaagcattgcgtgaagacaaatcaaagctggagatgatattagagaagaagactgatgaagagcacaaactttgtagcagagtagaagatcttgaattgcaattgaacaaagagaaagaagattgccaaaggatgtcctccaaaaccaaaaagctaatcaaagcacatgggcgttatataaaagcacaggaggatttaaagaggtctcaggctcgctttgagaggctagcagatttgcttgcttcagatattttgaagccttgtaccaaggagcagggttccatagggattactgccaatgaagatccatataatgctaatgaaatgagcccaagtgaccaaagacaaaaccatgtttcagcatcgagaaaaagacttatttccctcccaacaagtgaagaagcaaaaactgagacagagagagaatggtgatgatatgatcccaacatcagagaactatagacctgaagatgccctagaacatctccaagatagcaagggaactgatctaccagaatcatttacagtgaagaagttaagggagggtgacaacgatgatgtaggaaacattgtctcttcaagcaatatttttgcggataggtacacgggcgatgatgaggaagttgatgttgattagtgagcggatgctgtcggtggttgataatgatttgagctgtaggaagctatctcaacagacgacatggatgccagcttctaaaactacttttatgccttttgcattgggtaataggggctggtatatctggtagagctatttatgtgcttagacttgagttgtgatgctgtcaaacatatctatacttctttttcttttgtgtctcctggggctcgaagaggatactaatctgtgctcgcctcatgtattattcttagccagtatgagtattatttgagacttttggattggttgtgttattccgcctcagcctcaggttacaaaccatgcatccatatccatctacctatcaggaaatgcatgcgtgatccttaaacttaccgaaggtcttctaagtctgtattctgatactagaggttcatagagtttgtggacttatgttcaaagtgcacaaaaaatgtttacaagtttgacttgtcaacatggaatctca

SEQ ID NO: 30699 - DNA, 2010 bp, Zea Mays
actctcaccaaaatggccttcttcgtccgcgtccgcatggtactcatcttgctcgccgtcgccgcagcacgcagcgccaccgcactcaccccaccaccatccagtgccacagaccttgctgcgctgctcgccttcaaagcaatgctcaaggacccccttggcatccttgccagcaactggactgctactgcatcattctgctcgtgggcgggggtctcctgtgacagcaggcaacgcgtcactggcctcgagttcagcgacgtgccgctccagggcagcatcacgccacagctcgattggatggacagataccagaaggaggagtgttctcaaatatcacactcaaatcattaatggggaacaatgcgctgtgtggccttcctcgcctaggtatagcacagtgctacaatatcagtaatcattcacgatcaaagaacttgttgataaaagttttattaccttcgctcctggcattttttgctttatctgtgtccttgtatatgttggtaagaatgaaggtgaacaaccgaagaaagatactagtaccctcagacacaggcttgcagaactatcagctgatctcatactatgaacttgttcgtgcaaccagcaacttcactgatgacaacttgctagggaaaggaagctttggtaaggtcttcaaaggcgagctagataatggatctttgatagcagtgaaggtactaaacatgcagcacgaatcagcttccaagagttttgacaaagaatgcagtgcacttcgaatggctcggcatcggaatctggtgaagataattagcacttgttccaatcttgacttcaaagcactaattcttgagtatatgccgcatggtagcttggatgattggttgtactcgaatagtgggaggcaactcagtttcctccaaaggtttgcaatcatgctggatgttgcaatggcactggagtatctgcatcaccaacattttgaagctgtcctgcattgtgatttgaagccaagcaatatcttgcttgacaaggacatgattgcacatgtttctgacttcggcatttccaagttgctagttggagatgacaactccatcacattaacaagcatgcccggaactgtaggatacatggctccagagttcggatcaacaggaaaagcatcacgagccactgatgtttacagctatggaatcgttcttcttgaagtcttcgtggggaaaaggccgaccgattcaatgtttgtcagtgacatcagcttgagggagtgggttagtcaagcattcccacatcaactcagaaatgtcgttgacagtagcatacaagaggagcttaatactggtatccaagacgcaaataaacctcctgggaacttcaccatcttggatacctgcctagcgtccataattgatttggccttgctttgttcaagtgctgcacctgatgaaaggatcccaatgagtgatgtggttgtgaagttaaacaagatcaagtcaaactacatttcacagcttggaaaacaaaggcatatttatcacaacaccttctattcccagcttttaccctattcgggcaatgatccaggtccaagcaatttacaacacttttgaagcacccgtactgtcagcaagaaagaaatgcttcggttcataactagaagcagcaaattactgaattgccagatcctcaaaacaagtgcccggacgacagaaatactaactgtgcaagattggaacgtcagggaagattgtttggtgtattttgtccactacaagtaaatgagtgcagggagatggtggccacaggctttgagcaaagctttggaactccttattattccataacgaaacatgctgcacagtttcctagaaaatcaatggttgcagttcctggcatcgcctaagaaaaatagcacatttgtgatgtcaggtttctgaagcaaaagtaatgacgtgagcgtgtattgtaacttgaattatacaccaatgatgctaaaaaccatatcgttgactgataaagggc

SEQ ID NO: 30700 - DNA, 2534 bp, Zea Mays
taatttctcatttctgcaatggtggaaattatgaagttaagacatatttatatgaagcacttctagcaattgagcaaggaaaaaataaaagaaatatccaccaagcattagcagctgaactagaagcacttgcagatatgaaattttcatatgtcatttcatgtcagaagtttggggaacaaaaaatcaaaggtgatccccatgctcaagacatcatagatctgatgatgaggagatttaccgtataaagctgcctggtccacctatcattggagaagggaagcctgaaaatcagaaccatgcgattatcttcactcgtggagatgctctacaaacaattgatatgaatcaagacaactatctggaagaagcttacaaaatgaggaatgtccttcaagagtttgtaaggcatcctagggacaaagctccaactatccttgggttaagagagcatatcttcactggaagtgtttcatctcttgctggcttcatgtcatatcaagagacaagctttgttacaattggacaaagatttcttgctgaaccccttagggtacggtttcactatggtcatccagacatttttgatcggatatttcatttaacaaggggcggcataagtaaagcgtctaaaactataaacttaagtgaggatgtgtttgctgggtataattccatattgcgtcgtgggaatataatttacagtgaatacattcaagttggcaaagggcgtgatgttggtcttaaccagatatccaaatttgaagctaaagtggcaaatggcaatagtgagcaaacaatcagtcgtgatattcaccggctaggtcggcgatttgatttcttcaggatgctctcatgttattttacaacagtgggattttactttaatagcctaatatcagttgttggtgtttatgttttcctctatggccagttgtacttggttctcagtggcctgcagagggctctgctacttgaagctcagactcagaatataaagtccttagaaacagcccttgcatctcagtcttttctccagctgggactgcttacaggattgcctatggtgatggagctaggtttggaaaagggtttccgtgcagctctgagtgattttatcctcatgcaattgcagttagcatcagttttcttcacattctcacttggaacaaaagcacactactacggccgtactattctccatgggggtgctaaataccggcctacagggcgtaaatttgttgttttccatgcaagctttactgagaattatcagttgtattccagaagtcattttgtcaaaggatttgagttgatcttccttttgatagtctaccacatctttaggagatcttatgttagcaatgtcgtgcatgtgatgatcacatactcaacatggtttatggcagtggcttggctgtttactccttttctttttaacccagctggttttgcttggcaaaaaattgttgacgactgggctgactggaataggtggatgaagaatcaaggaggcataggagtgcaaccagagaaaagctgggagtcatggtggaatagtgagaatgcacatctacgttactcagtattgagttctagaattcttgaagtgttgctctcactacgcttcttcatatatcaatatggacttgtttatcacctgaatatctctcaagacaacaagaatttccttgtctacctgctttcatgggtcgtaattattgccattattggttttgttaagcttgtcaattgtgctagccgtcgtttgagcacaaagcaccaactcgtcttcaggctcataaaacttttgacattcctctcagtggttacttccttggtccttctctattgtctctgtcgattatctatcatggatttgatcatctgttgtctcgcattcataccaactggctggggtctcctccttattgttcaagttttgagacccaaaatagagtactacgcagtatgggagcctattcaggtcatagctcacgcttacgactatggaatgggatctctgcttttcttcccgatcgctgtgcttgcatggatgcctgttatctcggccattcaaacccgggttcttttcaacagagcattttcccggcaactacagatccagccttttattgcaggcaaaactaaacggagatagcataaccgatggttttacatcgcatattggggatttgtgaatatgatctattggttggtcatcagagcaataagtttctgtactctggtagcataaatgtcgtgtgcagtgtgatccattattctttggcctaagcctgttccacatctaacatagtaataccttggtttcggtttttattgccgtgtaactttacatatcatttctgtaaaaaagaaacagctctagcattgctcttagatgagttgagactgatgaatctcatgatacctacacagttacaaaggtactaccttattttcatgtgaaatacgacacttattgtactactgtattattatgctttaacgtgcagtaccaaatcatttgccac

SEQ ID NO: 30701 - DNA, 2109 bp, Zea Mays
cgcgccaccacccaagtgagtgacccatcccctccatcggactctccactcccaccgtctcacgaccacgaataccgccgcccccggccctttcctcgtctcctcctcctttcatcgccaccatcgccgtcggtgcgccttgcaggaggtgcgagaggtcggtcgaaaagcacagccatggcggcggtcaaggtggacaaggccaccaacgagctgctgctgggccccgactggaccctcaacatcgatatctgcgacgccgtcaactccgatcacgggcaaggaaaggaggtgattaaagctttgaaaaaacgtattcaacacaagaatgcaaatgttcagtttcttgctttgacgctattagagactctaataaagaactgtggggatcatgtacattatcaagttgtagagcgcaatatactggaggaaatgatgaagattgtgaagaaaaaggctgatatgcaagtgagggataagatcctgatgctcttagactcttggcaagatgcatttggagggcctggtggaaagcaccctcattattactgggcatatgctgaattgaagccagaatctttgccaacatatcttcaagcagggtatggaatgccagttgattcttcctcaaggcttgatgaggcaatgtcatcaaatggagctcctctgagcatctcagacttggaacgaatgctgggggctgtggaactattaaatgagatgttgagagctgtcaatccaaatgaaaaagatgctgccaatgatgaaattattacagaacttgtgacccaatgccggtcataccagaaaaagatcatgagttcagtaagcttagtaagggacgaggacctcttgggccaagctcttgatttaaacgatagattacaaattctgcttgagaaacacgattcaatcgcatcgtgttctccttcatctgctgacgtgatagacgtggtgtgtgaagtgccatcgggaacagctccaaaccaaggaacaaatttccctccacaagctgcacttcgtacagccatagtaccgaccaatgttttggacgacgaagatgaggaaaacgaagacgacgagttctctatgctagctcgaaggaactcaagattccagcccacaaacacccagagcacctcttcaccaaccgtccatgatgaaacagcaagctctacagcctctgttccctatacagcatcgccatcagttgcgaacaacgcattgcctccgcacgatcctccagccccgccagtgagggtctctccagaagagcaggtcatgagtgaccttctcgcactcaccgtgtcatcaaacccgtcaccatcctcctacaccccggtaacacctgaaccaggccgcctgaatcaaagcagcgcaccaacaggtgagcttccgcgggcttatcatggagaccaaggacacgtgtctgcaccttacgtcgctccgtgggctcagccgcagtcccagaccgcaggaagtcagcaaccgacacgcactcaggcacaggtatcttacagctcgtatgcttacccaccgccgccatgggcgtcacaggacagcaccgaatcgaacccttttgtagcggcagcatcgtcatctcagcaataccagtccacttcgagaacccctaccatgccaccgaacttgaggcctctactacagcagtcgcattcttttggagtaccacttccaaccgcgagtctggactcgccaataaatgggaacctgaagcaaccgctgtctgctggggctcgcaggccatcttatgtttcttccaacaagttcttcgacgacttgtttgagaggaactcggatggtagcctgaaagtaggcagcacaaggcacagtgatgtctatggaaaataaatgtcgttctcttgtcctgcctgcgtttgatgttatcagctgcctgcatattagaacgatttagttgatgcttctggcgaacttgcttgcctttccataaataattttgccaaaccaaactatgtggaagcttcagcctatgagctgtccactgtccagacattttgaatggcaaaaggcgattcttcctaaattgtgtaatgaaacgggtttgcttctaaatatagtgttctttagagc

SEQ ID NO: 30702 - DNA, 1742 bp, Zea Mays
aaaccccccccccccccaagtggcctcggccttcctcacacagtccgatccagcccaaccgaacccaaaagtctagcatatgggaacctgagccctcaaaccccgccccttggcctcccctaccgtccacgccgaacacccgccgttctcaaaactgggctcctccccttttgtgattggacttaagtgggattcatatatcaggagtttggattcttctctttcctctgctggtgaggacgtcgatcttcttctttttgtgttgtttcccccctttatcttcacattcagcgatcttcaaattcaatctgttgtctgtcggattggcgctctagtctggtgggtttgctttcagatttgccgagtatcaatccgggtccccatttgttggtggttgaagctcgatttctccatggcgcttcgtgcagcttcatgaatccagtatactggcttcctaaaggatcaatgtcggctatctctgatcagaagaaacgcaccttggaagcccttcagcaacagtatactgctgcaaaagctaagaaattgcaagatgaacaggttaagagtcagaagaagagcaattttaatacccctaagcctaaatgtgatgcaccaaggggaagcaaaggtccagaaatcactcctcgacgaacatatgcccaaccttctcataaaggtgtagcattttctagttctaattgtcaacaaaagccttccacgtcctcaggtgaagaaatcaatcctgtgtatgctgaactttcttgtgcttttcatgacactttgtccaaaggtgttgtctcggatttggatggcacagaggttgttcacaatgttatatatgacataattcagaaaggtggagatgctgggaaaattacaaagggtgccaaaaagttgaaactggaaaaagggatccttttggataattatgttcagaggggttctagattagtggattcccaagcaagatctttgttgattcattcaaagcgatcaaaaaggcacatgtctctaaaacaacataagaaatgtggttcatttgatttagatggtacattccacaagtacgacctctataagccaatgcatgagatgtggaaggactatatcagagagcttatggatctgagcccgaaaaagaaatttactgagaaccttctttcagcagatcttcatggggcccttctaatagtggcagaatgcaaagctgcttcatataaaggtgtaaacggcatcatgattcgggatactgcagagacgtttggaattatatccgaggacaaccgcttccgagttgtaccaaaagctggttcagtgttcgtacttcaagcagatcgctggaagttcacactgattggcgacaagctctcgcccagggagaagttgaaggaggatcagcgtcaacaacgtgcacaatcgctaatcagatagtttccaatgtgccagctgttctctcaaaatttttgctccacgaaatacttgcttttgtttagctgttttaccctttttagtttgcctctaacattgaaggtagataatgggtgtctgtttttgcaactattgattttattttacacagcaagatgtaactgcaacggccacgccgtcattgtttaactgtcattcatgctctccatgataaatatatagagttaataggaatgggaatgaggttgacctactaatttgtcactacagaatctgccttcagcggtccactaaaactttagtattgtacatat

SEQ ID NO: 30703 - DNA, 1529 bp, Zea Mays
gactgccgccgatcgcggttccatatcccattcatatcctccccgcggcgcgcggccgcgccagcaccacccagcaaccagatgcgcagccgacccgccagtatggcagcggggcccaccccatccgccgcggcggcgtcgttgcggccgccgccgccgtgtttcgactaccgggcggccgtgctcgccgacacgcgcgccgccgccgcagggaaccctgcgctggcggggctgatcgagtccggtgcgctcgtgcgcgtcccgcggcggcggttcggcccggtcccggcgtggcgcccgccagacttcgtggagcctgaggatgtgtggatcctcggcacctcgcacctctcccgggactccgtcgccgacgtggagcgcgtcctccgcgccgtccaacccgacaatgtcgtcgtcgagctctgccggagcagagctggaatcatgtacgcgtccagtgattcttccgacgagccgcttttgaagtccaacatgttctctctcggtggctccaagttcttcggcgcagtcagtagaagcatcaacctgggtgggcagagcgctcttgctctgcgtctgctcctcgctgttttttcgtctaaaattgcttccagtgcgaaccggccgtttggagaagagttccgggcagctaggagggtgtctgaagatattggagctcagcttgttcttggggatcgccccattgaaataactcttgaacgagcatggaaatcccttacatgggatcaaaaggcaaagctactaatctcactgttccgcggaattacttctaagactcacacgccggatgagaaagccgccgtcagcccatacgagttgtacgagaaactgagcacatcttaccctgcactgttgcagcctctcatacatgagcgcgacatgttcctcgcatggtcgctgaagaggagcaaggctgtgaacaagagcagaactgtcgtcggagttgtagggaaggggcacatcaatggcatcgtgtacgcgctgatctctgaccagggggatctgaggttccgagaccttgttggtagagcatcatctgatacatgggtcagctcactcgtcaagggcctggtaagggacactgtaattggtctggtcctttgggctctgtatgaacagctgcaggctgtgctgtagagtagatggttcagacttccacaaggcacacaaactcggtactgttctcaacttcttacaagctgaaacagtggaactgaaatccgataccagcggaaatctaaaacttgttcgaagtgcctgtacatgaacttgatactgtccctgttcttcacaaggttgattacttgattaaagtacctgtacatgaactgtcaactgctgttttatcttctgaatacatctacattggacaacaaaacactacctgtatttttctacttttttgccatttcatatttgggtaaagcaaaaaaaaaagatgcattatgtgtagcacactttatatttgtatatatatgccgggcgaaaagcaatagattttgagaaaa

SEQ ID NO: 30704 - DNA, 241 bp, Zea Mays
atcttacaaacattactcactttccttgatattttctattattcaagcaggaattacattagtaccttcggatttacagggcttacaagatggagagaagatcatggcttgtagacaaagattactcgtcctttctttgatctctaaaaagatgccctaatgtatggcactattcatctatttatagtcacatggtacaactttgatgaaattatatttcgcacccttaagcctatacatt

SEQ ID NO: 30705 - DNA, 1288 bp, Zea Mays
caagataagaaagtgaaaatctgttggtttaaaatctatacagagattttaacaattcgtcatgctccgatttgaggacgatcgaatctgagccgtccattttattaacactttcggggttcagctctgctgcctcgaagcagggtccagatctctctcccccggctccggcgatggcttcgccttacgccggcggcgtgcagcctccctctcccgctggggcggtgcagcagcagcagcagaaccactctctggcgttccgcgtgatgcggctgtctcgcccctcactccagccagacctggccgctctgctccgcttcgacccacgcgacgtcttcctccctgaggacgcgctcaccggctccgacccgtccgctgccgccaaattcctccacggcctcctccaccctgcggactccgccactgccgtccctggagacttcaccttccgcgaccgcttcctcctccgcgacccagccgacgcgctcgctctgccgggcctcctcgtcctcccccagtcgttcggtgcgatctatctgggcgagaccttctgcagttacatcagcatcaacaatagctccagctttgaggccagggacgtcgtcatcaagaaatacaaacagagagacagagaatacttcttctggatacatcaaaatcccctgttgagtcaattagatctgggggtagatatgatttcattgtggaacatgatgtcaaagaactaggagcacatacgcttgtatgtactgctttatataatgatggtgatggagagcgtaaatatcttccccagttctttaagttctctgtttcaaacccattatctgttaggacaaaggttcgcaccatcaaggtaggtcacctcttgttgtgcaagggtaaataacaactgtaggttctttggttagttgtagatgccatctttagaagtcttaacaggtgtatattttgtatatagatcattacagcttgacaaatataacttagaaaatgatttgcgattaagtgagtagtttttgtgtttaatatagatgtttatgttttgttgtatgaactaatagctctcccattttttattaataatatttaccaagatttttcttttgtatttcttgccatcccatggaagctgagctaactcaatcggctaagggtgtggatgtacactcagatcacccaggttcaagtccttgtcgaggcgactttgggtgcctgttttcttcttaataaagccacctagctcctccttggctgatctagttttttcttgccatcccatttgttg

SEQ ID NO: 30706 - DNA, 5596 bp, Zea Mays
ctcagtcggatccccacggggcaagcccctctgccggccctcctccgcatcccactctcgccggccgccgcagccaaggcaagaggacgcctccccacacccgatctcccctcccacctccgatcgctacgaaaagcccacgcccgcctcgtccctccggccctcccctccgcacgcctcgcttgccgcgctatttcaaatcccgctcgaaccctagtaactacctaccccgcatggtcgatcgtgccgccgcgcgggcacaggcggtgagctccgacccgccgccgcctgcactgctggagcccgacccgcggctcagccagcccggggccgctgatgggcaagaggtcgcttcggcgggtgcgaccgcgggtccgccttccctgccccaggccagcgacgctgaggaagacgctcttgcctcgccagcggggcagccgggcgagcggtgcagagcgatgatggaggtggtggccaaagacggggcgtggaaggtgaccaagctggtggtggagcactgccacgagctgcaggtcgcccccggacatgtcgcggtgaccgtgccagcgttggggatggaattcgactccgtagacgacgccaaggggttctactatggctacggcgagcaggtgggcttcaaggcgcgcatgggctccaaccgccgctcagtgggcgacggcgagaagatcctgcagcggttcctctgctggaaaggcaattacgcgaataggagtagatgtaaggattcggatgcagggaaggaaaccgatgaggtgctggagggtttgtctgctgctgcggggaagaggaagagggaaccttataagacaaggagccgcaatcctggtaggagtacagaggtgattgaagtggagaaaggtgttgggttgggtggtgctgggaatgggctagagctggataatgggaggcgttccaggaggggtaggagtaaaaaggctgaggtagagcatggtgaggattctgttgttgggttcgaggcggaggaggtggctaaagctgtttctgatgctgacgaggaagaggatgaaggggacgaggatcaggaagcagcggaacaggaggtcgaggtggaagtgaaggaacagagagcgagagggaggccgaggaaggctgttatggaagacaatgcccttcaggcacgcgtcttgagggagcttggtgtgagggcattgcagtacaataacgaggagagaaagaagatactcaataagtaccgctctaaacggcagagcagatcagtgtcgagcaggcctaccaagatatcttcaagacaagctttggctgaaaggcgtaagcgtggcaatggaggtagatttctgtcaagtgaagaacagccggtaacttcctgaccacgttgcctatttttaatgctttgcgttgttgctataacattggttacatgctttattgatccattaaacaaagtgagtaacacaaactttatgactcatgatattcatgcaaggaaataatgatgaatgaacgcattgtatattgtttttgtggcataaaatatgtacatgtactgttacatcatttgcatacacaattcatttctacagaaaatggtgttatcttcatggccctttgcatgcttttaatttttgttgtgcttttagtgttgtgtgtaaaaaacatgtatcttgtaagctgtaactcttcttgttgggccttttcttacttactaaatatgaattctggagagttacttcttactggttatgctactgtggctgtaggctcacatatttgtaatccattaacttaacctgccaggtctttgttattgtgttatttgatgaattggttgaaattctttcaatcggtaggcactaacttgcttcccttttattcgttacggtttccacttttcattgcaaatggacaatttgcatatggcaattatcttgttattcttatgttctcttactcttgtgctctgcaaccttcacagctgccttcagaaaggcgttccaaacgtcttaagaagcaaaatctcaaaatgcagaaggtaagatccagtagggatgtatagacttattttgtttgaggaagaagtggcgatggatcatctgatcctaactccgttctaccaacttggttgctatcgcatgcgtcgatctatcaccatcttatccctcacaagcacatgactagtgtacttgaaggtgatcctacaaaaattcatgggaggatcccatggtagactatcgtatcaaggatggattaattccttgaactaagcatcccattagctgtgtaactttcttttagaaaaataatctacaactgctgcataggagatgcctcttgagtttgcagtgtctaaattttgtgtagtaacagaaaggtactccatccgttccaaattgtaagacgttctggcttttgtagatacatagttttttaatatgtatatagacataatgtatatctaagtgcgcagcaaaagccatgtacctagaaaagctagaacgacttataatttggaatggagtagaaatgtagaataataatttttaagtaacacaacctatgaacagctgcaaacatatatatatatatatatatatatatatatatatatagtatccaattcaatgctcaggatctccccttgtccaggctgagagcaaagaagacgaaacaatggaagcagaaccagatccagaaattgatgtagtccctggacctgggggagaaccaaaggttgggatggtttttctgaatgaggataaggcatatgaattctatgccaactatgctgaaactgcagggttcagtgtccgaaaaggctggttggacaaaacagcaaagaatgttacaaaatctcgagcatatgtttgttccaaggagggatttcgtccaagaagtgcttctatcgaatcaaagaaaccaagcctagaagcaagaactggttgccaggcacacatgactattaagattacagcaagcacaaaatatgtagtgactgagtttgtggccgatcataatcatgatcttgaaactcccttggttgacattcagattttgaagtcagaaaagttattagcaaaggtacaacagcctcctgatccaccaaaagttgttctgataccaaatgagtataaaaattacacaaggacaaaacgtacaaaaaatatgcaattaggtgatacccaggccatctgtgaatatttgcaaaggatgaaaggcgagaatccttctttcttttatgccattcaagtagatgaagatgatatgtttacaaatgtgttttgggctgatgctaaatcaataatggattataactactttggtgatgtagtgtgtgttgacacaagatattgcacaagtgactatgggagacctctactattatttactggtgttaaccatcacaatcagctgataatatttggttcagcgttgatttatgatgactcagcacaatcctttagatggttgtttgagaccttcaaatctgctatgagtggaaaacaaccaaaaacagttttgactgaccagtctgctgcacttagcgatgcagtttcttcttggcctggaaccatccaccgcttctcactactgcatttgtatctgaatgctactaagataagcagggataccttacaaggcttggagacttttgcatcagattttagtaggtggctgtatgaatatgaggaggacaacttctattcaagctgggaaatcctttcagagaaatacaatataaaggataatgagtggttctgtaaattgtatgaggatagagaaagatgggctttgccttatgggcgtgacacattctgtgctgatattgcaaccacactaagaagggataacacaaatacaatcctcacagatctaattaaaccagaaatagatcttcagaacttcttcaacaattatgataagtttttggaggagaaacgcctagctgagcaacaagctgactaccttggggctcaaataacgcaaagggtagcaccactgcatctgctttggcaagctgccaatttatatactccaacactttttgagatgttcagaatggaatatgaacagatctcaaagtgtgtggtctatagttgtggtgagattggaccaatatctgagtaccaggtcactgtcaaagacaggcctcagggtcaatttgttagatttgattcaacagaatgtatggttgtttgtagttgtaagaagtttgaattcatgggtcttctttgttgccatgtattgaaaattcttgatctcagaaatattaaagaacttccacgacactatatcctgaaaagatggagaaaagacgctcagagtgaatctccagagaactatggttttgctgccatagatgaagatcctaagttttcattgtcaaaacggtacaacgcattataccggaatttgtataaaattgcagcaaaagcttcagaaagcgttgaagcttatgcattcctggagaaccaatatgaacagcttgttgaacaagtggaagtacttttgcaagcaaagttgcatgataaatcttccttaagtaccgtcctgaaaggcaatcagccaaatatgcttaatagtgaggtcaacagcagtgaacatcgcagagcaactggtaagaaaattaaaaatgtagaggtgcgccgtcagcaacaaagtcttgatccaaacaaaaagaagaagggtagacaagttctgctggaacctgagattgaaattccactcagggttgaacctcccacggtatcaaatgatatccaaaatcatttaagaacaacaaatcagtttcttgcaccaagccatatgatgcaggcaccttatgttgcacagcagtttggtcttggttctttacaaggattcccaggcatgtcaccatttgggcagattcaagaaccaacacctcttcagcagccccatttacaaccaccatcgtttcatagtggtcctcaaattacacagcaatcctcagcttggccaccagaccacggatcaaggccagtacaccattccagtctgggatttcctgtgacatacagtatcctcctgtttggttgctagcagcttggtgcctgactcgcccagcatcagttgaaactaacgattcttacttcctcacgcatctccacgcatgcaagtcaacgagggtaaaaaagcctagcttgcacctgcgcgcacatgcgtccactatatttttacttccccaagcacgtgcctgggcgcggtcaacgcatgcacggggccaggcgcgggagcagagccaaccaatcatgcagtatgtgatgtatggcgaagtagcaatgtagttgtaaattatgtaatgacactgcccctccccgaagggttaatgtcaatgaaatcctttagcatggtgcattggattagattttggaactgaatgcaattctaatgcacacgttaaagccaaccgggaatggggactgtttgttccaggcaaggtggcatggttgggcacagttatcatacaatacaatatgggcctgtttgtttccttttattttgaggaattagaatcttactattggaatagactattttttagaatgtgatattccaccactttccaaagttatca

SEQ ID NO: 30707 - DNA, 2533 bp, Zea Mays
cgcgtcctcttcgcctccagactccagtccacaaacaggagctctcagccaagcgcccacgacagtaaacaacgcggcgccgccaccggtttcttttgccgaaggaaggcggcagggagatatagcacgctacagccgcagcccgcaggcaagcaccgcggtccgtggctaggctacacctacaccagatcttcttagctggggaccaagcaaagcaagcaaggctacccgcaaccgccaactgaccgctgtagcggagacgatggcagccgccgcgccctcctcgtcctcgtcctcgtccgcgcgggcgcgcgcgcgcgcgccgccccggccattgcatcccctcgcccgcggcggccccgagcgcgaagaaatggaggccgtcgcggcgacccaccccggcgcgccaccgatgcggcgcaaggggaggaagcagaagcagctgtggcccaggaccgtgctgcggaagtggctcaacataaggtcgccggagtccgacttcagcgccgacgagggcgacaccaccggcgacgacaccgacagcgaggtcgattacgaagagatgtgcgcatgggagcgcaagttgcacgatgaggagaggagcgtccgaggattcggtgctgaggctattggaaaccaattgggggtggttccttgtggccttcgtagaaggcgcaagtcagagacccttcgtgctcagtatattgatgtcagggagctcaggatttgtgctggaacatggaatgttgcaggcagacttccacctaatgacttggatatccaagaatggttggatatggaagagccagctgatatatatgttcttggatttcaagaaattgttccactaaatgctgggaatatatttggcgctgaagacaaccgccctgtagcaatgtgggagcatattattcgtgaaactttgaataagatcagcccagataaacccaaatataaatctcacagtgatcctccttctccgtcaaggttcaagccatctgatgatgcttttgttatggaagatgaacttattagtgagtctgatagtgaaggtgatggggaggtgcacccattgaacgaacaagatttggtcgactctgttgatggcattcatggtaacaaatgtgaacctcaaacaattttacaagatgaagagttcagcaggttgccttcagtgaagacttttgacagatccaataacctaagttttaaagaatctaatttggaagagaagatctgccagaagatattaactaaaacattcagtcactcagagaggcttgggatgatttggcctgaaccaccattggatatgtttgcccagtgtcttccagacagcacaaagccatttgcttcaggaaaggttttaagatcatatttgtctttcaagtcggtaaatggagattctggtccatttgctgaggacaattcagttcctgatttttatatgagctgtgcagcagttaaaagaaaaaggccatactttgtaagaataataagcaagcagatggttggagtgtacctatcaatatgggtacgaagaagcctccgaaagcacattcagagtctgaaagtatcaactgtaggggttggtgctatgggctacattggtaataagggatcaatatcagtaagcatgtccatataccaaacacacttttgctttatatgttgtcacctgacctctggagaaaaggaaggagatgaactaaaaaggaatgctgatgttcaagaaatccaccgaaggacaatatttaatctagtttcgagagtcaacatgcctaaaacgatatatgaccatgaaaggattgtatggctaggtgatctcaactataggatcaacttaccatatgagaagacacacgaactcatatccaagcaggactggaacaaattgtttgggaaagaccagctgaaagtagagctgaagaaggggcatctgtttgaaggatggactgaaggggtcatcaactttcctccaacgtataagtacaaggttaactcagaaaagtacataagtgatgataacaaatctggaaggagaacacctgcatggtgtgaccgaattctttcccatggtaagggtatgagattactgtcatataagacagttgatctcagactatcagatcaccgccctgtgactgctgtgtacatggcagatgtggaggttttctcttcaaaaaagctgcagagagctctgaccttcaccgatgcagaggctgaggaacagctctccttcgaggaagacaatgcttctggaatatacaaccttggactatatgaaagttcaagtgaagtttacaccccattagtaagagccaaagttttcagcaaggttacctggttgaagccgcagccgttgatgcgggcgctgagccggccccggcggaacggactgcccgccgtgtcccggtcattcccaacgctgcgacttcgacgctagggctagtttgaaagccacaaaagtggagataatgtgaggggctaaaatctattctttatttaattttaaataaaaagaggattttag

SEQ ID NO: 30708 - DNA, 2286 bp, Zea Mays
cggaatgaggatagtgactgggccatgggaatttgatcgagaaagaaagggaaaggtagagatagtggggacaatcgatttaattgtagctggaacatttctaaaggtattagtaggtgacttgctgcagcaaacttgaacacacaagcaacaaacatatgcttcaggtccttgatgctaccaacagaatggactacttagagatagctacactatcgatgcatctacatcattttggactatatgggacaccatcagtaatggttgatcttgtctactgtgctttggagttcctttcaactttgcttggagcctttcatgccactgatggagtcatatgcctctgcccagaaattcagtttctgactgaactaaacggtggtggtttgaatcatcgtggttcactggttttcacaatattgggattcttggcaaccatgaggacattatgagattcttggctaccatgaggacaaattgttcaattacattttctacgtctatttcgaagcgtcgatggcggatgtccgcacacaaaatgccttgaagggtctggaggaagttgcaagtttcctgcgtgtccttggctactatccgtgcaacacaataacgatatgagctgttgcgtcacactgtctatcttggttgctccgccttggaagaccagagtgggagatggttgctatttctgctcaattgaataaaaggttcctcttcccttgtttggaagagattatggtcattatacactcccgactgaatatgaacactcttgaaatacattgcgaagctgcagaggatcgtcattagaattgcatgaaggttgtatgcgaaaccactggattgaacaattcgagaaatctacagaggaagtcgtgaacagctatgcacaagattgagtctaaggtataggcatctgatggaggacatgttgtctctactcccgcatatgaaggacaaccaggacaaggtcgagtccaagcagagcaaggggaacacgccgagcaagctgcttgagctcaggagttgctccagctgcctttcttcgagattctggctgttgaccatgcgtcggatgagggcgcgattgtaccaattggttcgcagcatgatgcacatttgaccaaactgatgaatatggaaaatgaccaacctttgttgccggcaccaccagttaatctggaatcagccatccttgagcaaaatgcaaatatggtggctctcaaggaaggctgttctgtgggaagtgagctgccacctggtctgcagggtaattttggtggtaacaaagcaaacacgtgtacttcagcactgcattctattgatgaaggtgaagaaataacttgtggtttcattaaacatgagaggagttatgatttacagaatttgactatggataagtcaattcaagtgtctaatgaaacaaagtacaagtttcttgctcataagcccagagtaggctgtgaaactgctattcaaaactgtgagttggcttctgcattgccagatacagaatttcatggccctgttgcaaccatttcaactacgggtcaatcagaaggatctgacactgagattaatgttccaaactattctgacctagaagcactgatacttgatctggacctgattccatgggatcaagaatctgacttcatccaaccagaagtttcaaggtttcagtatcctgaaagcaggaaggatttgataagattagagaaaggtgtctgctcttatatgaaccgatctatcatgtctaagggtgctttcgcaattctttatggccaacgcacgaaatactacataagagagcccgaggtaagtcttgggagagaaacagaagaagtacatgttgatatcgatttgagtaaagaaggaaaggcaaacaaaatatcccgtcgacaggcagttattaagatggacgatggtggatctttctacataaacaatactgggaagttttcaattttcgtgaatagcaaagaagtaccctgcagtaaacgtataaacttaatgtcagactcattaattgagataaggaacctgaaattcatttttcacgtgaaccacgaggctgcaaggcaatacatagttcgaaaaaggagaggaagctcccaaggcgggatcacggcgtttgattggagtcagaacccatgagtagttaacgttatgatcaaggttgtttataatctgcgatagctacctctctcttcaagaaagtattggataagcgtaaagttatttataatttccgatagctaatatttctctcttccagttagcact

SEQ ID NO: 30709 - DNA, 1915 bp, Zea Mays
atctccagcggaaccgcatgccccaaaagcgaagccaaccagcacaaaaaggagcacaaagctctctctccctcccccctctctctctctctctcctgttccccgcgagagtcgctcagggccgcgacgaggagaagcggcagcgcgtcacctctccaatggcatccccgtccctcctccgtgcaacctgcgcttctcgagtgctgaggctccctgtccctaagacaagcttgcgcgcgcgatggagggtttttcgagggacttgctgtgcgggattggcaagggggacgcgccgccaccggagaagaggccggggcagctgcgggaggagatggaggaggtggagcttagcctcgggctgtctcttggcggccgattcgggctcgacaggaaggggagcaagctcccccggtcgtcgtccgtggcggccatgctgacaacgccggtggaggtgccggcgccgccctccctctcgcgggcgagctcgctgccggtccaggcggaggcgtcggaagttgagaggaagcaggggctggatggatggggttcttgccgtgagggcggcggtctcggcgtgcaacacgcggcgaggctgccggcgagcgggaacccttcctctgcctcttcggtaggtgaaggacagattttgcaaggcaccctcatgaggactagttcactccctgctgtcattgaggcttctggcaatgatgactggaagaaacgaaaggaagcacagagcctgaagaggctcgaggttaagaagaagaggattgagaggaggaactctctcgcctgcaacacttcaaaagaagctgctgggcagagtccaaaagagatgaatgcaaacactgacaaattagtaagttctgatgaaactattgtcagcgctaacgaaagtcatagcagtggcaagcatctggtgaaggggcttccaccaaagtaccaggccacaattacatcagaagacagttcgtcagcaatgcgaaagaagccaaactcggccttcaaaggaacagccatcactgaggagcagaactcatcatcgtctgttccttcctccggtgaagctataagtagcgtgacggcaccaagtctgcctctgttgtctttggtccccataacagcaacccttggttccagggaagaccaaagcattttaggcagggctggtgcaagggcaaacggcatgggggacgtggaaaggaggatgatgcaggagatgccgggcgtgttcaccaagggcctgtccaacggcagcagggtcgaaggcttcctgtacaaatacagcaaaggagaagtgaggatcgtatgcatctgccatggaagcttccttactccttcggagtttgtggagcacgccggcgccggcaaggtagataacccgctgcgacacattgtcgtcagcgctaccccgaacctgtgactgtgaggccaggcagacccgtgcacaagctatagtgttctgtagactcaggacctgagcctagcgtcagagcaatgtcaccgttagactgtgtggtgcggtgcttatgcccgattaaattggtgggcattgtggtaacataacctgttgataatgttttgacaatgttttgatccttcctatgcgtgatttagttctgcagcttcttcttctttttttcttttgtgttcctatcgtggtttcatacctgggcaagtagatttgtaggttagtgaggggcttgcggtgccactgtcccaatggccttgctctgggtgagctcgaagagaagttttttagactcatttgggcaagttttctacgtccaatatggtactgaagtttttgttgctggtttcgggtgttacaaagcagagtctgaactcttcgtgcttatgtgagatgaatacagactaagcatgcttgtgtttttataggaggccacctgtattc

SEQ ID NO: 30710 - DNA, 1400 bp, Zea Mays
aacatctgtcgtcgtgctcacgacatgcgcgcctcctcctccgcaccttcttcttccccttcttcccagtacatcgttgagctcttccaccgtactccaccattgttttgtttctccccatccccatcttcgtcgtcagcaccacccaagcattctccgcgcttgctctgctccaggtggcgctgcggggatgagcggcgcgacggtggaggaggtgcagatccaggaggctctcctcttctctgaaaccatcaagggtctcaagacactgaggtcgcagctgtactccgcggcagagtacttcgagcttgcctacacgcagcaagacgaaaagcaggcgtacggtgacgaacaacctcaaggagtatgccgtgaaggccctcgtcaacaccgtcgaccacctgggctccatatctttcaaggtgtccagcctaatcgatcagaggttcagtgaggccaccgatgccgatctccggatctcctgcatccaccagagaactcaggccagccaagcctgtgtcgacagagagggcatttcgcagcagtccttggtgatcactgccccaaagtatcacaagagatacatcttgccagctcaaggccagtcaatgcccagtgccatgcccaacttcagggagatgaacaaggtggtcgtcacaggcagggcgtctcagatgcatcaagtattcagcgctgaaacaagagctaaagagaagaagcagccttcactcagaaagttgcaatccatcgctcgcctaccttcgcagcgtgcacgttcagcgtcgccagcacagcgtgcgcatcccatggcaccagctaagaacgctacacccaccaacagagataagcgatcggaatcaccagttccttcgacagctccagctccactgacaaggtccgcgtcgctctcaaagaaggcatccttgctcaagacatcaagcgtcagggctcagcccaagaaactggcaccaatgaggacgcaggtcgacaggagcgacgattccaaggacggtgagcgtacccctaagaagagcaagaagttcctcaagtccatcctcagcaggcgcaagtccagaaaagatgagccgctgccgagttactttgacgactactgagccacaggatttttttttcttctccctccgttggacggcaccgcgcgcggtctctgcgtactcctacttcagtttgtttcactttcatccaagtgttatgttctcaatataaatatcgtcttcgtatagaaaatagcttaaagtttacatgaatgcagtgggaagtttcagcaagatgtcatcaccccacttgcctgtttctataagagatgctcagatcaagagtaaacctgtaacagtcgatgggaatacacaagtaacacagaaacatcgggtgtaaaagag

SEQ ID NO: 30711 - DNA, 728 bp, Zea Mays
ccgccaccagcctctactactctcctctccctcctctgttctctctctcccctaactctctctctcctctctgctctctctcacgctcgcgtgagccgctgcccagccgcctctgcaccgagcgtgcagacgagcctcgaccttcccgcgccagcaagccaggcagccgaccgaaccgcgccagggagcgagctcctgccccgttcgttcacccacggcagtaatggagcttcaatcgcgaccattattctccctgcgttatggagttcaaggcacttgtttcttttctttggaaaccgacgcatctatggcacttgaagacagccgacgccctattgaagctctccctggcagactcttcttcttccctccctctctctataaaaggcagcagagcctctctcccatcctccctacccgagctctctcccattcctcgcactctctcactcgccgttcgtcgccgaagttcgccggagttcgtcaccaccggagcccgtggagttcgccggagctacgccatccgccgtccgtagtcaagcccctgctcttctccatccggccgaaactcgtcgattcatccccgtcacacgcacgaacccaaggttgaagacaaaccaaattattttgtgtgttttataaaagtactttttgatttgattcatgagttgtatattttatttgttgtaatatgaacacatgtgattcacgatttatgtatatgtgtg

SEQ ID NO: 30712 - DNA, 1197 bp, Zea Mays
gccgaagccctgggtgcgctatccgcgaccgcgacgatgggtctgcgcgtggccgccaccgcgccagctccggccggcgtgcgcgtgctcggcagagtcatcggcaaagaggtgcaggcatcagcatctgttgtttgccaattgatggcagccgggcatctgattttggcctaatgaagatagacgacactggaagggtaatttcattcagtgagaaaccaaaaggagacgaattaaaggcaatgcaagttgacaccacagtgcttggcttatcaaaggaggaagcagaaaacaaaccttatatagcttcaatggggatctatatttttaagaaagacatactcctaaaccttctaagatggcgttttcccactgcaaatgattttggttctgaaataattcctgcttcagcaaaagaaatcgatgtaaaggcttatcttttcaatgattactgggaagatattggaactattaagtccttctttgaggcaaaccttgctcttgctgaacagcctccaaggttcagtttctacgatgctgacaaaccaatgtatacatcacggagaaacctaccaccatctatggtcaacaatagtaaggatagaacatagtgttgttggagttcgttctcggataggctccaatgtgcacctcaaggatactgtaatgcttggcgctgattattatgaaactgccgtggaaagaggagagctgcttgcagaaggaaaagttcctattgggattggagagaatacaacgattcaaaagtgtatcatagacaagaatgcgaggatagggaagaaagtggtaatctccaactctgaaggtgtagatgaagctgatagaacttccgaaggcttctacattcgatctggcatcactgtcgtactgaagaacgcgataattgctgatggattggtcatatgagctgaaaaggtctcacaggacgggtatttgccgcacaaaatatcaataggagttctttgttagttttacaataagatgctgtatagcagtcaacaggttattcttgtctatacaagatacctttgtctacaaatcttgtctcaccatgttgtattcgactcaaacaatgttgcagtcatggacattgtccgtttcaaattttcttccttgcacatttacacaaaccttttcaatttttatttcttgctaaacaataaaagctgttgttct

SEQ ID NO: 30713 - DNA, 1808 bp, Zea Mays
ccgccgtgatggcgcgtctcttcttcctcctcctcctctttccgctcctctactcctccgtcaccggcctcaaccgcagcgacttcccgccgtccttcctcttcggcgccagcacgtcgtcttaccaggtcgaaggcgcatacctagacgacagcaagggcctaagcaattgggatgtcttctcccatgttccaggaaatattgacgatggaagcaatggcgacgtagctgctgaccattatcatcgatacaaggacgacatagaaatgatgcattcgattggtctcagctcctacagattctcattgtcgtggtcgagaattcttccaaagggtcgcttcggaggtgttaatcaggcaggcgttaaattctacaatagcctcatcaacggactgctagaaaaagggatacaaccatttgtgacgatcaaccactatgacatacctgaagaactccaagaaagatacaattcttggttgaacccagagattcaggaggacttcacctacttcgttgagctttgcttcaagatgtttggtgaccgagtaaagcactgggtcacattcaatgagccaaatcttattgtaaagcttgcatactccattggggcatttccacccaaccgttgttccgagccatatgggaaatgtgattcagggaattcatcaactgagcccgtgtgcttgctcttaaatactcatgaaagttgtataatttgttttccttgttccccatccttctcagtccaagcaaggtggctttgtaggaatttcattacatctaagatggtatgaaccactaaggaatatcacagaggaccacttggcagtaagccgagctctgtctttcgatgctccatggtatcaattgattcagtaaccttccatcatactagcattttacgattggaactaacttttgatcttcacgattgaatgctcacttgatgatatatgctaaaacaggatcttggatcccttgttctttggtgactatcctcaccagatgcgccaaatcttaggtccaaacttgccaaaatttacagaaggagagaagaaactactgaagaaccaaattgacttcatcggggtaaatcactaccaaacattctatgtcaaggattgcatatattctctatgtgatatggacgcctacccttctgaagctttagtttctatatcaacagaacgaaatgggatacccattggaaaaccggtaaaaatcggcattgtatattgcattattctattcaacaagaatcctagttacaaattaattatgcacaagctaacacaactaaactaatattgcagacacctgttgcaaacacctatgtcgttccaagctccatggagaagttggtcatgtatttaaagcagagatataaaagcatacctttgtacatcacagagaacggtgggttactaggttccctaaaatctacaaattagatacaaaatatatgcctttgtgcataacaatgattcacttccatgcttatttacatatattacacttgtagtacactggtaccataaaaaatatctgtatggatctcttgatcaccctttttttatctttcaggttatgcccaaatagccaatattagcactacagcagaagaaataattaatgatattgaaagatcaacttacattcgtgactacctcacttacttgagctttgcaataaggttgttgcatgcctcaattatcttttcatgtaaactgctctccagccaggtaataataaaactttgctacttttgtgcaggaaaggagcagatgtgagaggttattttgtgtggt

SEQ ID NO: 30714 - DNA, 1567 bp, Zea Mays
attgcggcggcggccgccgcctaccctacaagccacttgacctatacctctatacaatctctccttgtcgttgtattgccttgtttgtgtcgcctaccaccccgcgcttcattttgctctcattatcgacgactacattttattgtttgcaatcaagatggtcagatatggctaggtatacatttgagaccatggagcatcatcgtagacgtggaacattcaaccgtccgcccatgcacggaatttgggctcacaggaattctgacatgctgcattctccagcgcaagatgcagttgttcgggtgtactctaggatctcagaggcatctattgatagaagttctcatacacctgcaaggcttctcgttccatcacaacatattggttgcctgctaggaaaaggtggatccattatttcagagatgagaaagattacaggagctaacattcgaattttcgggaatgaacaaattccaagatgcgcacagcgaaatgatgagatggttcaggtcactggtagcttccaatccattcaggatgcattacttcatattactggaaggattagggatgtcatccttcccaagccacaccccagtggaggcatgcctccatatcctcctgttggaaacatcccagttcaccaatcaagacaagaacaacctcctccgcacctccatcccagtgggggtatgccaccataccctatgcatcctttcagacctgatgctcctatgggccactttgaaatgggtgatcatcggccacctcctgtacattcgatggaatatatgggtgctgatagaatgccatacttgtatggtgttgaacaaggaggtcctcgcccttttctagaacagccttcgccaagaacctgccctcctgaggcaccaaggacaaacagtgaagttcccagaaacatgtctgatgcagtgccagctacagatttcagaaagggaccagtggcaattgaaaaccaagtggctacaccaacaggcacaactgaagttatcattccttgcaattatataggctttgtctgtggaaacaatggcagtgaaattgaagaaatagagaagatgtcaggtgcttcaattacagttcatgatcctaaagctggcgacgcaaactcaaaagttgttatatgcggggatccccgaagaaacaaagaaggcacagagcctgattcatgccttcatattctgtggtctgtatcaaacataattgatgacttgatcactgtgcagtaccatcgtcgtttatgttcttgaatctagagtagttcccatgggcagatttcagcccttgattggatgtacatgtaccgtcgctaccggggtggatgtaggtagggctgatgcatgccttgtacaaacaacgccgatgtacatttctgtagtcctgtgttttagtttgggggaatggcaccatggaatgtgatgggttggctgcacggacctctgtggaatgtttaaccccatgccatcattggttttcatgatttcatctcttgtttgggaggcagccctgtgtgattgagattcgtaatttccaggcatgctatctg

SEQ ID NO: 30715 - DNA, 1125 bp, Zea Mays
ggcaaagacaaaggcttccactacgtaactcatccttcgccgtcgctccaagcaactctccgttctaagggggagaaaacatgagcaccaaggacttcttctttgggggcagatgggtttatctgaggagcagcagaagcaagctctcgagcttcggagcatgacaaatggtggcaaagaatcccttgaagaaaccgaaacagacggtgcttcttgtaaccctgcagcaactggtggatgctgccaaggcaatggtggcttcactcgagctttggagcagcagaagcaagctctcgagcttcggagcatgacaaatggtggcaaagaatcccttgaagaaaccgaaacagacggtgcttcttgtaaccctgcagcaactggtggatgctgccaaggcaatggtagcttcacttgctgccatcctgacctgccaaaggaaaaacgggacaagagcatcgcaattgagcagaaccctaagagctgtgaggagaatggcaaggaggggggtggtgctggcagcaagaaggggaattcaaagacttgcccgatgcccacctggtttgagacctgggagagagctgacacctatgctgctcttgctgttgtcgcagctgccgcagctgtgtttatctctttcagaatctacaagaacctcaactgaagagcttgagagatctttgaagaggtgcccgaaacaagtctaggtgaatcagcgtactggtggtaaaacaatccgggacgagaataatctttacctgtgtatagtaatgtgaggtttagaacctcaaagtagcttatctggagatggtgataaaaaggtgttgtggctacggtgttttcgcgtgtgaacgtccactgctatcgaagtttggatgccttagctgctggtaatcgtaaggcatcaagtaagcaacattcactgtgatgatgttgtcttttgtttgggttttggatgttctggagattctaggttttgaaacaatatcaggttgattgaaaaacataaacatctggaaaaggttaacgcctttcttgtgacatttgaaaatttgaacttcctcgtttatctgcaacctgcgcgcgcatgtttctatggtgaacccggcgagacgccaatggacttcg

SEQ ID NO: 30716 - DNA, 1761 bp, Zea Mays
cctccatccgtcgtcgcctctgttgatttttcatcgtaccgtctctctcccggctcttcttatcttcaccgagcgaactcctctgcgtcctcatctcgtaaccgcccgtggggtcttcaaatatccagtccctgcacctttcttcttcctagccgctctctctccgtgcagtgcgtcctccgtgcccagtccgagctccccatggcgcgcccagctgaagctccctcttcctcctcggcgctgctctatctctctctggtgctcagctccctccgcgcgtccttggctccaagcccccgcgtggagctcgcccagctgtgaccctgccgagctccgccccgactccacgtctcctggtcgggctctcgttctatgcttgatgccgctgttccctggtgctccctgctcggtccctgcccagcgcctgactacagctccagctcgcggcgtcccctctgcttagccaggattgtcgtgcctctgctccctgatttctccagcccgtggagcttttgctatgcgctccctccctgctccggtcttctccatagccgagcgcccgacgttctccctgggtgctcgcccaagtcaccgttgcagctccagctcggattccccttcccatggcggcgcccacctccctgtgctccctgttccagctcgtcggggatgccccttcctccagccgtgttctgcttctctccctgcgcccctattcatctcctgtgcgccttggttttggtcccaagctccatggccgcctcgctgcagctctctggtgctcggtcgccaagtctccctgctctatgcgttcttcttcctccctggctcctgcgcgttatgtgcccagctcccttttccgcatatgcgcgcttatctcgctttcctgcgcgcccagcgttctgctcccgctcgtccctgcgcgccaagctccgtgcgcggtccttccttgagctcggtcctgcgcttttcctttctctgtgtcgtgctcgccgtgccgtgagtcactggccagcagtccagctcgcttcagaatcaatctcgacgtcgttccacgcgtcagcaagaaatctcaagagttgggtgaagttggaggccaacagcatggtattcaccatgtgcgcgacaggaagctcgagccaggatttatccgcattcgtacgagtattgggtcgcgtttgatactggatgtgagctgctcgccaaaggatcatcgtctaacaacactaacctagtgttacccaggcaagccccggtgcatgcaacccctttccttgtgtttttaaatactttttgcacacttaagtctagtgaaatgtgcattaggttcataggagttacttgaaaccctttgatgcattgctttccttgatatccatacctttatagatacttctgtgaagtatcaaaatatgatttacaaaaatgcttagccttgcttagatcttgtggatagaggttgtcctcaatttaaccatggagaggatagcttctacctgcaagaatattttcgtttggagcaatagtgggatcttactgcaaagttccctgtgatgctctttcatcctaaggaacagacacaatcctaaggatggaaatacttaaatcgagacttgggctaggaacaggtgatgctccgcccgggtcaattaaggattggatgcgtatgtaggcctgttgatcaaggactatcttatctagccacatgccctgagaatgggacagggtaagcttgaacccggctattccatacatgaaaag

SEQ ID NO: 30717 - DNA, 1885 bp, Zea Mays
ttatttgcaaaaaaaccgcaatttggccgccggaaaccattcgctcatcaaggcgaggagatgagatcttgcagcggagagcatatgcctacaaagttctcaccccagctggttccctccaatattcccctccgacgatggaatatccccgcagttccaacccaggcccgccttcttcatcgtcttcagtccttctcccgcttatatacgcaacggcgacctcgccctcttccttgctcgtacaaatcatcacacgcagccacgcaggtagaacacaagcgccgtgcacgcttgcgcaagcccaaggattgccgctctgctctgtctcctccggtggccgcaggggcaatggcgattggcgggaaggaggtcaaggatgacctggaggaggcgccgccgccggtcctggacgaggccatgcggccgcgccgcgtcgcgctcttcgtcgagccgtctccgttcgcatacatctctgggtataagaaccggttccagaacttcatcaaacatttgcgagaaatgggggacgaggtcattgttgtgaccaatcatgagggagttccccaagagttccatggcgccaaggttataggttcatggagcttcccatgccccatgtatggaaaagtacctctttcgctggcactcagtcctaggatcatttcggaggttgcgaagttcaaacctgacattattcatgcgtcttctcctggaattatggtttttggagctctagctattgccaagctactcggtgtgcccctagtcatgtcctatcacacccatgttccagtatacatacctagatatacatttagctggcttgtggagccaatgtggcaagtcataagattccttcatagagctgctgatttaactttagtaccatctgctgctatcagcaaagattttgaaactgcccaggtcatatcagctaatagaatacgcctttggaacaaaggtgttgattctgcaagcttccatcctagattccgcagtcatgagatgcgagtcaggctaagtgacggtgagcctgaaaaaccactggtaattcatgtcggacgttttgggcgtgagaaaagtttggattttttgaagatggtaatggaaaggttgcctggagtaagaattgcatttattggagatggaccatataggcgtacgccagcggcgatgttttcatcatgccatcggagtcagaaacgctcggccaagtggtcctagagtccatgtcgtcgggggtgcccgtcgtcgcggcccgtgcaggcgggatccccgacataatcccggaggaccaggagggcaggacgagcttcctgttcacccctggtgacctggacgactgcctcggcaaggtccagcagctgctgacgaacagggagtttagagaaaacatggggcggacggccagatccgagatggagaagtgcgactggcgggcagcgtccaagacgatccgcaacgagttctacaatgctgctatctggtactggcgaaagaagcatgcggagctggtgaagccgctgcagtggctggcacagatgttcctgccggcgcctgaggtccgcagcatcatgcaatgctgagtgaggatgctgttgcttgcagacatgatccagacaattgatggacggatgggcagatgcatatgcactccttgtaaattgaaattgtatgatgtatagtgctgtgtcgataggtgagatagttccccgtttttgtatggaaactggtattggactgtgattggtgtggcaattccatcgattacatgtgtcttgtgtagcaaaacaaaattggaattgtgctatatcttgctggacattgtaacctgtaaattatgatcatgccattttatttaaccgaagcggcaggagctttggca

SEQ ID NO: 30718 - DNA, 2338 bp, Zea Mays
ccccaggcccccactgcaggcccaccaaaagaaaagatcacgacgcgacccgctcgctctcgctctcgggccccagtccgatcgggtcggtgcctacccacccccgctggccgccgcacccaggcgaggcgaggcaaggcgcgtcccgaacaacggaaccaactgcaccgaccgagtcaatcaatccggcgagtgaccgagtggggtaggttgtgtgcggcatgacgaccacgcgcgaccgtggcgccggcggcggatcggcgtcgagggtcggtgacggggacgtcgacctgggcgagggctgggactggggcgccatcccgcggctcctctcctccgcctgcctcttcctctgctccggagcagaggctgttttggttgctgcgataagactgtaaagcaactgggtgaactgtccagaaacttgatcacccaggaccaaattaccattggagagccattttggagcacaaccaccatcgaggttgaaccagcagatctcagtggtgttacttcagtcaatacatctaacttggcctctggaactggtagcagtcataaccttcctggacttggtaataatggacttgttctgtgggaacatacaaggcaggagtggactgaaactagaagtctgcggctgaaggtgaagcaggttcgtgaaccagtattgaggtatgagtgaatgaaatgacaaccagaacccaaaaagtttacctttacccatatcacgtttctgtcagacaagtatgtattctataaagtacatttattttaccaaatgcactttggcccttcttcatattaaaagcaaagggttatgctgggatcaccagcttttcagatcaaacctcagaataacatgttcgtctatcatcattttagctttcagtaacaattttgtctgcattcttatggaaacataaatattttcatctataatttagtttatatttagaggcataattttgttctcctgaagtttgaaattattgtgatggacctgttcttatccaggtgatatcagctgtattggctttgatggtttcagtttctactgaatcttccaattgtgtgctgttagtctaatttatcacttcattcatgttgtgcactatatgttgctcaagcccaatatgttctttcatgcactccctacgatttcacaatatttgctcatcatcctcactagcgtcattgggaacacttctacacctattttaattgtagggattaggaagtgattaagtgattgtaaaacaatatctgataaggttatattgagcttggtcatgcatactgtaaatggttatatctcatgtgacctgtaagttctacaacatattgtctaagaaacttccataagcaacaaatagcgtacctttgaatcaaatttgatggcagctgctcattttacaagaacaatgcagtgaaccagctatgatgttaattgaataagaaaacggacagtcagtcttatttctctacaatttgtttccggtgaaatagatacaaggtttttattccattctgcataatatgctgatatcttattttgcttctgattgtgtatttcgtttgtgcaaccccaagaagctttaaggaatgctatcttattgactggagatttctgtgattgtgctaaaaaatctatatttccatatgcagttggaatgcagcatatgagagtctgcttggatcaaataagccatttcctcaacccattcctcttcatgagatggtcgatttccttgtggacatctgggagcaggaggggctgtatgactagcgcaaatgatttcatgggataacatctgggataacacatagttgttcctcaagagaggggaaaaagaatgacatagagggtgtaggcttgggatgtggtgatgagttggcctgtcatacttgttttttgtcaatggaggcctgctgtacttgcagaatacagagctgtggttgtaagcttgtaagaagtcctgatactaatagtggctttgtttaatttgtcaaagaaaggtgtgtgaggttgagttgtgacaaaagtggattaggcctgctgatgggtttggattgaaatgagtttaaagggctgtgttttcatgtggttgcattttggttgggtagaaatgggttgatttactaagcgagctggggtggattaggtttaatagaaaattaagttgatgggttagtattgacttttttgggaggtttgaatgggcttaacctatgagtgtgttgtagtatacgtatatattggtttgaaaggaaattaatcgctgagtgtaacatgtacacttaaagtggggcccacgtgtttatattagcacactaa

SEQ ID NO: 30719 - DNA, 3648 bp, Zea Mays
aagaggccatggacataactcaaagccaataaggccatgggcagaggcagcctatagctgtaacgcaaaaaccttgcgagtccctccgataaaaagccccaatccctccatcccacctgcgtaccactcgtgtgctcgcaaacaagcgtccgagttcgaggcgtggcggcccgttttgcatgttgcgtttgcatgccgtagcagctctgctgccgatgttcctccccttccgaacccctcgccacctcctcgtctcgtgattcgaatcactgccccgctcccattgcgaacgagccagccgccacagctgttgccaggctcaagcggaagggctcgggttcccagacgtgccgggcgatcgatcggagagaggcggcgactcgggatcgggccgggggcgcggcggcaactgcacacacggggcgaagcggcggcgatgccaacctcatcgccctttgtcggcgacagcggcaccgcgggctccccgatccgcgccgagcgagcggtcggtgagcacggccgccgctacgacgtcttcgcgtcggacgcgatggataccgacgccgccgaggcggcctccgcttcggcgggggccttcgcgctcgatggtgtccactcgcctggacgtgcgtcaccggccaacatggaggacgccggcggcgcggccgcagggcacgccgcgcgaccgccgctcgccggctcccgcagcggtttccgccgcctcggtctccgcggcatgaagcagcgcctcctcgtcgtggccaaccgcctgcctgtgtccgccaaccgccgcggcgaggaccactggtcgcttgagatcagcgccggcggcctcgtgagcgccctacttggcgtgaaggacgtcgacgcgaaatggattggctgggcgggtgtcaacgtaccagatgagattggccagcgagccctcaccaaagctcttgcggagaagaggtgcataccggtgttcctggacgaggagattgtgcaccagtactacaatgggtactgcaacaacatcctgtggccgctgttccactatctaggactgccacaggaggacaggctggcaacaacgaggaactttgagtcgcagttcgacgcgtataagcgtgctaaccagatgttcgctgatgtcgtgtaccagcactaccaggagggggatgtaatctggtgtcatgactaccacctcatgttcctgcccaagtgcctcaaggaccatgacatcaatatgaaggtcgggtggttcctgcacacaccattcccgtcatcagagatttaccggacacttccgtcccgcttggagctgcttcggtcggtgctatgtgctgatttagttggattccatacttacgactatgcgaggcattttgtgagtgcttgcactagaatacttggacttgagggcacccctgagggcgtggaagatcaaggaagactaaccagggttgcagcgtttcctattgggatagactctgatcgtttcaagcgagcattggagcttccggcagtaaaaaggcacatcaatgaactgacacaacgttttgccggtcgaaaggtaatgcttggtgttgatcgacttgacatgattaagggaattccacaaaagattctggcctttgaaaagtttcttgaggaaaatccagattggaacgacaaagttgttctactgcagattgctgtgccaacaagaactgacgtccctgagtatcaaaagctcacgagccaagtgcatgaaattgttgggcgcataaatggtcgattcggaacgctgactgctgtccctattcatcatttggaccggtctcttgatttccacgccttatgtgctctttatgcagtcactgatgttgctcttgtaacatcactgagagatgggatgaaccttgtgagctacgagtatgttgcatgccaagggtctaagaaaggagttctgatacttagtgagtttgctggggcagcacaatcccttggagctggcgccattctagtaaacccttggaatattacagaggttgcagactcaatacatcatgctttaacgatgccatccgacgagagagagaaacgacacagacacaactatgctcatgtcacaactcacacggctcaagattgggctgaaacttttgtatttgagctaaatgacacggttgctgaagctctactgaggacaagacaagttcctcctggtcttcctggtcaaacggcaatccagcaatatttgcgctctaaaaatcgtctgctcatattgggtttcaattcaacattgactgagccagtcgaatcctccgggagaaggggtggtgaccaaatcaaggaaatggaactcaagttgcatcctgacttaaagggtcctctgggagccctctgtgaggatgagcgcactacagttattgttcttagtggcagtgacaggagtgttcttgatgaaaattttggagaattcaaaatgtggttggcagcagagcatgggatgtttttacgcccgacttatggagaatggatgacaacaatgcctgagcatctgaacatggattgggtagacagcgtaaagcatgttttcgaatactttacagaaagaaccccaagatcccattttgaacatcgtgaaacatcatttgtgtggaactacaagtatgctgatgttgaatttggaaggctacaagcaagagatatgctgcagcacttgtggacaggcccgatctcaaatgcagctgttgatgttgttcaagggagtcggtcagttgaagtccggtctgttggagttacaaagggtgctgcaattgatcgtattttaggggagatagttcacagcgaaaacatgattactccaattgattatgtcctgtgtatagggcatttccttgggaaggatgaggacatctatgtcttttttgatcccgaatacccttctgaatccaaagtaaaaccagagggtgggtcagcatcacttgaccggaggccaaatggaaggccggcatcgaatggcagaagcaattcaaggaacccgcagtccaggccacagaaggcgcagcaggctgcatccgagaggtcgtcctcatcaagtcacagcagcactagcagcaaccacgactggcgcgaagggtcctcggtcctcgatctcaaggccgagaactacttctcctgcgccgtcggaaggaagcggtccaacgcccgttacctgctgagttcgtcagaggaggtcgtctccttcctcaaagagttggcaacggaaacagctggcttccagtccagctgtgctgattacatgttcttggataggcagtaaatagattggagcctccgtgctttgccagacaagcacactggagaggggaaaaacccattcattcctcaaatgcgcgacggagttacacccagcgtgttgtacaatcctgtacaaaatttatgctcgtgataaaactgcgagagggtggagcaaatggaaaaggataaaattagtttagatttagatagtttcgttgcttctggtacacaatcgacggctttttttatttctcattacaaattttttgagatgcgcttttgaactggttggtattgttcacatctgaaatacgcctgcgccatgagacatctcatattcttttttatctcagtaactaacagcacataacacgacaaaag

SEQ ID NO: 30720 - DNA, 2015 bp, Zea Mays
cgagccaacggcgcactgcaggaaaggccccaccctctcttccttctctttccctcccactctctcggtttggcgcgctgcaaaaccctaaaccctagcatgtacgcacgcaaagccgcgaaccctaaaaacctcccgcgtaagcacctttgtgtggcgtctgtggcgaaattggacgccatggcgacgcctaggcacgccaggcaacgccatacgcatccaaggcgcggcgggatcgacgcctagaacctaggctcgcctggacgcctaggcgacgccataataaccttgaggataacactacttcaaaggaaaccaaacatcaactcctatctctggtcttcttttcctttggggatgtctgagacagtgcgtacgaagaagggaggcgagaacaaggaagcaccgaatcacacctcaagaagttgtctgccccatcctgatcttgtctcttccactgctgacgctgatctaggaaccaccggaagtaggtaaatggggagtcagaacgaagagttgaaagccaaggccgagattagattggggacaatgttttcaagtcagacgacttgctgatcgttctggctgatcgactagggcgattaattgtgattggtccaaaccgacttggacgattaatgggacaacttgaaaacattgattggggaaagtgcataatatgccttttttactatgtagtgaatagataaggagcattggaagaaaatatttaatgaaatgagtaaagatgttgccttttatgttggtttctcatgttatttagactgatttaataatatataaatttcaatcaaacaataagtcaataatactccactttgtgtattatgatacctgtgttccaaacacctgcttcttcagctttcctgtctttttctattcctctattttgcacgctcattcctttcctattcgtacattttctacagttctgcgttccacattcctaggttccaaacataccctaatggtgtgtttggtttgtggagtcaccatatgcttcatgaggaccgagcaaatgaaatctacaagaaagttgaagatctcaaatctatcaggggaagaaatcaagatgccatattagctgcatgcctatatattgcttgtagacaagaagatcggcctagaactgtgaaagaaatatgttcagttgctaatggggccacaaagaaagaaattggcagagcaaaagaatttatagtgaaacaactggaagttgagatggggcaatctatggagatgggaaccattcacgctggaaattttctgagacgtttctgctcaactcttgggatgaacaatcaagctgttagggcagcccaggatgcagttaagcactcggaggagcttgatataaggaggagccctatctcaattgcagccgctgtcatttatatgataacccaactctcagaggacaagaagccacttaaagatatatccttggctactggtgtagcagaaggcaccatcagaaattcgtacaaggatctgtatccttatgcctcaaggctcatcccgaatacctacgccaaggaagaagacctgaagaatctctgcacaccttaggaggcttacttttttccccctttctgttactacataattcggaattagatttgtcaaagaggagtgagtgaagttgttcctcgttgtgactgtaccgggcaaggtgtcgtccccgccgtgcttaactttatgatggaatttcttttcagagcacctaccacctgaagatttgtgggatacgtatactcacttcggaaagaatgtagatagcaagcagttggacaagcacaagattttaatttaaaacatgattttgttctccatcttctgaagaaaccatcacttgtccatctttattctaagtgcccttggattccaagagaattgttagttggctaaaaattgggtaaaattatgatatgtttggactggcagccccaatctagtcctattaactcctatgttgaattactaactagttttag

SEQ ID NO: 30721 - DNA, 2376 bp, Zea Mays
gttttttgcaagtcagctctcagaaggttacaatgtataagcaacagccagaagaggatcacattgtgtgctcaaggcctgacataacaagttcaggtcccatcaaagtgcaagacatacagggccttccaaagcaaccaaatcaagcttcaaatctgcaggttgttgctggtgtaccagatttacttattggtcagccaaaaccacagactattaaaactgagcctagttctcaggaaaacaaggcagctcactgtgtcgatttagtgagtgatgaccatgaaagcaataagcaaggcctaggggatgctgcagttctttcaatcgtccaaaaagattcatccaatttaaaatatggttcagtatcccatgaacatctgaaatcggaagcacaaaatccgaggcacacagttgctgagaatcctaactcaactttgggttctgcaaaagtttgtacatcgttttctggttctgtctctacaccacctgagttatcacactctctggcatctaaagaaccatcatcagggaatagtgattgttcaaagaaagaggagttgctctcaccaactgtcagcaaacatgatcccgtgaaattttctgaagatagttcccaggaagtgacaagatactctgagaaagttcaactaaaagactcacaaccttctgcaccaaaatcatctcaagctagtagaatacatctgtctacagtcaaacatagattaccggtgtcaaaggagcaatcacagaagatagccctcactggaggcacctcagcaagatcattccatggagaggtgccatcacttcagtctcgtaataaggcagcagcttgtagttcttcccagaaaaaggacaagatctaccagcgcatcattaatgtcacgcaagatagttccaataattcagcaccaaccgagctgcgtgcatctgattcggctgccccattgagtgatgagcagcttgcattattgttgcatcaacaattgaacagctcccccagagtaccgagggtgccacgttgccatcaagcagctggtgcacagatgcttcattcaactggatcatctgttttttctaagcggtattcatcacatggaggaagggatcatgcagcggttataaaaaagagaaacagagaagattcattaaaagatagcgaggacactaagaggacagaaaaaaggcatagagtttctagcacggagcatgctcctgtgaaaaactcgtgcagatcagctgaaaatatagcatcagaacagaaaattcgtggcatatgtccaactggagccaatgctggtttatcaaaggatgatttgatggatactattgtttcacacaatttacctggattgattgatgaaattgtcagtaaagacaggaatataacatatgtggaactctgtgatgctatccatcagcattttagggactcaaggaaatcgaatgggggagattctttgtatcgcagttatgcggatgccatcaaaggttgccttaggaagaggagggagtgggctcacctttttgaccaagcttcaaaagcgaacaggggaaagcaactcattgttacctgacgtaccggacgcagagaacataagaactggacctgatagggattcagaggggagtgctgatttgcatcaggataatctacctaggggcaaacgtaagtgtcggaaacgcaggcgacttgagctcaaaggtaggagagtcagggatacaaggaagagatccagcattgattcttcctcagaagatgctgctgcccccttgtctgattccagtagtgacagaaatagtaatcccagggacgacgagagcaaagaagataattctgttgcccaagaaattggcggttacatagacgctaagggtgcagcttcaagtacataatattcaactggtggtatatgcatatgactagaactgaatcttgtggtgaattttcaagttggtcagtgttcgatggatttctttatccatctacaaatctaggaccaaaaagaaaaatgggtactgcagtccgcatcaccaccagtcctttgaaagagcaggaaatggaggagtttgtctaacaaatctgttatgttcaacaatggtgtatatattattagtcagaatttagccttgcgctattatgatagaattagttgcctggtaaacagtggtaacaatgttgttttgtttatttaatgtatcgatggaccatcttatgtatgagtgaattaagtagacattttcgtgtcgagtatgataaattgttagattgctaggttaaataaatctgttcttgtttttgaccacttgtctattcgataaggcatgtaacctgtaatatgcaatccactagtattcaattgctgtggctcgttt

SEQ ID NO: 30722 - DNA, 1095 bp, Zea Mays
ccaatccgcatcacagcttgccacttcagactcctctgcgctccatccctctgcactccggtccgcgcgagacgagcagcttctcccagacgctagacacgccaccgcatcgtctgcgccgcgagatcgagaatgtccatctctatgcggctcgcgatccctgctcctgccgtcaccgccgccgcgccgacgcggctgagggtgcgagcggcagcggcggggaaccgcggctctctctccgtcgcgcgcgccgccgtacgggcggagacgggcgcgctcaggggatgcgcctcgctgccaaagaagccgctgggagcggcccagccgtgccggagcagaggggccgccgccgtgtgtcactcgtcggcgcacctcagcgcgcgcaccatccagtggatctccgccggagccagcgcagtgctattagttgctaaaggcactgccatacacaaatctttccttgtgccattttttgctcttcaggcaccttgcagcataatctcatggatcaagggtgactatggtcagtggactgcttttcttgctctgttggtgcgtctattcttcttcattccaggggaactcaaggtggtgccgtactgtcactggccatagctgcgtatctcgccttccagcacttcactagggtgggcggcccaggcaaagccttcgagcagggatccattgttgcgaccttggccatcatctgcatcatgattgtgcccttgatgcttctattctgatttgcatttagttggaatgaatttgcttctcattatgtgcgtatagaaggacaaataaatttaaccttgtaatgcagcatccgagttctctttcccaaaacgtatgcactgatatatccttccctgttagtgctcttcggtggttattgctcttcggtggttattgagttctctcagcatgtttattctcttgttggatcttgcatggactataatttggaagccacaaaaccacctgagggcttgtttggacaatctcggattgaagtagattgagctggtatgggatgtatcgaagtgtaatatgaactaatttctctttcaatcccttcaatacacctcaattcgctcc

SEQ ID NO: 30723 - DNA, 1431 bp, Zea Mays
tggagtcgccgtggcgccgtgacattggctcgctgaccgtagcctgccgctcgcatcccgctataaaagctccccacgctgcttcgccatgccccaggcccaccgctagcatccgcagttcccccgcgcccgagacgcaaccccgcgccaggagtttgttcttttatcgatatggcgagggaggagaatgtctacatggccaagctggctgagcaggccgaaaggtatgaagagatggttgagtatatggagaaggtggctaagactgtagatgtggaagagctcactgttgaggagcgtaacctcttgtcggtcgcatacaagaatgtgattggggctcgccgtgcttcatggcgcattgtctcttctattgaacagaaggaggagtcccgtaagaacgaagagcatgtgaaccttatcaaggaataccgtgcgaagatcgaggctgaactgagcaatatctgtgatggcatcctgaagctgcttgactcccacctagtgccttcttctactgctgctgaatcaaaggtcttctacctcaagatgaagggtgactatcacaggtatcttgcggaatttaagactggtcctgagaggaaggaatctgctgagagcacgatgatggcctacaaggctgctcaggacattgcgctggctgagctggcacctacccatccgataaggcttgggcttgctcttaacttctcagtgttctattatgagattctgaactccccagacaaagcttgcaaccttgcaaagcaggcgtttgatgaagctatctcccagttagacacccttggggaggagtcatacaaagatagcactctgatcatgcagctccttagggacaacttgaccctttggacctctgacctcacggaggatggtgctgatgagggcaaagaagccccgaaaggtgaggctggtgacggacagtaatcttgggagagcgcatattgttcgagcccattgttttagatgctctatgctgtcgaagctgaagctgtgccgtgctattattgtagctgatttcctgttccctcacttctttttttatattagtaggctggtagtgttcgaattagttccccattgctttgtgttgccgctagttggcattaagtccgtgtggactggtattattcactggatttgagaagcatgtcagtggttgctctagcgttttattgagttttgaagtcatctccctcatttcggtttcaatcatttagcagattgtgcatatggttgtgtaaaacacagttttgcacaattgcacaatttacgtagtgtggtttgaaataagagtgagatttgggctggatgtgcggttggctgtttgaatctgctctttagggcctgtttggtagggaggttttgaatactacagtttttagaataccacagttttcaactggaagtgacaca

SEQ ID NO: 30724 - DNA, 1450 bp, Zea Mays
agttcagaatagaaggatataacatgggagaccccgagactgcatggggttcagttcgtgcagcaatggggcatccagagccctttcagctttattacgtttcaataggaaatcaagaatgttcaaagtactattataaagataactatgtgaagttctactctgcaataaaagcatcctatccagacatcaaaatcatatcaagctgtgacagatctgctatttcatcagacaacccagctgatttgtatgatgtccatgtctatacttcatcaggtgatatgttttccaaatctagaatgtttgataatacagcccgtaccggacccaaggcaattgttagtgaatatgctgtaactggaaatgatgctggccgaggaacactaatagctgctttagctgaagctgcatttctcattggattagaaaggaacagcgacgtggttgagatggcaagttgtgctccactctttgtaaacgacaatgaccaaaggtggaacccagatgctatagtctttaactcatggcagcactatggatgtccaaattactggatgctgcactttttcaaagattcaagcagcgccacacttcatccgtccactattcaactaccgaactacgaccaactggtcacatctgctatcacttggaataacccacatgatgggaacacttacatgaaaataaaggttgtaaattttggaagcaaagctgttagtctgaatatatctgtaactgggttggaaactgatattcagacatttggatccataaagacggttctcacgtcgggttggctgcgggatgagaactccttccaacagcccgacaaggtggtgccggcggcaagtccaataaccaacgcgggcaagcaaatgggtgttatattgaactcgtactccctgacctcatttgatctcctcttggactcggagtctcaggttcgagcctccatccaagcttatgattagtgtgagatgtgtcgtgtgcgtgcccacaatactcaataccgagatacgggtccccccaaggctccccacaaggctttcaatagaaaatacgatatttgtgaattattgtgaagtacaggcgtacagctggctatgtgtatgagattcaacaaatggtttctacgaccctaataaaggtataaaagcacctttcctcggatatcacacatccgttgtagtctgcactcttgacattttctcttttttagagcatgtacagtgtacctaactaccgcaaactttttgtcctggtgcactacagcgaatgtgccatatataagaataaaaagaagggaaatataaccgtatccatttgtgtgtgtaaccatgtaatcaaggcgtagggatggaggttatagactcaactgatatgttcttgttgggggtttactctgtcgaaggtccttataaaattttcactttagcataaacaaata

SEQ ID NO: 30725 - DNA, 764 bp, Zea Mays
agagaaaagtgttctcggaagcagaggagatggcaaagagatacagggagcagcttccagttacccctcagaaccctatattagatgatggccttccaggagaaaagctaccatttgataacgaaactaaactgtatgcaaactggcaatggttcaaatttctgcatcatagctaagctgctgacaacagcgacagagacatatctggtacttgttgaccatgcaaaggtgaactgtcgctagagaacctgccaacctgttgaagtccaatactgaccagtggtgggtagttctccacttccataacccagcatcagtcatggagaagtatgttggacaggaacaggcaacttcatcccgcagacaagatagggtacaaggtttccaggctgcagaacattggtgtttcgaattgcctcattcctagtgcccctggagtgaaatgttgtgatatcattttatctgtccggagaatgtagcttcattgcattcatgttatgtcaaaactagtcgggctgcccaagcactccgtgccaacaacttgcatctgcccatgaaatagattctgaaattttagcaccgtgtccctggattgctgaagtatcgtgatgggcgcaagggagtacctgaattattatgtacactctacctggctagtcacaactggcagtcctgttagacaaaattggagtccaggaaaagaggaggaagattatgggcttggcccctgcccagccggtttgccaaaagccagttgccctcta

SEQ ID NO: 30726 - DNA, 2947 bp, Zea Mays
atccgtcagtgcagtcaagtagtcaccggttcacgcaaaccctagtaccaggccgccagtcccgacctccccggctccagcccccgcgcacgaccagctctgacgaccccgctcctgcctcccacctcctccggtggcctcgcgcctgactccctcctccggcacccaggccagccgcgccccgcctctcgcacaggacggaaatgatgccttctcctttttgttagctgattctgatcaaactggagcacttagagcaaccatgggggggaaatcggagcagaagtctcgaaaagagaggcggaaagaggcgagatcagagaagcacaagctgcgatttctttcttgggttgggcatcagggtggcaaaaagaagaagccgtcaatgtcagtagtagagccaagttcggttgaggagaagccaaagaaagagcctgatggcatgatgaagaagaagagaaagagggaagcagagggtaagcggaagcccaggtccaacttccaggaatatcttgagatggagatgggtggacctgtgagcatggaggaggatctagagatggagaggaagcttgcaaaaaagctcaagttgaagaaaggaaagttgggaggtcctgatgatggtatggatgacctttttgcggaccttgggtttggtggtgactttggttcagatgatggtgaaacaaaagcatatgattggaatgtggtggaggacactaatttagacaagagaaaaggtaaaaagaaaaataaggagaaaaaggatgacacagtgatggaggaaccagatgacattgatgaagagaatggtcggaaaaagaagaaaaaaaagaagaaggatggtatggagaaggaggaactggttgatgtaggtgaagagaatggtcagaaaaggaaaaagaagaagaagatgaaggatgactcagagatggacgaaccagatgatgaaggtgttcacatggatgaagagaatgatggagcagtcctggaatctgaggatggagtgtctaatgtggttgaactgcccaaagaatcaaaagggaagtatgtacctccgagtctgcgtaatgcttccaattcagaatcagaagaaattgcccagatgcgtcgcagagtaagaggacttctgaacagactttcagagtcaaatgtggagtccattactcaggaaattgccacactttttcgatctgttccacgaagtgatggctcccagataattggggatgaggttttggctagttgttcccgaggacctcgtggcaatgaacagttaagggtctcccatcaaccatgtatgccgctgtctttgcagcctttgttgcaggtatggcatgtttggtcggtgttgacttcagtgccaagatccttgcatctattgctaagtcatttgaggatgagtattcaaaagaagatggtctatctttgagaaaccttaccttactcttctgctatttgtgcatatttggtgttacctcaagcgatcttgtgtatgatcttctgtcgattctgagcaagcgcttgacagagctagatgtctctacagtgttgaccatcctacagtgctgtggaatgaagctgcggggagatgatccatgtgctatgaaagattttgtccttagtattcagaactctgtgaatgatcttaaattgcactctggtgttggagcagacgggaagactgatatacgtagcagaagaatggaatttatgcttgaaaccatatgtgacattaagaacaataagaaaaggcctaaagaggatccttcacaccatactcgaataaaaaagtggcttcaaaagcttaaggcagaagatgtcctcttgcgtgggttaacatggagcaggcttttggaccctgataagaaagggcagtggtggttgtctggggatgttccatctacagtagctaagattgaagatgttgcagctgttataagcaaggatgttgcagagacaaaaaaacttcttcagcttgcagctgctcaacggatgaacactgacatacgaagagcaatcttttgtattataatgagtgctgaagactatgtagatgcttttgaaaagctcttgaggctgggcctttctgggaagcaggaccgagaaattataagggtcattgttgactgttgtctgcatgagaagatgttcaataagtattacacagtccttgcttccaagctatgcaaccatgagaaaaaccacaagttcagcttgcagtactgcatctgggaccattttaaggagctagataatatggagtcaagtagatccatgaaccttgcgaagctagttgcggagatgctgttgaacttcacgctctccctcgcaactttgaaggttgttaacctggccaacccggtggagatgactccggcaagggtctcgcatttccggatgctgtttgagaccttgctacagaaagacgatgcacgcgtgtggaatgtcttcactcgtgtcgctggccttccagagctcgaggtattgagggatggcattgtgatgttcatcaagcagcacgtgatcgccgaggactcagggaaggacttggctagcaaattcaagattgcgaagaaggcgctcgacaatactgccggagttctgatgtaactctgcccttgtcgaacattctgggcatctccaagtaaaacaaagttattagaacattctgctggagtcctctgttctcgttttgccttgttattagaatgcttctccaagagacctttcatgggttttgaatgcttacccaaaaaaaaggctttgatggtcatacattgtaccatttcttagaagtactctctgtttattgtttagctgcacatgaagatccttaggctatctgcactgccacatggtatctattgctccaaaagtgcgctgtaacaaatagagcaaaattgctccaggacgccaatcactacggcaccgtttgtttgggctt

SEQ ID NO: 30727 - DNA, 4058 bp, Zea Mays
cctcaccccaccccaccaggccatcacagtccacgagcacaagcatgctagccgccaggacccctgtctcgctctcgctccaccaccgcatcgtcgccggcggccaccgggggcgatgcgtcgggggcagccaaaggaggcgcggtggcgcgccgtgccgccagttcacccaggcgctccagagcctctggaggcacagtcccccgatccctcctcctgcgcctcccgctgccggcgctgccaccagcggcgaggccgaaccctcgcggcagccgccggtactcgagaacgctgccttcgaggagtactataaggttcagcaaattgtccgcgaggaggagtgggatgccttcatgagtgttctacggaaaccattaccagcgacttttagaatcaatgcctgttgccagttttataaagatatctgttcaaagttagaaaatgaatttaggcgatctttggagagtgagtcttgcatggcacctgaatttctcccggaaggaattgaggaaaaatcaggcactcgaaagttttcatgagtttctgaagcatgagagtgaggttggtaacataactagacaagaggctgttagcatggttccaccactgtttctgaatgtacaacctgatcaccatattcttgatatgtgtgctgctccaggctctaaaacttttcagttacttgagatgattcaccaatcaaaagaactaggtctacttccaggagcattggtacgtttctccctaagttgcatctggcactaaaactattgctcgtgtaactcttgatgatttttggagtcatgttagttgttagtattcaattttgttacatgtagctagtagaactagtcgttttataatttccaaagacttatgagaaattaatactttagttatattgatatggcctaggaccaacttggcccagtaaacggctcagtctggcctgtaggccgtggcgccggcatggtaaggactaaggaggacctagagcctaggtggctaggaggtctatctcctgtagtcctgtactacccctgtccctaagtcagtccctatatatagaggccccatgtacccttgcaacttaaggagaagtagatcaaagggacaaagggttagcccatcttttcttcccctgacttgggcgttgtcctactggtcactcttcctgtcctctcatttctccccaaatccccctccctaatctggggcaatctaagtactaacatatatattctcccttgttcttgtgagactggttaggtgatagccaacgatctcaatatgcgaagatgtgacctccttatccataatacaaagagaatgtgcaccgccaacctaatagtaacaaaccatggagcagaaaacttcccctattgttctcttgcaaaggattgttcaggttcatataaagatccctgcaaactacaaaagctagaattcgaccgcatactttgtgatgttccgtgtagtggtgatgggactattcgcaagggtcatgacatgtggagaaagtggtaataacaggatctttgttttgtctgctgttttatgcttccctgtatgtatcctcaggtcgcaatctgttattgttgttcaggaactcaggcatgggtaaccaacttcatcttctgcaagtaaatattgcaatgcgtggtattgcgttacttaaagtgggtggaaggatggtctattcgacttgttcattgaatcctgttgaaaatgaagctgtcatagctgaggtatctactgtagttgcttacttttagctgttgaacataaagctgttatttattttgtgacttatagcctagatacgagcaaaatctctgcgttgagcagtttatgttagagttgatatctccttaggactaatgactgagtcttaaggggcatggggacccaccacctctatgggtatgtacaaccttgacaccatagtagatggtacgatttttttttaaagtagaagacacaacgaagacacatgtagttacactgggggtgtatctaaaccttatgtcttaattaataaaaattctctaagacatgactctttatgtgtgtttactagtgaagctgtgtcttaggcttagaaaaccgagctagaggtgtgtcttcatttttttacacttaccccataggcacacattaatatgcattgtacatgccctaactaatgcacaccgtgatcggaggtgctgactgcttcctactggctcggtcccatccgatgcgatgccataagaggggttcctggtgaccaaaaacgtgtgcgaggacaccactcagaatgaatgtgctcccctaatctaccaatcgagagggcatggcagtcaggtgaagaccgatgcacatggcactccactgcacatccctgccctaatgatctgctgctaattgagccattgagctccttcgaagaagtggaaactctgttgaactccttgatgtttctagcgagctacctgaattggttcggcgtcctgggcttagcacttggaaggtacaagatcgagaatcttggtttcagagtcacgatgaagttccacacaataggaagaatgtagtatttccaagcatgtttcctgcaagtaatagcaccgaggaaagccataccgtgtgtggtgatgttgaagtgaacataaataatatgaacagcttctcaagaaatatcaacattgaagaaacaagcaaacttaatcaagatatggatggagtttctgttagtcccactaaaattttggaatgcacttctaacattgtgagttcaaagtttccactgcatcggtgcatgaggattgttcctcatgaccagaacagcggggcatttttcatcgcagttcttcacaaattatcgcccttgaatggcagtcagataaaggatactaaaattcagcacagacttgggacagacagaactatacagttccagaaagagcccaagccagaaacacgaccctatgaaactactttgacacgccgtcagcacaatgtttctgaagttgatgatactgaagtgcttggtaggggacagaaattaggcacagacagccaaacttcaaaggataagaactcaagcgaggtcgaaatagttagcattctagcagagtcaggagatagaatggagttgcaaaagcaaagcaggtgggaaggggttgatcctgtcttagttttgaacgatgaagcggtgataaagagtatacaatccttctttggcatcaaggaatcattcccactcgaaggtcatctggtgactagaagtcctgataatgcaaggagaatatattacgtatcaaaatcagttaaagagattttggagctgaattcaaaagttggtgggcagctgaagatagcttcacttggtgttaaaatgtttgaaaggcatagatcaaaggatccctgtccatgtgcatataggttgtcttatgatggattatcgctggtgcttccatccatcagcaagaggatactatatgcatccgcactcgagttccaccgccttgtacagtaccgaagcataagctttgctcattttaccgacaccagattcggggagcaggctgcgtccttgacgcctggttgctgtgttgtagtgttactcgaagggaataggcgtgtagattccatttgtaaggatccctccacaattgccgttgtttgctggagagggaaggggaccattaacgttatggtttctccctcggataggaaggatctccttgaaaggatggcgtatcgatttggatgatggatgccctaacgacgactatggagcttgccttggcatcttgacaaggacctaccttcctatttggttggctgctaattaaaacttggtataccacattaattaattctaggcatgtgtgttttgtttcacattataaagtgggatttgtcaaactttgttacgaatagcaggttcttagtaatttacacacgtcggttggttgggcctggacgaaggaaggatttgtacagatcagatgagagagttttgagtttgcaactatgaactatgtactactatctatctctttcgaccaaga

SEQ ID NO: 30728 - DNA, 2679 bp, Zea Mays
aaaattcgggtcaacggttcacacggtcataattggaagagttcgagttgcttgattgcttctgcggatgcgcttcccccatcctcacccaaaacctaccggcaaaacctacagcccttcgtctcccacacgcactctgccactcatctctaggttgtgtacgatcatcagcgagaggagctccctcgcttatttgtctctgaaacagacatcattgcttcagttagggaatgaagggagattccagcagacaaaatagcttagaggacaactcacaaatactaagtgcatttccaagggaaccaaagctagaattcctaaaaaacatcacgaaagacttctcaagtgaacgagtgattggacatggtgtctttggagtggtttataagggcatacttcagaatggacaactggttgctgtgaagaagcttgtgcaaacatccggagttcatgatagacggtttcagaatgaggcaggcaatctccagtttctggagcacagaaatatagtcaagttacttggttcttgttaccaagtagaaaagaaattggtggagagaaacaacaaacattttctatcagatgttccagaaaagtttctatgctatgaatatctgtctaatggaagccttgacaactatatttacgatgaatcttctggaattgattggaccatgcgcttcaaaataatcttggggatatgcaatgggttacattttctgcatgaggagcgaagtgaagccatagttcatttgaaccttaaacctagcaacataatgttgggtgacgacatggtgccgaaaattgcagattttgggctttcaaggttgtttggtgaagaacaaaccagaactctcaccaaaaacgttgtgggatggataggatacattgccccggaataccattacagaggagaaatatcagttaagtcagacatattcagtttgggtgttcttattcttgaaatagtgacaggactgaagagggacctcaatattcaagacatttcttctgagttactaattgacaatgtatctaaaaattggacagaaatgtcgcatatagaatcaaagtatccatccttggaagaacaacacctactacaagtaaaaagatgcattgaacttggtttgaactgtgtggagtctgatccaaagaaaaggcctactgtaggatcaataattggtaaactcaaagaaatcagtcatgaagctagcatacacaaatttatggagaagaaactgcaactgataactgaattcccaagggaaccaaagctacacttcatagaggttatcacaggggactttgccaatgaacgtgagattggtaaaggttcttttggggtagtttataagggagtgcttcaaaatggagaagtggttgcggtcaaaaggcttttggtagttgcaaaaactaatctggataagcaatatctgaatgaagtatctagtctgattgatctcaaccatagaaatatagtgaagctatttgggtattgtaatgaaatacaacggaaactggtggagtcccatggaacatatgtttttgcagacacagaagaaaggatactctgctatgaatatttgcctaggggaagccttgacaagtatctttacggtgcatctcatgagcttaactggaatatcagcttcaaaataatacaaggaatttgtcatggtttacagttcttacatgaatcgcaaagacccataattcacatggatctcaaacctggcaatatattgttggatgataacttaatgcccaaaattgccgattttggtttatcaaggctctttggcgaagagcaaacacgtgcactcacttcaaatgttgtgggatcaagagggtacatggctccagaatattactacagaggtgaagtctcaaccaaatcagatatatacagtctgggcatccttataatcgagatagtaacagggttaaaagtcgattctaacactgtagacttatcgtctaagaaccttatcgacaatgtacaaaggatttggacaaaaatgccgcagatagcttctaagtacccgacgttggaagcaagcaacctccaacaagttaaaagatgcattgatgctgggttaaattgtgtgagcgaaaaaccaagagaaaggccatccgcaggggaaattatcaagcagcttaacggaagcagctttccatctcgcaactagatgcttagggcctttggtctttttctagtttctgaccactaaaagctgatgcggaccgtcaatcgccttggcttttcaatcaccttttatgagaatcgtttcagtaaaaaccatctaaaattaacataaacacataaccgattaagtcgtcacaatagtaggaatatgtcactttctagattatgaactctttggaccacttcattttcttccatacgtgatctctacgatacttagattctcttcacaaccagattctttctgcagccagattctcaaaaaagctggtcagaaaaaaatgaaccaaataggccttagatcttgatctaaatcaaattcttagggcaaattttgtaaccctatttttctaatagatttctattttactaaggcttcgtttgtttcgttggaattgaattccattctaatgatcataatttagacacaaactaattgaattaaaatatttgtatatgtaatatatttg

SEQ ID NO: 30729 - DNA, 2869 bp, Zea Mays
gaagcatcctcttccacagtttccttccgctaccgctagtgacctttccaggacgacaactcccaggtcccgactcccccaaatttcccccttcccttccgcctcgcctccagccaccgcgtccgcctcgcctccagccaccgcgtccgcctccgatggcgtcggcggcggggtcctcgaacgtgatgctcgcgatcaacgagaagaaaacgatcaccactgacctctaccgcccgctgcgcctctacatcgcctccacctactcggaacgcgaggccgctgcggccgacgacgaccttagcgtggtgtgcgacctccgcgctgctgtcgagaagccctccctcccggacccgtcctccctcgagcagcgccgcgacgcgctcctcgcctacgcgcgggctctggcactcgtggagccccgcttccccatctcccccgatcgcgcccacgtccactccctcaccttcacctggcacgacgcattcaaggggaacaagaagtgcgccctcgcctccatccacctcgagaaggcatccgtgctctttaacctcggcgccgtctactcccagatcgcgctcgccgcggaccgctcgactgacgtcgggatcaggatcgcgtgcggcgccttccagagtgcggcgggggcgttcgcgtggctcagggagagcggggccgcggcgaaggctgtcgctgcggggaccaccaccgtggacatcacgcccgagtgcgccggcatgctggagaaactcatgctcgcgcaggcgcaagaatgcttcttcgagaaggttataggtggagggaagccacccgcgctgtgctccaaggtggcgcggcaggtattcactggatcttcatgagaaagaagaaattgctgaggaaattgcacgtttaaagattggtatgagtgccttggcagatgctaagaagactacgaagggagttgctgcccaacttctggattccgtcaacaagctggaaagtaacatgaaaaccaacttggaaagggctatgaaggagaatgatcgtgtttacttgatgcgggttccagctgctggttccttgggtgccctccctgcagcgtcccttgtaaaacctacctctttggctgaagttttagatgccagcaaggaaaggcttttttcatcacttgtgcctgatggcagcatgaaagcactttctaagtacacagagatggtagataatagtatccggacccaggctgagaaattgcagcaagctagtgagatcactagagtcaggctgaaggaaatggacttaccagattctattctttcattggaaggaaatataaccttgcccatggatctgaaggaagacgtagaggctgtgcagataagcggtggccctgctggcttagaatctgagttgcagcaacttagggatttgagcagggtcaatcaggaactacttgtccagactgaagagcttctacagaaggaggcgaatgaagacgctcaatttcgtacacaatttgggagtcgttggactagacctcaatcaagcaccctaacaaagaatattcaggatagattgaatctgtttgcttctaatttgaagagagctgctgatagtgattctctgattgaacgaggcgtgaaggagaactattcattgatgtctatccttgacaaaaggccgatagagtctgcacttccaagtatttccaggcctatcatgtccttggatggaaatgaagatgccattgttggagccctgaaacaaagcttgagacaactggagtctcttggcgcacaaagggcaggtcttgaagacatgctcaaagaaatgaaaagaaaggatgatatattgcctaagttgatggttggcgtgggatcacatgatgatcttttcaagaaggagattgctaagtatgatcctatatgtgctgatattgctgataacattgtggcacaggaacaattgttgctacaaatacaggcacaaaacgagcaatttgctgctgtattcaacctagaggattacaaagctgcccgtgagagatgttacaagcaaatcgctgctgctgttgtgaaataccaggagtttaaaaagaacatcaacgagggcctaaacttttatgtgactttacaggaagcaattggcaaaataaaacagcagtgcagcgacttcataatgacccgaaacattcagtgccgtgaaatgatggaagatgtgcagaggaagctacccggcttcagattctcgtcgtccagccgctcctctatgcagaggaatgctgcttctgtgccacctgacgagagcagcccatcaccgccaccgccgcatgcccaggctccctatgcctctccaccaggggtagactcgaggcatggatattctcaaccggaggcaagacctgcatactcgcagccataccccccatcctatggggcgacaccgcaacagccgacgtatggtgcacaacaccccgggcagtaccagccgcctcctggccatgactgcggtcagccggcatatcctggatggcgcgggccatacccatactacaatgccccccagccgcagcaatctgtgccttgtccacaggcgccgtacaatgccactggggcttaccctccgcaccagagcaactattaccgacctcaataagtgctgcaactatttcttattattttgcttcttttttttccattgggtcttaccattctggtgtactactactgcatacgagagagttcgggtagtgtaatagcaggtatagctttgtatgatttagtggcggacccagaaagacccggtccgaagcgaccataaactataatatagtagcatataaaaaattgtacggcgaaacaatgttgtcatagatattaaagatgacatacaa

SEQ ID NO: 30730 - DNA, 3088 bp, Zea Mays
ggtgctctcacctgacctgacattctccgctctcacggtggggtcgtcgtcgtcgacggcgacgactgttctgccaccgtccacccgttctttgtccagcgcggtgcccgcctccgcgccgtccgtgtgctagtgccgcactcgcggcgcacgcgggagggcgcgcggcaccacaagcgcggctcacggcactcgtggccacgcgcgcgccaccccggtgacctgagtggcctgctattgaccatccccccgcccccaattcctcttctctcccaaccactgaaccaccaccaacttcacgtctgtccagccggccagtcagttgccttctcacatcgcaacccccgctgcccgcccgctccacgcttgccacgccggcctcgcttcccacctcccaccagagacgctgctgcgggccgagtccacaccacagccggcatggaggctgcggcggcggcgccgcatctactgcactgcggcggcttcggccgcgtagcgcacctcccagcgctccaccgccgaggacagttcccacgcgtccgcgccgtcgccacggagcccaagctgtccacctccacctcctcctcctcccgcggcaggaccaggagccgtaatgacctctctgacaccaggttcggagaggtgtccaaggagatccagcgcgtgcgtaagcagatggagcaggacgagcagcttgccacgctcatgcgcggtctccgcggccagaacctccgcgacgagcagttcgccgacgacaacgtccgcctccgcctcgtcgaggtagaatccgcggacaacaatgagggcctgcctcttgtgtatagccctgaaatcatatcagcctactggggcaagcgtcctagggccgtcgccacccgggttgtgcagctgctgtctgtcgctggtggtttcatctcccatctcgtatccgatcttattaacaagaagctcaaggagaatgaagtggctcgcgcaattgaactgagagaaatcgtgacgtctctgggtcctgcttacatcaagcttgggcaggcgctaagtatacgtccagatattctgtcccctgcagcaatgaccgagttgcagaaattatgtgataaggttccttcattcccagatgatatagcaatggctcttcttgaagaagagcttggtcagccttggcaagcaatctactcagagttatccccctccccaatcgctgcagcatctctgggacaggtttataagggccgcttgaaagaaacgggagaactagtagctgtcaaagttcagaggccatttgtacttgagactgttaccatcgatttattcatcattagaaacttgggtttggtactcaggagatttccacaggtgtccatcgatgttgttggcctggtagatgagtgggctgctcgattttttgaagaacttgattatgtaaatgaaggggaaaatggcacttactttgctgacgtgatgaaagaagatcttccacaggttgttgtaccaaagacttaccataaatacacgtctagaaaagttcttaccacacaatggatagagggagagaagttgtcacagagcacagaggacgatgttggatcattggtcagtgtaggagtcatttgctatctgaaacagttgcttgatactgggttcttccacgctgatccacatcctggcaatatgattagaacacctgatggaaagctggctattcttgattttggtttttgatcaggcactagaaggaggcggtgccaagaatattaacttccaagaattggcagcagatctagcacagataacttttgattatccattcaggatacctccgtattttgctttgattattagagccatcggagtattagaaggcatagctttggtgggagatcctgaatttgccattgtggatgaagcatacccatacatcgcacagaggctactaacggacgaatcgcctcggctaaggagcgccttgcgttacaccatatatggcaaaaccggtgttttcgacgcggaaaggttcattgatgttatgcaagctttcgagaattttatccgtgcagcgaagagcggtggtggggagaacttgaagggaaacatggctgagctggctgagttgggaggtcaacctagcaccagtctggttcctgtatttgcaatggccgtagcgcagcctgagcagccagttaaagcccgtgcggctcttgcttttctactctctgagagggggaacttctttcgggagtttattcttgacgagattgtgaaagccatcgatgcgatttcaagggagcagttgatccagatcgccgcgtcttttgggataggaaacgcggccccagtttttagcatggttcctgtcagggccagggcattgcttccgacgatcacagaggaagacagggtcatcctgaacaacgtcgagaaggttgtgaagttcctgacatccgggactgcaactccaacagtgggcggggacgtgaacgtggtgtctgtggtgcaagagcttctacctgtgttgccaggcatctcgtcgaagatcctacctgatgtcttgagccggttgtcgtcacgggtatttgcacggataatccgggagacatttttgtagagtgttctctttttgtttgccccttgctaacaggaaaactacaagtagcaatatctgcccaaacaacacgcaaatgaatggtgatagaagattgtacagcaatacaatgtatagaatttgcatctaagtaagttaacaaaagcagcaaagcttaaccaacacgtactgtctgtagtgagcacacgagggctcaacacgataaaactggagaggttgtgttggcttgacaagtgcttcgacctctgcgattgtactctcggcttctccaatctcagcaacttgctcattcgactcctccacctcagcctgcaacgttgaaatggcctaagaaaacaaaacaacgcacagcatctaaaatccttttttttatgtcgtaccagcgttgttttcaagtcagacagtgtttaaaaatgttgtgttgtgttggcttgacaagtcgcttgtggcagtctgggtccatcatccttgactcagctataaaac

SEQ ID NO: 30731 - DNA, 6718 bp, Zea Mays
cccatccctcctcctgctcatcactgctgctctctggctgctccctctccctccatccccactgctgctctcttgccaaatctgatctagggtttcgttccatctccacgcgccgtcccagtacctatctactctagactactacagtatccaaaaggcaagcttatctgcggagggagtgagctgacgcattcccgtgctggcgagggacagccagacccagacggggagatccgatccgattccgtgctagctgctgcggagtgagtgaggtgacgcgggagcgggatggcggcgccggggcggaggacggcggacgtgtcctcgtcctcgcccgccccctcgccgtccccttccaccggtaggcgcctcctgcgcacgcagaccgtcggcaacctcggcgagtccatcttcgacagcgaggtcgtgccgtcctcgctcgtcgagatcgcacccatcctccgcgtcgccaacgaggtcgaggccaccaacccgcgcgtcgcctacctctgtcgcttctacgctttcgagaaggctcaccgcctcgacccgacatccagtggccgtggtgttcgtcagtttaagaccgcacttctgcagaggcttgagagggaaaatgatcccacgctcaagggaagggtccaccagagcgatgctcgggagatgcagcgcttctaccgcgaatactacaagaagtacatccaggcactgcagcatgctgctgataaggctgaccgagcactgctcactaaagcgtaccagacagctgctgtcttgtttgaggtcttgagggccgttaatgtctcgcagtccgttgaagtcgatcaagcgattttggatacacacaataaggttgaagaaaagaaaaagttgtacgtaccttataacattctcccgcttgatcctgaaagtactggtcaagccattatgcgatatccagagattcaagctgctgtttatgctcttcgcaatactagaggtctgccatggccaaaggaccaagacaagaagcctggcgagaagaatactgggaaagaccttctcgattggcttcaggctatgtttgggtttcagaaagacaacgtgtccaaccaaagggaacatttggtactgttgcttgcaaatgttcatataatgaaagtacccaaggttgaccaacaaccgaagttggatgacaaagctctggatgctgtaatgaagaagctgtttaagaattataagaagtggtgcaagtaccttggccgcaaaagcagcttatggttgccaaccatccagcaggaagtgcagcagcgtaagcttctttatatgggcctctacctgctgatttgggatggcttttgaactctacggcatgctggctggaaatgtgagcccaatgacgggtgaaaatgttaaaccagcatatggtggtgatgaagaagcctttttgattaaagttgtgactccaatatacaaagttatagagaaggaagctgaaaggagcaagaccatgaaatcaaagcactcccattggagaaactatgatgatctgaatgagtacttttggtcagttgattgtttccggctaggatggcctatgagagctgatgctgactttttcaaaactccaaaagatgcttatctgaatcttttgaatggagagaacagatctgcaggtaatacccattggatgggaaaagttaattttgtggagatacgttcattttggcacatattccgtagtttcgacagaatgtggatcttcttaatattgtccttacaggccatgataattattgcttggaatggtggaacaccaagtgatatttttgatgctggagtatttaagaaggttttgagcatatttattactgctgcaattttgaagttgggtcaagcaatcctagacctcatatttggttggaaagcaagaagaaacatgtcatttgcagtcaagctgcgatatatcttgaagttaatatgtgctgctgcatgggttgtgattttacctgtgacttacgcgtacacttgggagaatcctactggacttgcaagaacaataaaaagttggcttggtgatggtcagaatcagccatctttgtacatattggccatagtgatatatatggcaccaaacatagttgcttctatgctatttcttttcccatttatgagaagattcttagagagttcaaatgttaaggtcataacgatcataatgtggtggtctcagccccggttatttgttggcagagggatgcatgaaggtgcattctccctcttcaagtataccatgttctgggttcttcttttagcaacgaagctgactgtaagcttctatattgagatcaaacctctggtacagccaaccatagatataatgagggaacctatcaggactttccagtggcacgaatttttccctcatggaactaacaatattggtgttgttatatcactgtgggctccaataattctagtatatttcatggacacccaaatttggtatgcactgttctcgacattaattggtggtatctatggggcttatcgtcgtcttggtgagatacggacattaggaatgttgagatctcgctttgaatctttgcccgaggccttcaatgaacgcttgattccttctgatgcaaataagagtaaaggtcttcgtgctgccttttcaagtagacccaaggcttctggtgacgaaagacagaaagagaaaagagctgcaaggtttgctcaaatgtggaatgtcattattacaagtttccgtgaagaagacctcatagacaatagggagatggatctgctactggttccatactgtaaagaccgtgagctcgatatatttcaatggccacctttcttacttgctagcaagatcccaatagcactggatatggcagcagacagtggcggaaaagaccgtgatctgacgaagaggataaaatcagatccatacttttcctttgctatcagagaatgctatgcttcattcaagaacatcatcaatactttagtgtttggtcagcgggagaaagatgtcctagcacagattttcgcagttgtggatcagcatatagaagatgaaactctgataaaggatctcaatatgaggaaccttcctgcactgagcaagaagtttgttgaattacttgaattactgcaaaaaaacaaggaggaagacttgggtcaggtagtcattttgttccaagatatgcttgaggtggtcacaagggatataatggaggaacaggaccagctcggcacactgttggaatctgcacatggtgcaaatagtagaaaacatgaaggaattacaccgctagatcagcaagaccagttgtttgctaaagctattaagttccctgtggatgaatcaattgcatggactgaaaagataaagaggcttcatcttctgttaactgtgaaggagtctgctatggatgttcctactaatcttgatgctaggcggcggatatcattctttgcaaattctttatttatggatatgcccaatgctccaaaagttcggaacatgttggccttctctatcttgactccttattacaaggaagatgttctgttctcattacaaaatctagaagagccaaatgaggatggagtttccattcttttctacttacaaaaaatttacccagatgaatggaaaaatttcctcgaaagggttggctgcaagaatgaagagggactccgtgaagatgaagaactagaagagaagcttcgtctttgggcgtcgtatagggggcagacattaacaagaactgtaagagggatgatgtactatcgaaaagctttggagcttcaggcttttcttgatatggcggaagatgatgatcttatggaaggttacagagcaacagaagtaatgcccgaggactcgcaattaatgactcaatgcaaggctatagctgacatgaagtttacatatgttgtctcatgccaacaatatggaattcagaagcgttctaatgagccttgcgcacatgatattttgagactaatgacggaatatccatcacttcgggtcgcctatattgatgaagttgaagcgcctagccaagatagaaacaagaagattgaaaaggtttactactcagtgttggtgaaggcttctgttacaaaacctgatgagcctggtcagagccttgatcaggtcatctacaagataaagctaccaggtaatgccattttaggtgaaggaaagccagaaaatcagaaccatgcaataatattcaccagaggcgaatgcctccaaactatagatatgaatcaggagcactatatggaggaggctttgaaaatgagaaatctgctgcaagagtttgagaagaaacatggagtgagatatccatcgatacttggagtcagagaacacatatttacgggcagtgtgtcatcccttgcatggttcatgtcaaatcaggaaactagtttcgtaacaattggacaacgagtgcttgccaatccgttgagggttcgttttcattatggtcatcctgatatcttcgatcgccttttccacattacgaggggtggtgtgagtaaagcatccaaaattatcaatctcagtgaggacatatttgcaggattcaattccacattgcgtgaaggcaatgttactcaccacgagtacatgcaagttggcaagggaagggatgtgggtctcaatcaaatatctctgtttgaggcaaagatagcaaatggcaatggcgaacagacgctgagccgtgacatctaccggctgggtcatcgctttgatttcttcagaatgctatcttgctactatacaacaattggtttctacttcagtacaatggtattttggtgacctgagtttttgaactgttcttgtccgttcattggttaacctttcttgcattttctgacttgttcgttgtttcaccttaacacctctgttatttctgcatgcacttagattacagtgtggactgtatatgttttcctctatgggcggttatatcttgtacttagtggacttgatgaagcgctggctactggaaggaggtttgtgcacaatgcacctctccaggttgcgcttgcatcggagtcttttgtgcagcttgggtttttgatggcgctacccatgatgatggaaatcggtttggagagaggattcagaacagcattgagtgacttcatactgatgcagcttcagttggcctcagttttcttcacgttctcattgggaacaaaaactcattactacggaaggacattactccatggaggagctgaatacagagccactggacgtgggtttgtggtgttccatgcgaaatttgctgacaactatcgactctattcccgtagccattttgtcaagggcattgagctgatgattctactagttgtgtatgaaatatttagccagccatatagaggggctgtaacttacatcttcatcaccgtgtccatgtggttcatggtgggcacttggctctttgcaccattcctgttcaatccttctggatttgagtggcagaagattgtggacgactggaccgattggcacaagtggatcagcaatcgtggaggtatcggtgtagcaccagagaaaagctgggagtcatggtgggaaaaggagcaagagccccttcgatactccgggaagcgcggtactgttgttgaaatactgcttgcgctgcgtttctttatctaccagtacggacttgtgtatcatctgaatataacgaagaagataactaaggacaaccagagtgtgctggtttattgcttctcatgggttgtaatttttgtgattttgctcgttatgaagaccgtatcagtgggcaggagaaggttcagtgcagagttccagctagtgttccggttgatcaagggtctgatatttataacatttacagccatcgtggtaatcctaatagcgatccctggcatgacggtgctggacatatttgtttgcatccttgctttcatgcccactggatggggtttgctgctgattgcccaagcgatccggcctgtgatccacaagactgggctctggggctcgatcaaggctcttgcccggggctacgagatcctgatgggacttctcctgttcacgcccatcgccttcctcgcctggttcccgttcgtgtcggaattccagaccaggatgctgttcaaccaggcgttcagcagaggtctgcagatctcccgtatcctgggaggacacaagaaagaccgagggacccggaacaaagaatagggctgggctgctgctgattcaaggtttgtgtgcgccactagtatttatgtgtgaatgggtgggtagcatatggctcgagagtatctcctgaatggagattgattgatcctgaagagtagaagagactcgagtgatgtaagatgctgcaggcttgttgctttgttacctaggcgttaggcagaacagatgttttcaggatctctggcctgttaaccacatcttcccctgttcagagtgaattaattcctaatggaaactgatttgtgaattacttcctaatagaggagtgcttccaaactgatttcatgtgtgtgctgtgatattgtttagcatatagtattttaaatgtagctttgaattttcattctttcgcaacaaaaaatgaataggacaagctggtcaaacttgaaaaaaaaagttaaacgggttataatttgggacggagggagtatgatttgagaacctcatcaaatagtcttgcca

SEQ ID NO: 30732 - DNA, 855 bp, Zea Mays
caattctccacggccagagggagtccaactccgcctccagcactcacgcttcgtctgctgaccctacccatcgcggccgccgccggctcgccgctgctgccaggcgctatgcggccttgctcccgcatactcgcggcgcgtcacttcgtccgcagcttccggttcgatccctcccaaactacctcccccgctgccggatttcgtcggctgaccggagccaacaggccgttcgtgccgaaacctctctttggcattctcctcggaggcttcagatcgaactgtggcgtactgcctgggaaaggggtccccttgggcagcctcggcagcttcctgccggactctgcctaccagctgcacggcgcgcggcttcaacgagatacgagaggtaatgcattctccacatccgccaatgctgtgacagttaagaagccagttggtgacaaggtccagaaagatgcatcaaaaaaggatattgatgaggagattgctgattctcagatattgaaaaaccttgggaagtacttattgttgaatgacagccctgacttccgctttagggttgccttgtcgttggtcctgttagttggtgcaaaggttataaatgttcaagtgcctttcttgtttaagctagctatcgactggcttgcagcccttggtggtgctgaagcttccctggcatcattcactgaaactaatgccaccctattggctctatttgcaagcccagcagctgttctgataggatatggaatcgcacgatcaggagtatcagcctgtacagaactgcgaaacgctgtattttctaaagtgactttgagagcaatccgttcagtatccagaaagctgtccagataa

SEQ ID NO: 30733 - DNA, 4591 bp, Zea Mays
cacgtggtggtgcgcctcctccacacgtacgtactgcggagttgcggattagctgctggtccgatccagaagctcctagacgatgatggacgtggagtaccacgaggagtacgtgaggaacgcgaggggcgtgcagctcttcacctgcgtctggctgccggcgccgtcctccgcgcccaccaaagcgctcgtcttcctctgccatggctacgggatggagtgcagcgacttcatgagagcatgtgggatgaagctggccacagcagggtatggcgtgtttggtatcgattatgagggccacggcaagtccatgggtgccaggtgctacatccacaagtttgagagcctcgtggccgactgcgacatgttcttcaagtccatctgtgacatggagggatacaggaacaagagccggtttctatacggcgagtccatgggcggagccgtggctctactgctgcacaggaaggatccgaccttctgggacggtgcagttcttgtggcgccaatgtgcaagatatcggagaaagtgaagccgcacccggtggtggtcaccctgctaactcaggtggaggagatcatccccaagtggaagatcgtccccaccaaggacgtcatcgactccgcattcaaggaccccgtcaagcgcgagaagatcaggaagaacacgctcatctaccaggacaagccccggctgaagacggcgctggagcttctcaggaccagcatggatgtggaagacagtctgtcagaggtgaggatgccgttcctcgtcctgcacggcgaggccgacgcggtgaccgaccccgaggtcagccgcgccctctacgagcgcgcggccagcgccgacaagaccatgaagctctacccggggatgtggcacggcctcaccgccggcgagcctgacgacaacgtggagctggtgttctccgacatcgtctcgtggctcgacaagcgcagtcgccactgggaacccgacgagcgggtgagaagggctccgccggagcctgagaacaagcgccgcgtcaccagcagcagcagtcaacggcccggcagcttcctctgcggactaggctgccgctgccggcaacaccagcaacagtgtagtaggatgtagatatggaaaacgcttgctttttcctcctcctttaagttgttgacaaagaactgagaaaagtcatggtctcaacaaagatcttgttccatcctaagaactgtgtttctttgttctagtatagtttctgggagcaggataggcattctccgcgtgtcaacaaagaaagaactagacccaccaaagcagggcacacttgcaaaagcaaacaaaaaaaagtgagctataccatatatatgatgctatgctctcaacaaagaattagatcatccaggtttatccccaacggttcaactggaattttttttgtatagctaatggctgagcgaactgagagagaaaaaatacaggagaaagaatagcattacagcatcaaccaaggtatttcagcgacacattcccgacgaactacatggccatagcttttgtcagtaaggagaggagggtcgaccaagcagctagaagcaggccaccaaaaatttccaagtcccgtgctcctcttccgtcctagccttgctggtttccggtggtggcagccgcggtgtcttggtcgccgaagatgcgcttgcggaagtcggtgaccatgaggggaaggccctcgcggagggggatcttcggctcccacccaaggagctccttggcacggccgatgtcgggcttgcgcttgtgtgggtcgtcctgggtgttctgacggaactcgatccgtgcgttggggtcgatggtgtcctggacaaccttggcaagctccagcatggtgaactcgccggggttgcccaggttaaatggtcctacatgctcgccttccatcagcttcatcagaccctcgacctgggagaagacccacaaatcagtacaatgaatgcaaagaataatagattcccttgtaatgaatagttcgagcatcccacttgctggctaggccactaagccaccggaaaaaaaaaatcaaatctggtactctggcagtgatgttgaatcgagtgtctcttatttttttttcaatatatgttgagtagaggtagacttgccagatcagaaacatattggaaactcctggtttgctttccatcaccataaaccgtcaagggctccttcctcagtgcctgagcaacgaagttactgacaacacggccatcgtcaatgcacatgcgagggccatatgtgttgaagatacgtgcgatcctaacctggaaacaacaagaaatcaccaagatgaatctacttcatcgcagacgaaatgaaattccaaccgaccaaaccgacatttttggattgcgacttacctcaaggttggcaccacggtggtaatccatggtcaacgtttcggctgtacgcttgccctcatcgtaacagctcctgacacctgtcattcagaaatcgtacccatcagtaaaactctgcagagagcaggcaagagcttgcctactctgtaaagaagccgtcgagtatccaacggccaacaaatgctatgtaaatagctcaacaaacttcattcattgttttaggtgcaatggttggtgggcgtttggttaggcatagttggtcaagtatagttgtgttctcctattgctttattgaaaaggatttgcacctcaaagtggccctcttggagcaaattccaccaaccaacattgtccttttccaccaaaaagaaccaaaacatgcaagagacccaccaagttaagattccatagccagcatctccaagatacccttttgcatattgcttatacaagacttctttcatgcaacagtaagcttcaagtctggaccagcactgttttctgaaaagggctcattcctgcttactacagctcggattaaaaaaaaataataaagatttgacaacgtagagccttcctgtttgcaacagtacattgtccagcttgcaattccctcctccctctctttttcttggttttgttcactaaaagactatggctgcagggtatatgtttaggacaacccctcagtcgtgagtcgtctatgctctctccaaagttatactcatacaaaagcatgacaaagaaagaatgcgcatgagagatcatttatttggtggctgacagttccctgccatatgcatgacacaactaacaattagctaacctcatcatgctagatctaagaaacatgaatgatcatttgtcgctgcaacaaattaatttcaagagttcaaccaagagagtataaacaacaagagttattaccgatgggattgacattgccccagtaagtctccacctgcgggtgctggaggggatcaccatagacctcactggtactggtgaggaggaacctagcattgatcctctttgccaatccaagcatgttcagagtcccaaccacattggtcttgtgctatcacaaaggttaaggctacaaaccatctcaagaaagcaaaacaagcagaaactaaatgaattagccacccttttgacttcgtcacattgctactccccaatcagttgcaaaacaagtaaagcataaagaaatcacgtgaagtgaacagtaagcaaagttgtttcgaaagtggaaagggcaaaggccacttgacgtcaacttttgtgttgttgaaaattgaaatgcgccctttatgtcagaactcagaagtaagcaaagtccaccactgacccagatccaggcacaccttgcgcttacttttcgctcccatgaacagatcatgaagcaaagtaaaacagtaaggaacaattgagttcatatctcggctttaactgttgctagtacgttttctctattccaaacgcacgggaaacttaagtcagcattcagaaacataaaaaaaaagtttttttctgagaaatacaaatggtttcgacagggaaatgatgcgatgatttgagatcttcagttgaatctcgagaatttgagttcaactgaacatttgacgccagatttcatagatgcaaataaacagaagaaatttcttttgcgttaaatgaaaaggagggattgcccttgagcaaagggcagcctagcagacagagatctgaaacggccgacctggtggctgtgctttgcatcagttgagcagaaaactccaaaatcagagtgaaacgtggcgcaaatctcgagctccggacaaaattctcctactgtgccatattcccatttcatggaccgacccggaatctcagggagtagtgaatcgggcctcatcctcccagaagcattgcgtgttaaccgataaacctggagaaaggaacaaattccccaccaaaatgcaatagaaaccaaatccatccctataacaatataaaacattttgtttggcaccaaaagaagaaaaatagaaccgatcgcgatccaggcatcaatcatgaatcagtcatggaggaaaggaaaagaacgcaacagaactgaaggaattcgtagagaaaggatatgattgttttgatggggttgtatttgtagtggacgggggacgcggggcaggcgaggtggtagatctggtcg

SEQ ID NO: 30734 - DNA, 1024 bp, Zea Mays
agtcggcactctcatctccactctcccccaaaaccctataggctatagcggcagggagaaagtgagcacccacctcaacccgcccgccgccatggcgctccgccgcatcacaccgcggaggagacccgttctccccgtcccccgtgccttctcctcgagtccgccgtttcctccacccccgcctccggcgaacgaccccgaccccgacgccgcccaacccccatcctcttctccgccccctaattccggcgcgccgcggaacccggagtcctcgttcttccaggacatcaaagatcgcctccgttcgtctcccacgtctccgtctccgcgccggatcccgacgaccctgccccgccccgaccctgcgcgcggcgctccttcttcgggaccgcccattggagacatccgccggatgctccagaacttccgcttaaccggctcaaccagcgacgcgccctccacctccgctcccggatccaacccctccttcatggacctgctcaagaaccacttggaccagggtgccaacgcccggcaggcggagctcggcttcaatgccatcggagagagcctcaagcgcccccgtccgccgaagccttttataaccccttcgtcgagaaacatcttctgccgggagctagagaggacctcgaaggctttaggtgcgcggcaggaagagaatggctctgccattgagcttaaggggagctacagctacgaagagcttgggaagagactaggggagctgcggccggcgggtgcaggtaaagacggtaaggagtggttctcgctcaaggagctgcaggggcgtatcgccaagctcgcggagcaggagagccagcttgccgggccgttttcggaaatgcggcggggcattaggaacctgcagaaacaaggaaaaccgggtcggcctgtaaacatccaagcactgctgaaccctgtcggtcagccgacgccagactacatgagtgggcctccgcaggtggaattgttagagaagggtaggatgtggtctactactgct

SEQ ID NO: 30735 - DNA, 1610 bp, Zea Mays
cccccaccccctcccggcctcccctccctcagtccctcctcagccagtctatcgtggcccctcgcctcgctcctctgttcacacacgagcgcactcccctgtctcggtgtctcctcccctctcgctctccatgttcgcggcttccaacgccacggccacccgcctcatcctcccgcgtccttcagtcccgttccgcgcactcctcattccccgccggcggggtcgcctccgccgcgcggtccacgccaacgccgtcgcaggtggcggaggaggcagcgagggcgttgcgaaggagccgccgcggacgctattccccggcgggttcaagcggccggagatccaggtgccagcactcgtcttacgcgtcggcaccgaggaggcgctgcggtgcggggatgaggtggccgacgccgtgtcccggggcgtgggcatcgtcgtgctcgaggccggagaggagggtggaggcagatcgtacgaggccgctcgcgctctcagggccacggtcggggaccgcgcgtacctgctgatcgcggagcgcgtcgacgtcgcttccgcagtcggtgcgagtggcgtcgtgctcgccgacgacggtattcctgctattgttgcaaggagtatgatgatgaaatcaaatgctgactccatatatctccctattgttgctagaaggatacaatctgcaaactctgcattaagcgcttcaagttctgaaggggctgattttctgattgtaaatactggcagtggtgattttgtggatgttataaatgatgttgttggtcaacatgtgaagattccgattttcgtcacgttgaatcatttaagtgaaggaacttattctgacttcacatccaggttgctccaatctggtgcatctggagttgttacatccttagctggcatggaactcctcaatgacgatcttataaaaaaagacttcacaaaggtgggctcagctgaggaactcccacaagcgagttactcttctgctgggatgctggaagatgttaataatgtaatggtcctaactcgtgattgcgagaagactaaagttgctggatttacaaaattggatgaagaagtgataaagttgatagaaatagaaaagcctattctgaacgaagctatcactattatccgcaaggcagcaccaatgatggaggaggttgagcttctagtggatgctgcttctcgcctgagtgagccatttttgttggttattgtgggtgaatttaactcaggaaagtcaacttttataaatgctttacttggaaggcagtatcttcaggagggagttgtgcctacgacaaatgagatcacactactatcatattctgaggttgaatctgaaaactttgaacgatgtgagaggcatccagatggtcaattcatgtgctatttatctgttccaattttaaaggaaatgaatctagttgatacacctggaacaaatgttattcttcagaggcagcaacgactcactgaagaatacgtgccacgagctgatttggtgctctttgtcctatcatcagatagaccattaactgaaagtgagtcacagtttcagctgattcttcccattctggacaaaatcgaacattctatggatc

SEQ ID NO: 30736 - DNA, 3226 bp, Zea Mays
attccgaaaaaaatcactaacagaaggacggttcaggaagcattgacagatagaagatggattgctgatatcacaggatcactctcggtgggagtattattggattatcttcatctttggaatttaatttcagattttgagctgctgccagatatagaagataaacatacttttagtattgctgcaaatgggacttattctgctaaggctgcatatgatgggttgttcatcggggctgtgcatttcggtcactatgaaagagtttggaaaacttgggccccctctaaatgccacttcttcctctggttatcggtgctaaataaatgctggacaacagataggttggcaaagagaggacttgatcatccggagaagtgtccgctttgtgaccaagagtctgaatctttggatcatattttggtttcttgtgtttttgcgagagaattctggttccggctgaaggttgatgtgcattttcagactacaaaatctggctcctacacctagtacggtgtcttttacgggttggtgggagatgatagacaatggctccggagatatgattatgaagggtgtcaactcccttattgccttgggagcctggattatttggaatcatcggaatcaaattgtctttgatggaatctcccctagtgtttctgcagctctttgtcaggcaagggaggaacaacagttgtgggaaatggcaggagctaagggtctctcctttcttgccgcaaccatcaggggcacctagctgcctggtttatcgctgatgggctggttttgtttttcaggatctgtttgttctttttttgtttttttctcttcttttttctttggtttttttatcccctccggggaggtcttttgtactttggtctattttggaccctcttttccttctacttaatataatgatgtgcagttctcctgcgctttcgagaaaaaaaaacgtcatccgcggcctcaacgaatgctttgccaacattggtcttcacctttgacgtgggcgcctttccccacctttttcgatgcttgctctgagctccttcttgaagtgctcaggccatcagggcacctccattgacccctactgcccttgcggcctctatcattccgcctgctcccgctagtgcgcccttggtcttcggggcctgacctctggcttcctctcgtagtcttgtgtgctttgtggagcgtcggggggctcaggcctagggcctttaggtcccgtaggtcatgagtgggactcaggcctaggactcgactcgtcggtcgtgggtgggaggcggactggctccttcctacaccgcggctcggtgctgggcgcagttaatgtggcgtgcgtagtattgatggtgagagcagccctagggccagatgtggaatccactcgagtggctctctggcggttcgtctgatctccttgccaggcttcgcctcgtccgacctctggcgcggtgcataggggtcatctgggtgcagattcacataggcgagcttctccctatcttatctctcactcgtggtctcgtgggggcccggggatccgatccccgacactcgggatatggatcgccgacgtggggaaaggaggcgctggggtggcagctacacccgcgggaggctagggaggcgtaggccgagcgccgatggccgggtgtagggggatgccgccgaccgcaaccgagaaggggaggtctgtcaccggaggaggaggtgcggcagcggccgtaatcgcaatcgtccgcgcgatggctgcagcggtggttggtgcagtggacgttcgtgccgcttgcgtggggagggaggcgagcacatgaaaaggagaaagggagggaggcagtcgtggacgccgagaagcatcaacatgggaaataaggactttgtatacatcaggatcatcgagtccaaaatgtgttgttactcttatgttggagattgctccaagtttttggggcagatggaagagaaggcactcaaattttgacaaaagcatcccttttgctttgctcagccaagtagcaggtataagagagtacttcgcagccaatccagccttgacatctgagctgccttcaacagtagtgaagtcaaaagcatctgaaactttgatcatccagagtgaacatgaagattctgaacttggtgatgaattttatgatgcacttactagaggtgaatccttcgaagatggggatagtgatgatgatgatgatgccacaactccaaaggctagaaaagtaaagttgaagaatgtgtcatgggctattgcaggcttggctttaaagacaactaaaggttgttggcggtgatccacttctagagctacttgcggtcgattggttcaaagttaatgaacgctttgattcagttgccttacatcccaaaagccttgtgcaatcagaagctgcaaagaaacttcctttcatattggttataaatttgcaggtgccagcgaaaccaaattataacttggttatgtactacgctgcagagagaccagtgaacaaagattctttgttgggtagattcattgatggaactgatgcataccgagatgccagatttaaacttataccaagcattgttgagggttattggatggttaagcgtgctgtaggaacaaaagcttgccttctgggcaaagcagtaacgtgcaattatcttcgccaggataactttctggagatagatgttgacatcggttcatcatccgttgcccggagcattattggtctagtattgggatatgtcacaagcatagttgttgatcttgctattcttattgaggccaaggaagagaaagagctccccgagtacattctgggcactgttcgtctgaaccgtgtgaatcccgacagtgctgtatcaatctaattacgtttctagccgatctatgcaaatttactcttatcctcttttattctgagagaaacagcgtggcattttgaaaatgtgaaatagcattactatttgctgatccccaatcgagggtaacatatgtaaattggcatgaggcatgactacgtgacgcctttcgtaaatagaataaatcaatggttatgtaatattaatatcccatatacgcgtgtcataatctatgtggcttaaaagtggcatcaagtcatctagtttcctgtgttaacttcttattccttaggtagtcagacattaacagtgtgtttggtttgaggaatgaagtgatccatctttttctcac

SEQ ID NO: 30737 - DNA, 814 bp, Zea Mays
tacgtctgccttaaatccctctggcgtccctccggcgcgatgcggccaaccgcgcggcctccccatcctcaacgcctagccccaatgcactgcacccccgcatcatccaccccctccctctcatcaagcctttttctcgaccgcgatagtgacggcgacaagccgacaagcacgacccccctctgcctcgccacgtgtggcctcctccaccgcctggtttggagttttcccatccttgacggcccggttcgaaccccgatcaactatcctccagatcggatcatggcgacgacgcaagagcgagatgtggcgcagccctaacgacggaggaggcgacgtggagtaactatgtggtggcggagcgcaaagtcgacgaagactctctctgccgccttctcacggtttggctatcacatgtctaaagttgtaagcctctcaaacaaccttttccaatcctaggctaccgaacaaggagaagaagtgttctaggcaaaagtgttccaattggattaattctggactagaaagagcgaaagagtcggatgcactaaatctaggcctgaaacagtttctggcttgggactgttcctatgctgccgaacggggccgagctgtttccaaatatatattatgtgttgctactttcttcacatatcattactttatgtgttcttcctggttacatttggcaccattgttggtaagacggtaccacccacagttttattgagaaaggcttttaagatggttgtagttgcacaaattggaaaataaaactacactgacttaattttccttttcttcttgtgcttca

SEQ ID NO: 30738 - DNA, 2393 bp, Zea Mays
agcccaccgagcctctcgctagtcgctccatagaattcgacgccttccgaacggccgcagcgcacaccccgccgcctcaaaacctcaggcacaagcttgcttcttttcctcccccattaatctctcccctcttgttcttcctcttccccatcagtctcgccgccatttccctgtcctgctgctgctactgctggtagtggttccccaaacccaagccttcgattcgcccgcccgcccgcccgcggtctcgagccagccttccgcgccgtcgtggttgctttacgcgcagctatccatggatgaggtccctgccaccgccgccgtcctcgacttccgacccggctcttctgtaccacgcgtctccgccgtcccgcgccgtgccgtgcagtgccccccggacaccggcggtgcagaggcggcgacgggaggtcgtccaggtatcgggaacactgccgccgtttccgcgaagttgacggggtcaagttcggccggtcccgatatccagtctgtggattgcgatacatcgggaggccttgccggcggtgacgctggagacgtgggggttttgtgcttagagaacgctgccgagaccgaatcggtggaaccaggtgtttcggacgtgaggttgggagctccagtggaggaacgccatggcaggacgctggatagtacgggattgggctctggtaaagctggtgagaccaatgagatttcactggttgaggtgtcccaatcaggtgccacttcaagcctagatgccactgcgtcgattggtggtggctactccctcgtggaggggtctctgccagaggcgagtggtgcccgcagatgtaaacccgaggtccatgaagtaccaacagggacccctgcaactgtgggattcccgattgaggacggtggctatggatttggaattgggcctaatgacgatgtggacggtagaaacgaccctgccggaggggaatgggaaccgcctactgatggcaatgatgccgaggacgtcacagatatgggtggaatcttgtgtgacgaaagagtggagaggatggagacgaattcggtagaacgtgaggcctcgaatggttccaccgtttcttctgaggaaggagtggacaggatggggacgagcttggatgactctgaggcttccgatggctcaaccacacaagattctgatacagacgtcgagaccgagtcaagtgtttctagtatagaggagcaagaagcaggatacggagcccacatccctcaaccggtatgtgtttcgtgccaactgctgtaggaagtaggatccagcagtctgcaaggtggccaaagaaaacaacacggcaggagtgaagatctctgataggatgacttcagtgtccgaattaacacttgtgctggcttcaggtgcatcaatgttaccgcatccttcgaaggtacggacaggtggtgaagatgcatattttatagcttgtgatggctggtttggtgtagcagatggagttggtcagtggtcatttgaagggatcaatgccggactttatgccagagaactaatggatggctgcaaaaagatcgtggaagagacccaaggagctccagggatgagaaccgaggaagttcttgccaaggctgcagatgaagcacggtcccctggttcttccactgttttagttgctcactttgatggaaaggttcttcacgcatcaaacatcggagattctggattcctcgtgattaggaatggagaggtccataagaaatcaaacccaatgacttacggtttcaatttcccgttgcagattgagaagggtgacgaccctctaaaacttgtacagaaatacgccatctgtctacaagaaggcgacgtcgttgtaacagcgtcagacggtcttttcgacaacgtctacgaggaagaagtggcaggcatcgtctcgaaatcattagaagctgatctgaagcccacggaaatcgccgatttactggttgcccgagcgaaggaggtggggcggtgtgggtttggaaggagcccgttctcggactccgctctcgcggctgggtacctgggctactccggcggcaagctggatgatgtaacggttgttgtatcgattgttcggaaatctgaagtttaataaactagaaacgaactagcaaagttgagcgcacttcttttttttcttttcttttcttttttctcttcttgcaacagctgcactcgctggcaaaatgcccgtgaggcgtgagcatttcgcacatccctggcctacgcgctcaggcgcattgcgaaacgtgtattgtgtacacttgatacatactataaggttgtataagtaagcttcaaacgatcgctcgctccaccgcgcgccatcacaaaaggcaaaagcgacgagagcgtaccgtggcac

SEQ ID NO: 30739 - DNA, 909 bp, Zea Mays
gccaggcccaaatcaaccgcgtagccatccgcggccaccaaaaccagcacagaatcaaaaatatctgcctgcctacctaccgatggccgccgcgttgtagttgtagtgtaacctagccacacgacgcatccgcggttcatcggcctcgcaggaaacgagcgtcgagcaaaaggtcgaattctcaactctcaagcaccagcaggaatcgagcgagcgagcgagcagtgtccgccccccatggccatggtcgcgtccacctccttcgcgtaccacaaggaagaacagggacggccgggacagggagcgggacggcaaggagcacaagcaccccttcaaggtcgtcgagatcacgccgcctccgcggtgcctcggcgtccgctgcttccccaccaacatccactgcggcgagagcgtgacgatcgaggggcaggcgtacacggtgtcggcggtgacgcaccggtaccagctgcgcaaggggcggtacgagccgagcgagaagcgcctcgacgtcctctccaccggcagatacatcctcaacctctacctccagaacctgctcgaccagtcctagctaccatatctgtatctgtactgtacatcagcatcgcttcactctgtatagatatacatacatatatatgttagctagtagcatcgaacacttgtcccggtgggtggcggacggagatagtgtttccctgcgtgctgctctgtgtaaactgaaaaatgcgagatgaggcataaagttcagtgaaaggttgcatacattttcttgaagaaaaaaaaagttcagtaaacgagtttggattgagtgagattggatgagtttgaatcctaaacgggctcgttcggttagctttcaattcatgtggattgagtgagattggatgagtttgaatcctaaacgag

SEQ ID NO: 30740 - DNA, 752 bp, Zea Mays
aagaaaaacgaaaaacgaaaaactagagggtggaggacaacggtgtccagcaaaagagagagaagaggaggggaggaggtggaagtagcaagaatggcgtgctccaccaatctctgcttctcggcgtcgattcctcctcttccagcctcttcttcttcttctgtctcctcccccttcctcacggtggagcgtgtgtcctatgttccgtccttgtccaggtggacaatccgatacaagcaattggggcatgcatatcagagaagccacgttctggcctttgctagtgcagatgtatgcatcaggcatttcgaaggcgcagtcaagcagaagctatcaatgggccattggcaatgataggactgactgctggattgatagtggaagctcagacaggaaaaggcatcttagggcaggagctgatgacacctgcaatggaatgatgagtctattgcttcgatttaacgtgtgattacatatatcttgaacttattataagccagtatgtcgcctgtagagtgtagacaggtacttttataatatataatcacaacttccatatgtactgatacattttatctttgttctgcttgctactgttttaattgaatacaagacatactatggaatatttaaatttgtcatttgtagtagttgtgtttgtaactgcaagctaaaaaacaatctgttgagcatgtgctatatgtaagtagcgtggatcggtttagggtccgtgcatgttaatgagatatgcg

SEQ ID NO: 30741 - DNA, 1811 bp, Zea Mays
ctctctctctctcattcatctcgcctttctttcttaccggccggccggccggcggctgggctctgcaattcacccaacttttctctgttttcactacgatctcagggctccggcgaccgtgcggcctcatcatcagctacaacctaccagctgctaccgtctcggtcgccgcctagctctccgcagcggctagctcatccggccggccgccccttttctcttgccgttgcgcagttgcgcccccttccccgcggcttaggaaccatcgaaaagacgcctcaccatctcctttgtgtccttgctaactaactcccccattaaatcctctccttcctcccgcgctggccgtgtggtctctcagccctccgagttgatccataagctagcgccatcatcgatcgccatatatacatagccaaggacgcacgcgcgcgcgcgcgcaaaccagcgggagcgaacaccaaccggccggaccaattaagaagcaggctagcaagtcgaagaggaaagaagagaaggggggtaccgggggtaccggccggtcatcgatcgagcttggcgaagcagcgaccgccgggtcgtcgtcgtcggtacatgcatgcagcgcggcggtgatcaagcaggagcgagcctgggcatggagatgggggtggggtacgccggcggcggcggcggcggcgagtgctcgtcgtcctcggcggctgccgcggccgcggccgcggcggagggggaggagcggcagctgctcaagggggagatcgcggtgcacccgctgtgcgagcagctagtggcggcgcacgtggggtgcctgcgcgtggccacgcccatcgaccacctccccctcatcgacgcccagctcgcgcagtccagcggcctcctccactcctacgccgcccaccaccgccccttcctctccccgcacgacaagcacgacctcgactcgttcctcgcgcagtacctgatgctgctgtgctcgttccgggagcagctgcagcagcacgtccgggtgcacgccgtggaggccgtcatggcgtgccgcgagatcgagcagtccctgcaggacctaaccggggcgacacttgaggaagggacgggggcgaccatgtcagaggacgaggacgaggcgccgatgctggaggtgggcctggatatgggctccgacgggcacgacatgatgggcttcggcccgctcatgcccaccgactcggagcgctcgctcatggagagggtcaggcaggagctcaagatggagctcaagcagggtttcaagtcgagaatagaggatgtgcgggaggagatcctgaggaaaaggaggacgataaggctaagctcgtcgaagagaccggcctgcagctgaagcaaatcaacaactggttcatcaaccagaggaagaggaactggcacaacaactcccagacgtcaaccctcaaatcgaagcgtaaaaggtgatggaggagagctagctgcaccgtatataccgtgtatgtaacgcacacctgctgacacacatgtacacatgtataccataccaacacgctaatcaaacggagctctgcatggcgactgtactcacggaaataaagaggaccatatcgaccggttcaactgtatatctagccattagtctgaccactggcatatttgtttgctgcggctgatactttgagctgatgatgtgtggctcacagcatactttattcttgttcttattgtgttgacatagtttgtcccccataatcttgaggattaaaaaatgcatcccctgtgcgcgcgcacacacacatctgaccatcatctgctggcacaggaag

SEQ ID NO: 30742 - DNA, 1917 bp, Zea Mays
aaaaagcaaagcaacgcccaacaggacagggagaaaagctcgcaggagtgacctccctctgtgtctctccgctcggcgctcggaccaccgcggaacggcggaaccctccgatagaatcatagaaccaaaccctcctcctcgcaccgcgccgctgcagctgaccaccctacttgaccggccggggagagagatagagataaagacatagacaaacagacggcgggcaggcatgggcggcgtcacgtccaccatcgccgcgcgcttcgccttcttcccgcccacgccgccgtcctacaccgtcgtggtcgccgacgctgcgacaggccgcctcgccatcccggagatctcacgggccctctcgcgccgccggaggcgggacggcgccggcgctgggggctcctcctcggcctcctccgtcgcggccgccgagaacgaggagggcgcggaggtggtgcgcctccggacccgccgcgggaacgagatcgtgggggtgtacgtgcgccacgcgcgggcctccgccacgctgctctactcccacggcaacgccgccgacctcggccagatgtacggcctcttcgtcgagctcagccgccgcctccgcgtcaacctcttcgggtatgattattctggttatgggagatctacagggaagacattgaagcagcatataactgcctcaaggaaaaatatagtgtcgcagatgaggatataatcttatacggccagtctgttggaagtggtccaaccattgatcttgcttcacgattgccagacttgcgagctgtggttttgcatagtcctattttatctggagtaagagtactatatccagtcaaacggacgttttggttcgacatttacaagaacatcgataaaattggtttggtaaattgtccggtgcttgtcatccatggtacatcagatgatgtcgttgactgctcccacggtaaacagctatgggaacattgcaaagtaaaatattctccactgtggttaaatggtggtgggcactgcaacctcgagctatatccagattacattaagcacttgaagcagtttgtgtcaagcgttagcaaaaaaacatcaaagccggaccagaaagagataatggcaaaggatggcactaccagtaaagaaagagaggaagcatactcggagaaacctcagccggcagctaagtgctcacagtcacagatctcacgtaagagcatagatagccgagttgggaaatccaaaacagtggatgttcctgataaatcacggatgagctcagatgacatcgacaagttccggaggagaaggtgcttggtttggtgatgcctatgttgtgcacagattgtcgaacagtacctgagtgaggatactatagcatggaaatcaagcaactttattacatacatcatgctgcgaggaatggcatcagccgttcctgcagtggagaggaaagaactgttaaataagaaaaggaaccagaaagctaccatcatcatccatcagagacaaagccacttgactgaaagctggtagtttcccagttaatttaacactgacactgacaccgtcgacatgttttgcagcaccggttagggtttccccatcatctaaaagtgtacaattattgtatgtaatcacgagggacctatacaaacatttacagccgctctgtgcaaagtctgaaagcctaggagcaccatagtttatcctcggtgcatcagcatcgggcccacatgcgttgtggaaccatttggctatgtgagctctgcatactgatctactccagccttattatacggatcgtgctccacttatcaactgtgacacggcagcaagcggatcatgctccacatatcaattggaaactgttgggtgaaaggaaccggaccgcgaagcctgaaaacaaatgacaggcaatctggc

SEQ ID NO: 30743 - DNA, 3916 bp, Zea Mays
gtctacacctgctctctcgactcccccaaagtcctcacctccccacctggccacctctgcctttgacctcgccggcgccaacccaaacccgccgccgccgatgcctctggcgcactagcttcgcatctccgtcctcaacatggcgtccgagcgcccgctcctcatcgccacaaccccgggcgcctcaacccccgacgacgccccctcgccgcatcccccagcggcgtcactgctcccgccggcccagtcggagcctcctctccgcgcagaccgtctcgccttctccgtggagatccccgacccattccgctcctaccgccgtggcgacggacccgccgccgacccatccgcgtcgttggagagggaacgtgatgtcggggatgacgaatcccgagaggtcatcgtgggagagtcctcaccggagttctctgggaacgccatccgaacggcaaagtcgctgtcttcggccgcggtgcgtccgtgctaccactcgccttcgtgctcttcgtcactgccgtaaaggacgcctacgaggatttccgccgccaccgttccgaccgccaggagaacaaccgccttgccaccgtgctcgcactgggcacagctggcgagttccagcccaagagatggaagcacatacgcgtcggggacgtggtacggatcgagtccaatgagacactgccggccgatatggtgctgcttgctaccagcgatcccaccggtgttgcgcacgtccagactgtgaatctcgatggggagaccaatcttaagacgaggtatgccaagcaggagacacatgtcatgttctcccagaatggtggtgttggtggcgtcctgcattgcgaacgacccaacaggaacatttacggattccaagcaaatcttgagattgatggcaagcgtgtctcgcttgggccatccaacattgttcttcgtggctgtgaactcaagaacaccacatgggcaataggggttgtggtatatgctgggaaggagaccaaggtgatgctaaatagctcaggggcgccatcgaagcggagtcgcttggaaacacagttgaatcgggagactgtcatattatctattatgcttattgggatgtgcacaactgcatccgtgcttgctgggatttggctgctgaatcaccggagggagctggagttcacccaattcttcagggagaaggactatacaactgggaaaaactacaactattatggtgttgggatgcagatattcatcacattccttatggcagtgatagtgtatcaggttatcattcctatctcattgtatatatcaatggagctggtaaggcttggacaggcatatttcatgggtgctgataaagatctgtatgatgagtcatcaaggtcaaagttccagtgcagagctttgaatataaatgaggatttagggcaaataaggtatgtgttctctgacaagactgggacactaacggagaacaagatggtcttccagtgtgcgtcaattcgtggggttgattacaactctggtaaagatacaggtggatactcggttgtagtcggtgatcatctgtggacaccaaagatgtcagttaaaattgaccctgagctcgtgaaactactcagggatggtggttcaaatgaggaaccaaagcttgttcttgaattcttacttgctcttgcttcctgtaataccatagtgccgcttgtccttgacactagagactcaaaacagaagttgattgactatcagggtgagtcccctgatgaacaggcactagcatatgctgcagcatcttatggcattgtccttgttgagcgaacatctggttacatagtgattgatgtccttggtgacaggcagagatttgatatactgggacttcatgagtttgatagtgatcgtaagagaatgtctgttatcgtgggctgccctgataagactgttaagctgtatgtgaaaggtgcggacagttcagtatttggaattacaaacaattcatctgaattggacattgttcgtgctacagaggcacatctccataagtactcttcacttggactaagaactcttgttgttggtatgcgtaaactgagtcaatctgagtttgaggagtggcaattagcttatgagaatgccagtacagcagtacttggaagaggaaacttactccgatctgttgctgcaaacatagagatcaatgtcaacatattgggggccactgggattgaagataagcttcaagatggggttccagaagcaatagaatctattcggcaagcagacataaaggtttggattttaaccggagacaagcaggagaccgcaatttctattgggtactcctgtaagctgctgaccaatgacatgacacaaatcgttataaataacaattcaaaggagtcatgtcagagaagtcttgtggaggcgcttgctacaactaagaagctcagagccgcttcatcaattggtacacagggtccattgttagcatcagaaacttctaatgtaactcttgctttgattgtagatggtaacagtcttgtttacattctggagacagatttgcaagacgagcttttcaaactagcaactgaatgtagtgttgtcttatgttgccgagtggctccattacagaaggcagggatagttgcccttatcaagaacaggacaaatgatatgaccttagcaattggcgatggcgcaaatgatgtttcaatgattcaaatggctgatgttgggattggcatcagtggccaagaaggtcgacaagctgttatggcatcagatttttctatgggacaatttagatttttggttcctcttttattagttcatggtcactggaattatcaaaggatggcctatatgatcctttacaacttttacaagaatgctatgtttgtcttggttcttttctggtatgtactttatacagcattcactttgacaactgctatcactgagtggagtagtctcctgtatactgtcctgtatacatcccttccaacgattgtcgtcggcattcttgacaaggatcttaataaggcaaccctgatagcttatccaaagctatatggatctggccagagggacgacaagtacaatgtgaatttgtttgtgctcaatatgcttgaagcactctggcagagtttggtcgttttctacttgccgtattttgcatatagacgaagcacaatagatatgtctagtcttggagacttgtgggcacttgcacctgtcattgttgtaaatatgcaattggccatggacattattaggtggaactggataatacatgcgtttgtatggggcacaatagccgcaacaacagtttgtctctttgtgatagattcgatatgggttcttccagggtatggggcaatttttcatataatggggactggtctgttttggtttttgctgcttatcattgttgttacagcaatggtcccacattttgtgttcaaggctttcacagaacactttaggcccagcgatattcaaatcgcccgtgagatggaaaaatttgcaaatgtcaatcaggtgaaccggttggaatttccaacgagaggactttcatgacaatagtagggaaactatagtatttcgttcttttcttattttcacgtctttcccccctactggtgtgaataggagctgattcatttagctgtaaggtgataggtttaatctctaatgtgcatgtatgtattcgtataaaatttacagaaaaggaaatagaagtccacgtacaagttttcatctgtttgttgcagcattattgcaggctaaatttgtggagagtgtattgtaaatatgggatactgatgcttggagattcaattttcaagtttgtagagagaatgtagatttgggaacacacggatgccaggaaatttaagttccagttttgtttcttccgaaa

SEQ ID NO: 30744 - DNA, 2721 bp, Zea Mays
tgagcggatatggataaccacagggctggccccgacgcggggtgaacgcgacctgaccctgtttccttctctggtagtctggtctctcgcttttctgttccgcgcagcaacgacgcggttgcttctccccacggcggcatctcctgcgcggcggcgccgcccccgcgagagccgcgacggcgcactaggcgagttactggacacgggagcgatgggggacggcgccagcggccgcggcggtcgaagcggcgccgggcgccgggtgggggagtacgagctgctgcgaccgattgggtcgggagcctactcgcaggtgtggctgggacggcaccgggtgcggggcacggaggtggcggtgaaggagatcgccatggaacgtctcagcaaaaagctccgcgagagcctcctctccgaggtcgacatccttcgtcgcatccgacacgataacgtcatcgcactccacgactccgtcaaggatcatgggagtatatatctcatactggagtattgtcgaggtggtgacttacatgcataccttcaacgtcataaaagagtttctgaaaaggttgctaagcacttcatccgtcagttagcatctggtctgaaaatgcttcgcgataataacgtggttcaccgagacctaaaacctcagaacattcttcttgttgaaaataatgaaaatactctgttgaagattgccgactttggatttgcaaaatttttgcaaccctttgccctagccgaaacactttgtggttcaccactttacatggctccagaagtcatgcaaggtcagaagtatgatgcaaaggcagatctgtggagtgttggtgtcattctatatcaacttgttactggaataccaccttttaatggggacaatcagatacagttgcttaaaaatatactcaggacgcatgaaatacgattaccatctgattgtgaattgagccatgactgcatcgacttgtgcagaaagttgctgcggctcaattcagtggagcggcttacagttgaagaatttgtgcaccacccatttctttctgaacatgctccagagaggaccttgagccggacattatctgaaataagagatggctttccaataaataatatcagtccaacaaggccttcaagccaaagttcacaagaagattgtatgccttttcctttggatgatgagtcaagtggacaggatgagggtccaattcctgacagtaagagtccgatgaaatcttatgggtttcccacaggtaaaagattggataaaacttcaggccagagtccatcaaaacataccagtctgttctccaggtatgtcttgggaaataatcatgcacctagtagccaacaccatggccatactgataaaatgaccaaggaaagcaagattcatgaagtgcaaggtccaaaaggtgtttatccagaaggaatatgtatttgtgtctggaccacacccagagggatcatcgtcttcaacaaatgcttctcagcagcttaacttaccggcaaaatatgataatttatctgtttcaccaccgaagttaactttcttgagtgcaccaatgccgataaacggtttgccgattaatagacaacaatctgctgggactggtagcttcgacagccactattctcctgcatctgtcatttcacagggatctgcggatataagtgatgccatggatcagcccccatctgattatctgacgaggattagattgttagagcaatatgcatcagccatagcagggttggtcagggatgagatcaaaggtggcaggcacttggtggcgttctctattcagctaattgttcttgcaacctggaagcaagcaattcatttatgcaatacctttgtagcttcacttgcaagggagagtccctcacaggatatccatatgaaggggcttagtgctgatgcttcgcatttgcttgcgaactcaaagctagctgatgatgtctgcgtgcagatagagaaacagtttctctccgaagttgaatatgcggaagaactagccagcactgtgggacagatagctgatggtacagagatgccagatgcaatcgaaatgatatttcagtctgctttacttacaggaaggcgaggcggtgttgatgagatgtttgggaaagcagcggatgccatgactgggtatacgagggcggtatccatgctgcggtttctcctgatcgaggcaccatcacttgccctcaaccctcctttgactctgacaagatccgatcggcatcgacttcgcacatacattgaagctctcaacaccaggctctgtcagatgcagagccagaggcattgactgctgccatgtgtcctcaaatcttgttcaggttgagggacggtagacttgtgcaatattttttcatttgtaaatatatttgttggcccaagataggacatgtaagatgtcagaaatttggaactaggcagagcagcgaaaatctattataactcgaccagactactattatgatatggaattaggtggagtgtacgtgttaggttcattctgtgtgaattcaggcagaagcttgaaaacgaaatgaccaatcatggtcacttgtggaaatgtaaactacttcgtagattctttattagtactctatttcgttcttttttatttgttgtggtttagttaaaaaaatgaattagctttcgacaaatattcgagaaaggatagtatatgttatggtgtgttccaa

SEQ ID NO: 30745 - DNA, 981 bp, Zea Mays
actcttcatgacagctacccaggaaaggaaaagattagaatcgcaaggccagattctcagggtgatatgcacttccatgggcacccgacgacattaaattcacaagaataagaaaccccctccaccttaagggttcaagtaggagccaacgaagaagcaagccccatcgtcatcatggaaggaggaggccatcccacccacgctgacgaggagccaccgaaggagaaggccccaccacccaaggagaaagccgcccaaggaaaccttttcatttcagttgtggcaacggaagttccaggccccattgcagcactacactgcgctaatggaccttcaggactattctgagaatggaactgtaaccgtggtatatcgagtgatacttaaaggaactgatggagaggcatatagagatgccacgggcacaacacagttccatgaggggcgcagggaagatgctgttgcagccgcagaggaagctgcattcagcaaagcttgcgcatggttcggttttggcctgtatctgtaccaccaggatgaatctcattacgacgaccacttccattgaggctcaatctgcaaaagagttgatcataagttgtaacatgcgttggatatgcccctagaaaacttcgtatctagaatcaatttttggtctttgcgtagtatcatactcataacacaaagaagtgaacctatgtagatgctatttgaaacctttttattaatattataattcttattaatattattgtataattactttttgagtggagagaaggaaggccttttgcagctaccaagtgacaaaggccttttgcaactaccaaatgacaaagccctcctctcttatccatcattctgcccacttgttgacaaatatgtagcggtatatatatctttgatccttgtcatttgttcggggtcgatttatgttaacctgggtggctgtaataaatatttgtcggccttgtgttttgt

SEQ ID NO: 30746 - DNA, 3177 bp, Zea Mays
gaaatgaaactcgcgacagacaggtcgtcctctgctccgtggaccctattcctgcgattatctggttgctcacatggacggtgatccgtgatccccggtgaccaagggtgttgaatcctcatgcaggcagaggcagaaacactgcccgaggctgatgcctgatggtgcgatcccgttccctgtcgccatcgagttcgttttttcgttgcttgacagccttaaagcggcgcacgaatgccacgagccactgaggcggcttcccagttcactccaggcccagggcgcccggtcgccatgaactcccgctcctcctccggcggcgtggtaggtgccagcggtccgagagctcgctgtcgttgggggagcgcctctgcgcggtcttcttccccgtcatcgccatcgccgaggccgttttcttcgccttcaccgactgcctcgcggacctctgcaccgactccggctcctcgcactcgcgccgcttcggcgcgggcgcgtcctcctccgccgccaggaacagtcggagcaaccattgccagccccaccacagacctttcctacgccgcgccactgcgggtggatggacctcccccaacctccgccagctcgcacgcctcgccgacgagtcccgatgctgtaaaaaaaatcgatccaagcctactccaccttttgctcttccttggtttctccgcctccatctcgcaatgccgtttcatctgactctgtttcgattgaactgaattggactaaatgaagtctcggtgaacgaggtggaggcgctctttgagctctacaagaagatcagctgctccatcatcgacgacggcctcatccacaaggtgcatccaacaaaatccctcttcgattccctgtatctaccgtccatattcttgtcattcatgacgtgatttggggttaatttgaacatctatttctttgagtgaagtatttcttgctgtacttggaagatgcgattttttttgtttttttagcctgcggacaattgcctccttggctttaaatatggaagaaatagttacataagacctgggatagtgacactctgtcatccccgcatgattgacgagtatattaggccattgagggcgacgtgcaatttagtacacaaatccatctttaattttgcagggcatgcagtggattggattattttctgagggctggattggttaagacaatgtaatattcttctttttgagttgattggagaccgtcatgtgacaagcacacatgacaaaattttaaaagtttgtttgacagcccattaagattgctcgcctgaattttcccatattccgtgtgccattatatcctaggataacacctgcatctcggtatgcttggatccctgtatgcatgattgaagagtaggtgattgaggacgatgcttaacttagtacatagatccatgttgatttgttgcactacacgcaatggattggattatttcttgaggactgaattagctaagacgacatcttattcttctttttgagtcgattggagactgtcatgtgacaggccacatgagtgcattataaaactttgtttgacagcccataggatcacttgtctgaattttcccatgttgcgtgtgcaattgggtcgtaggataacacctgcatctcagtatgcttggttgtcatgttccttcctctgccataccaaggttgaaggttttgattggtgaagcatgtgatcacatttttttattaaactaacacagcagcaattttgtgtgcgtgtgatgcggttcaaaatcagagaaatatttttcagccttacattttcagcagcatcttctatgtgtgctgtgtgcacaatagtccaattagaaaataaaatatgaatgtccttgctcgttttgtatgcaactagacgaatggccaatgtcatattaatttttcttaaccattccactgctggatggttcttcatcaggaagaacttcagctggcactgttcaaaactccaagcggcgagaatctttttcttgatagagttttttatttgtttgatgagaagaaaaatggtgtgatcgagtttgatgagtttattcattccctaagtgtcttccaccccttggcaccaattgaagacaagatcgattttgcatttaggttgtatgacttgagacaaactgggtttattgagcgtgaagaggttaagcaaatggtaattgctatattgatggaatctgatttaaaattatcagatgacttactcgaggccatcatagataagacatttgaagatgctgatgcggataaggatggaaaaataaataaagaggagtggaaggaatttgcgttacgccaccctaacctgttaaagaatatgacactgccttatctgagggacatcacaaccgtcttccctagtttcgtcttcaacacggcggtggaagattagtcgttcgaattgaaggcaataaagcagtattggggattgcttgaggtgcacaaggttcctgaaacctgacggctgttggtcgccttcaaccactgagaatccgatgtgttctgagcatcaaggcagccacccgaccatcactcctgctataaattataatataaattataaggctcatccggggtggcagatcggcagcgggaacttagggggtgtttgggaacaaagtttttctacagttttgaaagaatactgcagtattctcaaatactgcagtattatatacagaatggtgtttggcaagctagctaaaatctcagtttttaaaactgaagtattgcaaatactatagtagttttaagctattctaaacttaagtctggacctcagtttttaaaactgcggtattgtaaactgcggtattgtcatgactaaagtatactgtagtatttcaaaaactttgttcccaaacagggccttacctgatataatttcttgctgccgttttttgcgcagcaatggattgagagttggtagctgtagatacatctagcttccattctgtacgtagggatccaggaactgtaaatacgttctatggaattgtatcggaaagttcctagtacgccagccagatctagaataagccagagcttgtttcttgcagtggttttcttgccctcaatgctctcttctgaacacgaacatgcttatgcttgtcaagactgcactgggttaccatgtcct

SEQ ID NO: 30747 - DNA, 1069 bp, Zea Mays
aagaaatgttttaggactgctggcgccggtactgcgcgaggatgttgttgacggggatgttccattgtcagaggttgtgatgcttggtctggatgcagctggtaaaacaacaatactgtacaggcttcacatgggagaggttctttcaacagtccctacagtcggttttaatgtcgagaaggttcagtataagaatgtggcattcactgtgtgggatgtgggtgggcaagaaaaactcaggtcactgtggaagatgtacctgagtaattctgatgcactggtaataactattacttgcaagtgcagagacacatgagtagcttcccattatgtctctttggttcccttgtctttctcaactcttgatatggtgtttactttgtgcattgttcttcctcttccattgtactccctccattcttttttatttgtcgcattttaattcaaaaatgaactagaggacgacatatattcaagaacggagttagtagttaatatccacatcacagccctgcatttttttttttttgcatagggtagcttagtaagtgtcctgcataatagtaatcgaaggtcatttggtcttcttgctaagtttgtgtttcagctttgggtttgttgcagatctatgtcgttgattctctggacagagaaaggatcagagacgcgaggcaagagttccagaccattatcaaggaccctttgatggcaaacagcataatcttggtatttgcaaacaaacaggacctgagaggcacgatgagcacggacgaggtcagcgaagggctggggctgcacgacctcaggaacaggatctggcacatacaggggacctgcgcgctccgcggcgagggcctctacgacgggctcgactggcttgcgtccaccctgaagcagctgcaagaatcgggccacgcgacttcggtcgctggcccttccatctgatccagcgcaaggctcagctcggtcagagctttcggttgcatgtggatcggatgggatgcttgtttggtttgtggctaactgtgccccactttgcctaaggttagtcgttcgaattgagggcgtg

SEQ ID NO: 30748 - DNA, 1360 bp, Zea Mays
ggagtaaaagtaatgatgtgtgattaggtgatatccatggccagtttgttgatcttctgaggttgttcgatttgggtggttatcctccagcttcaacttatgtattccttggagactatgtcgatagaggcaaacagagcttggagactatatgcctgctgctggcatacaaaatcaggtatcccgaaaaaattttcctgttgagggggaaccatgaggatgcgaagatcaacagagtctatggtttctatgacgaatgtaagaggaggttcaatgttcggctgtggaagatattctcagattgcttcaactgcctgcctattgcagcgctcattgatgacaagatactgtgcatgcatggtggtctctcaccagaatggactagtttggatcagataaaggatattgagaggcctgctgagattcctgattatggtctcttgtgtgatctgctttggtctgatcctagtcctgatggagaagggtggggggagagtgacagaggtgtttcgtgtacgtttggtgcagataagctcgtagagtttttggagaagaacgatctcgaccttatatgccgagctcatcaggtttgtgaaagtctatcttctatcctattttatcaattatcttttacattttgatctttacctgacaatgctggcacgcttcatgaatggccctaggtagttgaagatggttatgagttttttgcacaacgaagattagtgacaatcttttcagctccaaattactgtggagagttcgataacgccggtgctctgttgagcatagatgagagcctaatgtgttcatttcagattctgaagccaactgatatgggtccaccacatgcaagaaaacaaattccaaataagccagcaagagggtgaagccttcgaccagcatccaatactttcagcatcatgatcgtcagtcagctcaaagggggtgatctgttgtttggatagttggatccaccaggacatggcattagactcagcgtcttggttggcggcttggctgtaaaggatattctgtacagcattaggttggattcagcgcaccatctgttctattgttcttcctgccggcacagtacctcattggcagcttgacatccagtagatgttagtagtctctatttgttttttcttagctgtgtcatgcattgttttttgagcgtaacttgatgtatggtgatttttgtaatctttgtaatatgtaaatgctgcaggaaataggtctgcacaaattctgtccatcagcagtaccattcttttctttttttgacttccagttcttttgtggatctgaaagatgtgtgaagctgttatctaaagtcttaaaagatgctggaaat

SEQ ID NO: 30749 - DNA, 928 bp, Zea Mays
atgattcgacagtggagcacacccgagctatatatacatctggatatgcacacacagtgttctgatgcagtgttcaagggaccggaaggattagagggggcagaaggagcgagatgggttccaggaaagcacacggggttttggtacttgttcttctgcttattgttttgcctgcgctctcgatcggaggaagggagttggcggatgaaaaggatcacaaggagcattccactgcctcttctgaaaagggagcggcgacggctgcaggggtggcgacaaatgattatgggcgctacgatccggctccggcgttttccaagcctcgcttcaagtttatacccaactgactcactgtgctgcttggcttctttgtgccacacgaaggtctctaaaaagtatggttttgtcgatgtttaagaagggttttctcagtctacctgatgagaaggttgatgacttatgtgaattgaggagtgatgttgcatctgcatgctagctatatggatggtgaggtctaagaaagattttatcaacttgcgtgggaggttctagctagccgcaggttaagtttgtttaaaaaacatattaatagtatgtatattatgtacatagatgacatatgagaattgagacgtgatccttcatatatgcttactatatatatgcacatgtggcatgtagaaatagccgtgtactgcagagaatgtgtgtaacttgtgtagtatctggtgttgctgcccctacgtacaccctactgaacgtagtcggcttcggttcttcagttctggcgttggatctttgatccggatgccataaagttggttctttcttaacaacaacaagtctacttattttcaatatttatgaaccgtattgatcacaaaagtcaacatgtgaattgcatgcgctagcctcgaaactcttcggt

SEQ ID NO: 30750 - DNA, 6254 bp, Zea Mays
aagagagagaaagaggtgatattgataagacgggaaaataccctaggctctcgccagtctccggtgcggctcaacaccgaccgaacccgtgaaaaattcgttctcctttcgatccgtttggcggggggctcggccggatccgaccggaggggcgccgccgatccatccggtcgcagccgcgtctgatttggtgcggattttggcgagataccccgctcctagctccgctgtttcaaggataacaaagatggcgtcgccgcggggcgggttcgatgagcaagatcgccggacggagaagggcaccgaggtgttcgtcggcgggctgccgcggtcggccacggaaagcacgctccgagagatattttcttcatgcggagagattattgacgcgcgcataatgaaagatcagagtggtcactcaaagggatatggttttgtgcggtttgcaaagagggattatgctaatactgccaaaaggcaaaagaatggtattgaggttcaaggaaagaggcttgtggttgagctttcaatggatcaagatacagttttctttggaaatctttgcaaagagtggactttagaagaatttgaagaattgattcacaaggcattcaaagatgttgtttcggttgaccttgcaatggcgtcaaatcttggttcttcaaacaagaagaatatcaatcgaggctttggatttgtgagattttcttctcatgcagtattggccaaatattattgcctcttgttttctttttcagtttaattggataaaacaaccttatacaaatatcaagatatgtgcaaaattaccttaccctactgtcctttctagtaggaaaagaagcacatatgccatttgtctcatgcattatcaagtgacgatatatccttaatgcccctatgtcctaataaaaatatggagccaaatgatgaatcggcaccaaattatcaaaataccttatgatctgctgaaaaactatggaattcacatctttgacttcaatgacttgtatactttgacattgattttggatttctatggcaaaatactttatgatcagctggcaagctaaggaattcacatccctgatttgtatacttgacattgattttggatttacatggcaacataatttctccatctcttatgtcataaatgactgactaatgttgcaaagaatggattttaattgttaccgttttcacatgaaaattccctgttgcattgtgggtacttttgaagaagccacagacattgaagaatcctttgttcaacacagttatagagaaaaaattggtacgccatataggaaagggacatggcagaattttcaccttagtcatatcttgtatctttgatctgctcttcatatttacatttatatccatggttgaagttcattataaagtgtacgaggatgaaataatgaccactggccagtgtttgtctgaaatgaattcccaatctttctagttcactgggtggtgctatatctgatgaaacagtctggaaggatgatgattggttagccaagccaaaggttacttgcatgcgtgccttttctgatctgcaacattcacaatctgtactgtgtactccatgcccactagtatttaactacatgaaatcaccggcatttgtcatcatttatctggatgacctttgttctatagagacctgtgagaaccacataatgccatagaggtaatgtcgttccagagtttagccagagtttttagcaacagcaaaacccaaaacccatatgtaggatatttagaaacacggatggggaaatcaacatatattttattaatcatctacttccatgtgatgtagaagttcccttgcagttcctctctctctctctctcagaccaagagtcaaataagagcttacaacaaattaatggttgcaatgaagtttaacagttcagttatgaaggcctgaagattactgttgattgaagcaacactgttacttgacagcttcttctgttgcttgtgtttgcgctccattaaaatttggcattctttgacttgcctatatatttctttaattcaagtaaaagtagactatatgccccctcgttgaacagataagatgactgcatatcgttttattaagaagaaaggtctgaaacaggaagaaatcccaaaccacattcacacccacaacactctagaagactagaacatactttttctctctcgaaaacacaggagagctgcgcttcattatttaagaagcagcaaacaaggtcccaaaatgggccagcacaaagggtggcactttacagtagccagcacctgacatagacaaacttatccataaaaacacgtcacagcactcaaacacctaaatcaggcccatatcccggctaactcagtagccccagcaagggccaattcctggcatcctctccgatatctcgcagcacctgggacacatccgccacgccttcttcgaagatagtaattgcgatgtttccacaaccaccaagccactaaaatcaccacagaattgaactcatttccctgcggtttggggactcttctctctgcttgattccaccaatcctgaaaattgacctccctgggcattgggctaaggtgctgtaagttgattagagaaagaacttgaaaccagacctgtctaccaaacgcacaggccaccaacaaatgctgaactgtttcctctttctgatcacataacaggcaaagttcaagatgctcaagtcctcttctagcaagccagtccacagtccagcacctattgaggctcgcaagccaaatgaaaaacttacatttcggagggccccaggttttccaaacccttttagccggtttaaaggctactgaccctacgaagaacctttcatatgctgacttggaagagtagcacctggaagcagaaggggtccaaagatgcacgtcttgtacacccggagccaaattgaactcatttaggatgacctagagctgtagaaattccatctacgtttgagcattactgcacctcttatatgtctgacaccaacaaccattgttcatagtgtcctgtactgtttgtatctgctgaaccttactggggatgagcttgataagagagggtgccaagaccgacaaggattgcccatggagccacctgccataccaaaacgtgctgctagcaccatctcccaccgcagttacaagcgaagcagtgaacatagcaagaccagaacatactgaaaagaaagaccaaaagcaacatgaccaaaactaccacactattgcctgtgcccctcctaaaggtctcccaataagcttcaggaggccctttgctctagctgagtaccaaaggatgcactcataagttacagcttgcaacaccgttgtaaggcttggagtagagccgttaaaaacacagttgtcctgtcccaagccaccaatattgccagtgaattgaaccccttctgtagtccattgttacctctttaactgcctggtaggctggtaccactagcttgagaatctatgggttgatggttgggctgcaatggagacaaaagcaattttctgcaacctgcaaaatggtgaactagattttccaggcgaaaacacatgaaatcaataggtgctgtgtggtcttctcttcttcatcagaaggggcaagcagctgggtgggaagtcctcttttagtgatccggtccgcatttcaagaacggttctttactgcaagccaaatggagagcttgcagcaaagaggagcccaggacttccaaattcgtttccatggagcaaagcggatggaactaaggaaaaaggtattgtaggccgactttgctagagtaagaatcgttcctagtaagcctccaaacaagctgatcagcatcattctgcttcagcgagaaaccttccatcaagtctcataagcggagatattatgtaagaacctggacagagagctcctcttatgtcagctacccaacgatgggggtacatcacttgatgatcctcttgaattccctagttgatcatttttcagtttattgccaaatctagctgtgttcttgtggctgtgaaattatatctcccatgctgatacttgattcccttatctttgcttcattactacaccacagtaatttggatctgccattatgttactatgtaactctcatttgatatcaatcacagctgccacatacaaaatacaagtatgtttatctagataagatcttgattcatcaatcaccactgatctgagttttcgccactgcgatgcgaggaaaagacagatatctaataacatcttggtgaagatgttcttaggtcctttgctttctcttcaagtcagcttcctttgatttcattcctcaaactatcaatcacaggctgcagcacgtgtaatccgcatcggttcaagaacagatttcatgcttggtgatattttgcatcctgcgataaattgggctgataaagagtctcatctggatcctgatgaaatggccaagatgaagtctgcttttattggtaacctgccagaagatgttaatgaggagtacttgagaaagctttttggacagttcggtgaggtagtacgggttgctatctcaagaaaaggacaatgtccagttgcttttgttcacttcgccaaacgttcagagcttgagaatgctatagaagaaatggatggtaaaacggtgagaggacctggtcgagggccgtctttcaagatccaggtgtcagttgctcgacctacggcagacaacgacaagaagcgatctcgtgaagaagtgagaactagaagatcaaatgcatcaggagataggcgagattattctcatggaagatatggacacgattcacttgatcgtcaagtgaaagctccaagattatctaattatgtggccgatgctgctgacccctatgaatcagctgttaattcattaccttcagctgtcaaggaagtcttgcttcgaattctacgtctaagaattggtactcgatatgatattgatatccattgtgttaaaagccttgatgagcttcctgagtcatctgctcttgctgtccttaatcagtttttgatatcaggtggagacaaacacaacaaaggagattattttgcatcgttggttgctaagcaccaggctgagacctttggcttaacacatgcattacacggtaccacttatttgtcaagaaatccggaaatgcatagcaagcgatacccacatgaagattatgattttgtgacacccagtaggtacgattcgtcagcccatcatccttcaacatactacgaagacgatccaccagtgtctgagtcaagggttagaagatatgctgaagaaaggtccaccattgtaagaagcccagaaccacgtccgcgatatgacgaaacagacataagaataaacccagaaccaagattaccatatgaatcaagacacaacgccgaaaagcatctcgatcgaagatacatacaagagcatagttcaaatattgaaagaccagctgaagaagctctcctttctagggaaaggagatttctgcctgctgcagggtacatgccgaacccaggcggctcggatttccgctccaggggagcccatcaggccagatccgaaccagcgccgctcaggaagcctgtactgatcagattagttggagcgatatgccagataagaccctgaaacaaagctagatctggataactcttcttcttgtctgccaagtgtctctgtgattttgcttgtgggctacagatcatgtaccccgagcaccatgtgtgatccagtcggactaatcatttcggcattgaaaagtcggactaactttttttgtgcccataacgctacgtattgtttggtagattaattaaaaattcatccggtgaaaagcaattttctggtatttttctggaggtgcagtaggcgtggtaatgcagaatttcaactgctacgtacactgcaagcgctgttttacccgattcgtctttacgtgttgccaaatgtttcattgacttcatagaactgatttcgactactttggatgctgagcaagggaccatgcctttctcacatatactcatctggagaatgtcaagcaagacggcccatctggacacatggcaagaagagataaactagctagctgcctcccaatgatgctactaccttctcttcgactgcttcaacgttcacatgcccctcccttgcatggcgtagtaaactgggttgcttgaaaaaacgccacttctaagcgta

SEQ ID NO: 30751 - DNA, 589 bp, Zea Mays
ccggcaccaagattgtgttccacacccccgcatggctcggacgcgccttccccaacgtcgccttctagcctaagccagtgggcaagggggaccgcaaggaggtgtaggtgggcatggccgtagacgccaccaactgatcaacttagctttcggcgccagcggccgagcgtgggctgtcgatctagccacgtcgtcacgagatccgataatttatgactattttctcaagctctgcaagtttctggatgatttcaggtttggttctatcagtgtgcctaccttcatcatttgttggtttaatttccacagattcacccaaaatcctggatcctgaagcctaggattaccgcattgcttcttgtcgtgacactgtggtcagacgccgtggtaacctgtatatgaatttcttgaatgcaagtgagaatgccaatagtatgtatcattggtcgttgtcaaagaatttgttagattgagatcgataatatacgtggtatttgtttttatgtaatcgttgtgcactaacattttgttagatattttgtaatcgtcgcaacacacgggcacttgcactataattatttactgttat

SEQ ID NO: 30752 - DNA, 1775 bp, Zea Mays
gaccttaaccacttgcatcaaacgttacgtagcctccaccataaaaagacgagaatctgacttttacagtacagtccacgtgcgaagctaatggaagatagtatggataaccgccaccaaggagaaacgctagctgcttttcctcgagaagtacgaagaagccaagatgtggtgggtttgcttgacgaatctgacattctgactgaagtttggacatagcattggggtgggtgcctgactgcctggtcagggttcgcaccgagatccttggacggaagaactgaggcgatttcgacacaatcttcttgggctcaaacaggtgaacggagaattcaggtcccacttcatccgacgatcacgcatccactccatttgccactgacctctctgttactgcgtccaggggtaagatcttgagagagcaacgcaagaacagagctcactagtagctgtatagcaatcttcgttttcttgttaaaaagggagaaaaacaagagagcacagcagatatttttgtattccattcctgaacctggtctcactttccattccattccattccattggatgccaaaccaaatcacaacccgtggttgaaaccaggacaagctcgcaagaatttggcatcagcagtccctagtagccgtttggaccttccgtagtctgaaaccaccaaagtttggccacggaatctgtagacatgaaaactaagtctccagatttttattaggtgtatacccaaacctgtcaaaatctggaaactacgaagcttctgttctgaagatggctattgccagggaacggcggtgtcttgtttgcgctcacttgacgcatatctgcccaaaagggtttcatgtttctctctgattcaactattgtcaccaggagcagaaagcagaagcagtacatgtcttctaccaataggcagttacaaatcgttttcaagagtcccatcagaaattcagaatccaacttgcagaagagtaacacagtgtggtgtgaaagaaggatgcatgtctatgtaataacaaggcaagtaccccgtgagttatctccactcttcatgaatcaacgtatatatttccaggtgctcagactctcgaacaagggtcacgagttagcaaagctgagagtgatgcagggatcaaaagcaaccaaatggatacatgtgatgaagctaaaaggtactagaacagatgttggcggcccagtatacaggcttctagttctagcgaaggtgcaaactcacaggcagcatgtgacaaaagttcagcatctggaaggcaacgaatgcattgtaagaaaggccaagctgaaccccgcaatcggaatatttatatttcttcacaacggattaagtaaactcctttttatttatatatctgtccatacaacttcattggcgaagccttttggagggttcctgctgtatgcctgcattggtacatcagcaaagaaaaacaaggacgatattttcaatatacctctccaataacagtcatgtgttgcaagaaaggcacatgaatgcaggtataatctaggcaacatgtgtaatataatgtgtgcaattgaacgggaatactaaatattgatcaggaggtgcttgcatgcactagagctaattgttagttgactaaaaaattgctagtgaaattagctagctaacaaatatctagttagactgtttgaatgtcttcaactaattttaacagctaactattagctttagtgcattcaaatatggccttaatcttcagcaactttgctgcattttc

SEQ ID NO: 30753 - DNA, 518 bp, Zea Mays
ccgcagcgtgcccgcgccggggcgctcggcggccggggcttgcccgcactggggctcaaccgcgcgtaaccgaggctgtccctcgccgtggtcggttcttgccggaccgcgcctggtcgcgagcggccaagggctcgcaacgaccgtgccgtgttcattggactgaccggggtcgtgcctcacccgcgccgaagtgcacctgggcacatgcggccaagggctcgcagcggccagtgccttggccggtgggttggccgcatggatccgtgtggggagcctgcatggtcctccctgtgcatgagccgcatggtcctgtgtaggcaggcagacgcactgcgcatggccgaggtgcgctgctgaaagggaattaggcttacatctagttcctaaatatttttggtggttgaattgcccaacacaaataattggactaactagtttgctctagtgtataagttttacaagtgtaaaaggttcacactcagccaataaaatgaccaagtattggattcaacaaa

SEQ ID NO: 30754 - DNA, 1377 bp, Zea Mays
tccgtggcttcgtgcgttcaatttgcttgtggaacgtggaagaagagcgagaacgccaaacgagaaaagaaacccaagccttcgccatcaaaaaaaaaagaaaaaaagaaaaaaaagagcagaaaaagtagagtagactacgacagcgtccggcgaggaggcggaggcgaagatgaggaagaagctcggcacccggttccccgcggctcgaatcaaaaagataatgcaagcagatgaggatgttggaaagattgcactagcagttcctgttttagtttcgaggtctcttgaattgtttttacaagatttaattgaccgtacttatgaaattactcttcaaagtggagcaaagacactgaattccttccacctgtgggattcatacctggttggtccctgactatgtccagctaatttgtactatataagtaaataaggcagctcactggccaggcagcccgaaatcagaagcctgggaacgctgcctgagcgaggcagcttctgtcatgagccaaccaaacagccccttaattcgaaaatggaagcaggaagcaatgtgtgaagaggtacagttcttttgatttcctaactgaagttgtcagcaaggtaccagatcttggtggcgctgattcctgtggagatgaaagaggattacctagaagaagaaagtcaaatggcagtgacccagagaatgatgaatcaagatctagtaaaatggccataagaaatgcaaacatcagccccagaggacgtgggaggggtcgaggcagaggacgaggtcggccaccaaccaagagaaaggaggttggttatgtacaatttgaagatgagagcagcatgtttgctgaacaaggtgagcccttgccaggagaggaaacagttcaagagatcaatggcaacgagaccatgcctcaaagcacgcaacctccagtagaggctccgccaacagcccttgcacaagctacaacaagttctaaggcggaagaagcgaacagtgatcatcagtcagattggcctatgccagatgccattggaagcatcggtgtcgtgccatctggttttggacatctgacagtgcaggttgaagatgaggactacgacaatgaggattagtcagggtcatcttctcattgtatgcactaacaggactgttctggtgttgtaaaatgtaaatatagtttgaaatagttgccgcagtttacctgtgattgtctgtcgttttatgcggttatgtagtcctgtgtaactttcgttctccaataattgcttggtagttgcttttttacatgattcaagtgttttgtgacatttaacacagtatttgagcagggattgcctattttaagtatttttgtcttatttcaccgcagtctttga

SEQ ID NO: 30755 - DNA, 2718 bp, Zea Mays
  misc_feature (2717)..(2718): n is a, c, g, or t
attggtctcaggttgtgtccctgaggaatccggtctccatatccttgtactctgccatcaccaatcctgtacatgttatggattcttttatggattcttttcttgtgcatgtgattgataggcacaagagaggttacacatatagggtaggaaccctcgggggccaaggcacctagggccggtgccccatgacagctaaggtaaccagtcctactagggaaacctcaatcacatgcaggtgagaggaatcaaacctaataagggaacaagagatataataatcagcctattataggagagattctctgtctaacatgaacatcaagttgctttaatgttcatccaatagaaactattaatgacagattgatcctaatggtagctgccttgatcacaggagcgccattagtggaggagagaggagtgccagcgactagggatagaagggaggagaggagggggagtgtagaccatgggggcttggccgccgccatcggccgccaatttctagcggcggtggctaggggagcagaggggaaggagactggctagataacatgttggagaaataaaaccctaattggtagataacttgcagtattacacatatgcaaggttttcaagtcgacaaggtaccgacttgatgactagttgataattcagtcgactagtcgtcgacttgccaatatagtggctgttttgcctatataatggtttcatatagacaatatagcatttatatatgaataaagagcatgttttacctcatttgaagcctgaaattgaacaaaactgaaataaacagcaagtcttacctcatttgaagcctcaaactgaaccaaatcagccacataagtgataagtcataaactcataagtcataacagccatatagttcaaattggaaaataaatagcaagaaaatatagttcaaacttgaaaggaaataagctccataagatagctaagctgctgctgcagctagatagatactcgatagtagataccctaaatatctcccaattcaagatcatccattgcatgttctgccaaatcaagaaaatatgttgtgtaatgggtctttgggctgtttgggctgaactggggcacaagtcagctgacttgccagaccaagtcggcgactagtcgactgagaatttccagtcgttgacaagtcgcccgacttgccagaaaagtcgagccggctccccaagttgagctcccaggaccgactggacgactagtcgccgactagtcgacgacttgaaaacagggcacatatgtacatatattctacccctaatggactaggctctaggcccataacacaaacgtacaagtagtctaacattgagaaggatcaactttggtgcattgctggcgccaaggggctagcgtagcctgattggaggtagcaggtttgattagctgttagatcgacttgtgtttttttgaagaaacaagcatgattgtagctctgtaatctgtgcatctgtgtgtgtgggtatattgcatgtttttgtgtgccttgtatttttatattcaaggaaaaaaatgcacctcaacacgtcttcgtccacgtattagaaattccattatttatttttcgcagtactccgtggagacatctccattctgtatcccatgcatatccatattgaattcatatctggtacatgatacgagggtgccttatgtatccatgtaacttaggctatttgttgttgttagcacttttgctgcattacttgatgttagagtaactatgtattccttgtaatggggtcttgtgtaatgggcttaggcccaacaactctaatatatacatcacccaacccaagttagggttaaggtttacaaccttcaaaatggtatcaaagctaggtttagcccccctctatccctcctacgatcaccttcgtgtattttggtgtgcctcctatcctaatctttctgccattgcccctcataagcttgcgccccgttccactcgttgcatcttccttgggtactcctctgatcacaaggggtaccggtgcctagacctctccactcaccgagttcttgtctcccgtcatgtcgtcttcgacgagtctgacttccctttcttcgtatcctcttccgctgcctcctctgagtaggacaccctcctcgagtgcggattctattgctctttctgtcgtgccacacgtggcctcgacccctctcgcgctgccacgtgtggccccggcatcccccgcgcttccacgcgcagcccctccgcccttcgtcgacacgacttcatcgcgctttgcggaccctgttcacgtctaccagcgatgtggccgggctgctgccctagctccctctcgcacggagccgcaggtgtatcacctcgttgccctttgttgggaccccgggctagtcctcttggcgtccaactcttctacgctctccctcgagccatcatatgcttgtggtgcgctcgtcgaacccaactggcgccacaccatggaggattacgaggccctgctggcgaaccgtacctgggacctggtgccacgccccttgatgccaatgtggtcaccgggaaatggatcttcaagcacaagatgaaggcgaacggccctctggatcgatacaaggctcgttgggtcctatggggtttcacccaacgtcccgaggtggactatgacgagactttcagccccgtggtgaagcctggcaccatccggacnn

SEQ ID NO: 30756 - DNA, 1337 bp, Zea Mays
atccaacggagtagccagcccactcactacccatgcccagttctccctgtccaccggccgccgccgccgctgccgtgcgcttaatcctacccctgtctgtctcctcatccagtgcaaggagcgcccaccgctgcctgtgtcgtttggtcaccggagatggatggggatgaggagaacgtcgggccgttccgccggactagcgcgcgcacgcgccgcatggccacgcgcatggcgtccgcgctcgccagctcggacaatcgcgcccaggtaacggtgggattggactggttgctcctcttcccccgctgtttccctacagtttgtcaattccctttcgtctacgagtattcactgtgttgaaattagaattgctgttgcagagctcactcgatattttatctccgcacgtgctggggtcaaaaaatactatccaattctatctaggagtatcaaattaccatatcaagcattggccttatgttttttttttctagaagaaggattggtctcatcgacaagtagttttggtaatactattacttacgcctatgaactagagcaaatagtcatgtgtctaaaaaatcgatagtagaattagctaactaacaaatagttgactaactattagctaattatagctgggttgaaccaactaataactaaactaatggatagttgagggtgtagctaatggttagctggactattagatgagacatgagagtgtttggatgtctctaactaaaaataaataatatctaaactattagttgggttattcggatgtcttcagctaattttagcagctaattattagctctagtgcattcaaacagggtctaagtatagactctagaaaaaaaaggaacatatttctatcctgggtttacactgcttattatgtgccatgtgtattgttgtacccgtgccttctcatgactccttaccaaaggatttgaggtgttaactcagattccattcatattgagaccattttgtgcttataggttgctgacttgctgatcagttactgtgtctgaaactattctcctttatgttttgctgcctcattatggaaacacctctgtatctgtaatgccattcaggctgcattagctcgccttgaagctcttgagagcgataatggtggggtcgaggtggtagatcttaatgatgatgagtacggatccacggatgaagaagaccctgttctcatgcaaaaaaaacagtccaagatcatgaaacgtaaaacaaggcaagggaaagctttggagaagagggcagcaagatcactcatggatgtgctacaagaaacattctccaatcttgaactggaa

SEQ ID NO: 30757 - DNA, 1406 bp, Zea Mays
agatttcgtttctctattgacaagctgtggtatcatttcaggattgtccagcactctggatttgctcctgattttgaccaagagagcgcagacctggctgcaggaagaccaaatgttgagaacgcaaccgttcttttcgaggactggtggggatctggtgttgtgcacgcaaaggtctggatatcagataagaaggatgtgtatataggttccgcaaacaacgactggaaatcccttactcaggttaaggagcttgggatttattttgctggttgcccacagatagcaaaaactgtggaggtctattttcaaaacctgtggacgctttcaaccctcaactcaactttttacaccaaacaagcctgggatacgcagtggcaagtttctagaaaggttccatgctggtctcatttcctacagcccaaagaaagatgcaggtcacccataccactttcagttgacatcccatatgtagatggatatccagctcttgcaaatcctgaaatgattgatgtttcgtttgaaacccctgggtacaagaaacctactcaggagcactacttgagctacctttcctttgcgccacctgagtgtgcgaggatgccaagtttgtttgtctacatcatctggttggcctaagaaaaaagtcatctgactgaccttgtactttcacccatacatcaacatttttcatatacatacattaagtattcatgtttcattaccttaacttatatgacataatttttcgtaaacattgaattaagacatgcaatataataaggtgttgtttggtttataatttgtaacgtaaatggtaatgggtaataggtttgaatagaccggtatcagtttttagtgtggtctctgattacggttggacttaaacaaacatgatttaacgttattggttactcatcatattacaattatgtgcagcacctaaaagataactggtcccggggactaattaatctagtaagtagtgcatttcgggacgttggtttcatcttttcttgtttcacaggtgacatttggcagattccaagcagatgagcaggggtgggttgacaccatcaagtctgttaagcttgggggaattgtaagaatgaataccatggattggcttgggcagtcacagtatgctacccaaacagtctactggtcatctttatcgtcagcaatctcagaggtagtattctcaaagaacgcgaccgtgaggctactcgtcgcctactgggcgcatctcatcccaaacaccgagaaatacctgaagagcctactgtactccaacgttctctgcgcgtcttcggcgtacaaccactgtggcggcaaggtcgagatcaagtactacgtggttcctgggcacaacgagaccggacctgctctgtcccagggcggcgaag

SEQ ID NO: 30758 - DNA, 2038 bp, Zea Mays
gtcccggagcccggccccacctccatccagatccacccgtcactccgtcagccccgccgcgcgcaccatggatcccccgccgcggcggctagccgccccgctcctcctcctgctcctcgcagcggcctcccccgccgcgcgcgcgtggaagaaggacgagttccgcaactgcaaccagacgcccttctgcaagcgcgctcgaacccgcgccccgcactcgctcgaggcgccgctctccctcgccgctggctcgctcgccgtctcccccgacggctctatctctgccgagctctcccacccgtcccgcccgcgacccctcgtgctccgcctctccgtgctgcccccgcacgcgctgcggctccagatcgatgaggactactccaccgccactccgtgctggcctggatcatcttcctatcctgacatgctgaatcctgagatacgcgagtggtgggctgacaagttctcctatgaaaattacaagggatcaactccaacactctacatttggaacgatatgaatgagccatctgtcttcaatggccctgaggtcaccatgcccagggatgcgatgcattatggagatgttgaacaccgagaattgcacaatgcatatgggtactacttccatatggctactgcagacggacttctcaagcgagacaaggggaaacatagaccctttgttttgtcaagggctttctttgctggaagtcaacggtatggtgcagtctggacaggcgacaactctgctgattgggatcacctgaaatcttctatcccaatggtcttaattcttggtcttactggtttgcctttctctggcgcggatgttggtggattttttggaaacccagaaccggacctgttggtgcgttggtatcaagtaggagccttttatcctttctttaggggtcacgctcaccatgacaccaagagacggagcgaagaactgccataataagggaggcgattcatatgcggtattcactgttgccctacttctacacgctgtttagagaggctagtgtgaatggcattcctgtcatgcgtcctttatggttagaattccctgaagacaaagaaacatataacaatggtgaggcatttatggtcggaccaagccttttagctcaaggaatatatgaagagggccagaaatcagtgtcggtctaccttcctgggaaggagtcgtggtatgacttgagaaatggatctccatacaagggaagtgtgacacacaagctacaggttttagaagatagtattcccagcttccaaagggctggtacaattgtgccaagaaaggacagattcagacgcagttctactcagatggtgaatgatccatacactctggtgatagccctcaatagctctggtgctgcagaaggcgaactttatatggatgacggcaaaagctatgattaccagcaaggggcattcagccatcgccgatttgtctttgcagacaataagctaacttcattcaatatcgcacctgacaatttgagcaagaaatttacaagtggttgcgtgattgaaagaattatagtcctcggtttacgatccggagtgaagaaggctattattgagcctggaaaccaagaagtagaaattgaatcagggccaattagtttaaggagtggttccagcccagttgtgccaacaatccggaggcccaatgttcgcatcgcagacagttggacaatatggatagcgtaagaggttgtccattcacgtctggagcctgatgtctcttttgtttgctgtcaggttgcgaagttaggccaatctttagaagtttagttgtggcctcgatcattgcgcatatcattatggttttgtggcctcaaaatatttacatgtaactggtacttaagctgttccaactgccaattttgacagaaatactgagagagattgctgatgtatatttgtagctttcatacatgagtatttgagtttattatcttgcaaaaatgataaacagttacaaattccgagaacatggcaaccgagttctatttaacgtttc

SEQ ID NO: 30759 - DNA, 2733 bp, Zea Mays
ggatttccttccgccttccgacagcggctgtctcggcgacccaaccccagcctgaccccacctcccgccgccgccgccgccgccgccgccgcgccttcgtcgtcaggagcagggtcccggtggctgcgtctctctcccctgcccccctgctccacactcggttcacgcgtcggctcgctaccgcaggccctcgactcgtacgcccgtccccggcggcgatccggccggcaccgtaaccctaggactccgacggagcaggaatgatgagtcatgaacagcaaattgtccctcctagtaagggttctgtgaatggattcccccatagaaaactggataaggagggcagtggaacgcaaagtagaataaatttggtgaggtcatcctctggtggttttactaattcagggcatggaagccattccagggaccggctaatctatgttctaacacaacttattgggcatcatgtggacgtgcatgtgaataacggctctataatctctggaattttccatgcaacaaaccctgacaaagactttggcgtcgtcttaaaaatggctcaggtcataaaggatggttctgccagaggacaaagatatcctgctgttcttgtaaagaaacctgagactatgataataccggcaagggagcttgtacaagtttttgccaaggacatagaacttggcggcgagctgccaaaagttcctggcaatgacaaaaggaaggacttgctgattgattctgctattacccgctatcattatctcgaagagagggaacttgagcgctgggcaccagatggaggagattcagagtgtattgaactggagaagtatgaccggaagggaaataggagctgggaccagtttgaaaccaatgcagcattatttggggtaaagagtactttcaatgaagaaatttataccacaaagcttgagagaggtcctcacatgagagagcttgaaaagcatgcttcgagaatagctagagaaatagagggagaagataccagagatattcaccttgcagaggagagaggcttattcctgggtgatgacctggaccatgatgaagagataaaatattcagcagtgcgtagagacaccgataacagcaagtacaagccaccatttactaaggtcccaagcagtacatgccatgttgattcgtttaacaggacagtcaatattgatccgaatgattcactggcatgttcatcaacaatggacaaagaatcatcatcccacatatttgatgacactgatgcatctgccactatccatacaaatagcgttagccagccaacatctgattatctgtcagatagacccttgtccaatgatgaaaacaggttggacagaaagctgaacaaagagagtaatgaaaacatggataacagaaagttgcaacatgaggataatttacctgatggtgccagacctcttatttcggaagcgttggatgggcgatcctcaagttcacatgcatatgaaccgtctttttctggtcaaggattcaaatctccagaaacacccgattcgacagtgcctgtcaagcatccttctgcgatggaacctgtgacttcctctcaaagacctggcagctcaacatcgtcaacatcagagcgcattggtgcaaactcagccgcgggtgctcctggcttgtcaccaagctcttcaataggatctcttaccgctgaaaaatcgactttgaaccctaatgctaaggaattcaagctaaatcctaatgccaagagtttcactccgtcagcatctctgaggccaccacaccctacatcatctgatgcatcatattactatcctaataacatgccggcgatgccacttggacccggtttgcctgtgggcatggggttcccaccggcatatggcgcccagcctgtcatgtacaatactcaacctggagcatcaccgcacggttacatgcatcctgctggtccacagtatgggcaacaaatgacgattggggggcagactcgtccagtttattattatgcgcctgagatgcaacaatacagaggaagaaacttttagatataccattctgaactgctcttagatggaagtcgctgcaatccccacaagtgggattttgaccagcaaaaaccgctattacaatggaaaaaactggtcctgttgtgttgctcggattggttggacaaaaaagcgcaccgactttgtgttgctcggattgcctggtcaaaatgctcttcattgtcctgtatcagtgttgctcggaagcaggttcactggaatttcatattatttttgtcagactattgatgttgtaaattgaattgcgggtcatctgttcgacccggaaatgacattcataaatgtgtgaggttgccccatgtaacatttatgtgttccttaacgttgttctgatgtaagatttggacgaaatggatcaaattgctgacctatctgctcgtttatacccagctggagtagcaagcatggaggggacgtagagtcttactagcgtttgggatggagacctaaaaattgttagggcttacgtttataatttgcgaaccagggtggttataagattgttgccattatcgtgtagtcactggattgaaaggtgttggtgggcattgacatctgatgtggttcatgtgttggtaatggacggcggtattatagggaagtaggtagtgtttggtttaccatgggtaatggtatcgcaatggaagttaaaaagcgg

SEQ ID NO: 30760 - DNA, 3250 bp, Zea Mays
ctctgtgacccctccccgcgcggcggtcgcggtcatcccgctgtcgacgctacttcggcaagatgagcttgcttgggacggggcttcagcctcggcctcgacccgcgtcaggtgaaggctgcggcacgcgtcccctcctccgcctccagtctccgcccaactcaaaaccctagcaaccgcgcctccatccctacccgaattccaatccaggtccgatcccccggtggcgaggacacccggcgccgattcgtccccgcagatcgaccgggcaggacatatttgggttcggggtccgctcgagtcgcctcgccggggtccaccgcggcggtcagggggtatggtgggcggcgggaggcggggcggagcggcggaggaggtcaagctttacaccggcaacgtgttcgcggcgctcgagtccctcaagaagaagaagaagaagggtgacaaaggcaaggcggtcgggaggaggacggcgagggggccgctgaaccctgggcaaacaggcgagcgagtacgccgactgcgaggagtaaacttgtgtcatctcgcgcggggccaacccgaggaccacgcacatcctcgccggcgagacggtggaggtgcgcaggggagacgtaggtggtggctgcacgaaggtggttttcagcattgagccgttggcattgagcgaccggcagcagcccgcgtcttcgtcttcgtcgccggcggcacccgccagagtcgtcgtgtccggtcgttgctgctgctgcatgaagaggctgctggaggaccgggacatcttcatctacctgggcaagaaggccttctgcagcgacgagtgcaggaacgggttcactatggaccgtttggctcgaattgtcttgagcccaaggaaatctgggcctttttaatcgtcgtcacctagctcgcggatggtccgcacacagtttccaccgtcagtatcgcattggagtgaaacaacacccatccttgccaccgattaggaacttaggaatggactcgccggtgcctgctacgctcgcccgcgcgccagcgagatcgcaagcgcgggcgggcgaggaggcttgcgcggatactcggcaggatgctccggcggaagcggagccacctccccgtcggccacccgcgttctacagctccgtgtttgcgtagatcgaagagatcgggtggaagcagctggtgagcgccacaggagacggagtgtcctgtctcaccttccgcgtcgtgtaaggattcatgttgctgccagttggcactaacctctttctataggtttatattatacgactgtttggagaaaaaactattgccgttcaggtggttgagcaacgctggcgcattacatactgaattttgtcagtttaatagttgttcgaaaaggttatttcagaaacctatctaaacattgtaatacatatgaacaacaatcgcaattgtagcagcgtttctttggaggcacccctttaattctattctgttgtttgaatgttgaaactatggcttatgtatctgccagggatgaaccaggacagatgcatttactggagatcacactgcccatgggctatcccgaaagtcctccttcaatctctgcagttagtctctatcctgatatttttattatactttgccagggatgaactaggcatgtttttgattatagcccatatgtagccgccagggatgaactaggcctgtttttattatactttgcagttgcatgaaatttcagaaccataaccatatgggctataattgaacttgtctcattaacaggacgtaccatatctcccaaaaatacattggtcaaaaaactcaagactgaaagatgttatttgccatgtctcattaacaggacgtaccatatactcacatatttcctgcattgcattgtacacattttcttatatattaacgagtgcaggaacgagttcatcgaggaggcggcggaggaggagctcatgattctagatcctgctcgaaatctttgatcaagatttgttagttgtcgtggcaaaagtagagagtgtaatatttgcccgcaatattttgcttctaccttcaacttggggactacttggctgggagagtgagtgggggaaggacaaaggaaatgcctctcattcaagttttttgctgtaaggagaggtcgtcccggtttggccaaccagtgcaatggtcgagccagccaatttccgtggtttgttgagctccattttggctactgtcatattagctcttcggcatcaatttccgggaggaggatggcgagggggccgcgcagcggcaagagccaccgcagaaggagctattctcagccttctcagccttttccagtttattttattttttatttagtagcatttcgttaattccagttctatttgttacaatgattccagttcgttcttgtagcaatagctggctctggctgaattttatgatctatcaatttaatgtcatcatcatgattaatgtggacttatctagactgtttttggatagagtagtagttagtgatttctgatccgactattgtcgctgcaatctttcatgttctttttatgtagtctcactttgctcctttttcattaatggtttattcgtggacattttcaacttctaccatcaaaccttctgatgttggtactttgtgttctattcaattattttacccataaaagaacttgggattattttataccttttatctctactactacttaagtgtctattgtaggcgtccacaaaggcggatggtgcacggttctgccggttccgcatcccgccagattgggacgaattcggcatcggctccaccaaaggctccacggatttggcatcagctccacagattttcgatactgggtaacagaaatgcatgtttatggtgttcgttttgaccttgcattacatctacaatgaccagaggatgcagaacgccactgcagcaccgatggaattgtacggtgtcatcaggctcgactaaatctagatgggatggactctacttgtgttgaaggaaaggaagtatgtgcttggcttgcgaggagggggcatatttctgttcaacttttcttacgggtcatgttacttgtcatctcagattacacaactttaggtatttctgtctttgtgagaaaagtaccaaaatagtttcacatgtgtttaatttgaatattttgtgtgccgttgcaacgcacgggcacatacctagttatatttataattttagatacataattagaca

SEQ ID NO: 30761 - DNA, 281 bp, Zea Mays
cacattgatagcatttgatgcgccatttcaactgcttgtgctattttttcgagcttgggttttcttgctctgccagagtttgattgatttgtgagcttcggcatttgcacaagtgttgactaaatggctgaagagaagaaggttgttgaccctgcactagctgggttttacgaggctatggagaagacaaacacaaagaagatcaccaatgaaatggtagttgggttgtctgaagatcctagcgatagtgaaagttttgatttggaaagtggaaacgaaga

SEQ ID NO: 30762 - DNA, 2963 bp, Zea Mays
attctttccatctacccccacctactgcttgtaaatacaagcaacaccctggctggcacggttcaaaccaagctttctctacccaagtcctgcgccggccgccgcttcttctccttgcatccggttcaggatttccagcggcctcgactcccgatccggtctccgtaggagcgtcggtatcctcgtgtctccggcagtctttcgaacctcggttggtcccgattggcgagaaacccccgcgtcgaattggcggccaaggggcgcgggacgcatcattcgattcttggcggctgcttgcctgcttgtgcttgagcgcttaacagaacttcgcgagctgggctttctctaggtggaaagacaatttgatttggagatggggccggaaatgatagagcaggatggatggtaggaaaaggaaggggaaattcaggaattctctcaggcgtatggctatggagtgcctgtgctctggtgagcagttgaaggcgtcagatgagaccatgcggtcatctgattctacgatcacaaaggatttctcggccagtgggtactcttctcggaatggagagattgagcagtaccttgataatggcaacatagaggaagccgagttgtcgctccgggagggcatttgcctaaattatgaggaagcaagggcattgctaggaaggctagaatatcaacggggtcatgtagaggcagcactccgtgtctttgatgggatagacatatctgcattagttcctaagatgaaaatctcaattgctagaaaaacagaccgtcggaagactcattcacagtgggattccccaccaatgcccttgcatgctgtcagccttctcatggaggccatatatcttaaagcaagagcacttcatgatcttgggaaagataaagaagctgcacaagaatgtagaatgatattggatattgtggaagcagctgtacctgagggcttgccagcaggctttgggaaaggctgtaaattgaacgaaataatatgcaaggctgtagagttgctccctgagctgtggaaatcaggggggttttcacttgaaaccatttcttcatataggaggtcacttcttaataattggaatcttgatggagagacaatagcaaggatacaaaagaaatttgctgtttttctcctatatagtggttgtgaagcacgccctccaaatcttcattctcagttggacggttcatttgtacctcgcaacaatattgaagaggctatccttcttttgatgattcttttgaggaagtccaatctcaagaggattgagcaagatccctctgtgatgcatcaccttacttttgcactgtccatgtcaggacagctaattccactggctggacagtttgaagaattgttacctggtgtgttagacaaaaaagaatggttgtacagcgttgcattgtgttatttagcagaagaagatgatctgagtgccctgaatctactcaaaattatactaaaatctggagaggactccgttcaactcatagaactgcttctagcttcaaaggcttgcattgagatgagtattcatactgaaggtgctttttatgcaaggagagccattgcaaatatgcagggaggatgcaaaccaatggcaggacttgcaaacctattgcttggtgttgcactttctaatcaggctagaagtgcaatatctgatacagatagagcttcttggcagtgcgaagcactggaagcccttgggaatgctgaaaaaaatatacatgggaaagattctagggcattatacagtctcagccttgaaaatgctgtgcagaggaaattagaattagctgccttttatgcaaagaggctggtgaaacttgaggctggatcagagttgaggagttggctccttttagctcgaatacttagtgctcaaaagctgtttgctgatgctgaaacagttgttgatgctgctctagatcaaactgggaaatggtgtcaaggagatttattgcgaaccaaagccagaattcaggctgcacaggggcaatttagagaagcggttgaaacatacacccaacttcttgctatcattcaacttagaacgaaaagtttaactgctggagtttgcttgccaaagggcaacaaggatgataaaggcctggaaacagagacctggtatgatctagctctcttatacctaggtatggcacaatggagggatgcagaggtttgtgtattgaagataagatccatcagtccttattctgcattggcttggcatgctacaggaaaaatatatgaagcaaaaggtcttagaaaagaagctttgggagcttttttcagagccttagatcttgatcctaaacatgtcccaagtttaatatcaactgccactgttctacaacaacttggtgacaggccattgccttctatacggtgcttcctgactgatgcattacaactggatagaactaatcatgttgcgtggttcaatcttggccttctttacaaagaggaaggtggcaggtcagcagctgaggctgctgaatgcttccaagctgctgcttttcttaaagaaactgcaccttcagaacctttcagatgacatctacaggggctatagatgtaagctgctgtatgtatttttgatatatttcactgatgaaatagtggattacagagttctaaaaatgatcttcttgggagatcacagcattggaaactgttggaaaaaatgtttaacaattcaatctatagttccaattgttgcctgtatagcaacaagaaagacgatgatcttcgccttgtgtaggaacagtgcttactgtgatatatatatatagatagatgaccagtacattgtgtatcttgagtaaaatggtttcacatataaggtatcagactactctctccgtttgttaagaatttagtcaagatataaaatatgttctggggtccttcagaattcagttcagtatttactatcaac

SEQ ID NO: 30763 - DNA, 276 bp, Zea Mays
cttttttgggtggctgcaggaggagctagaggtgctcccgacaatcatgacgggcctcatgtcctttgcctccctcatcacctgcgaaggggccgtgaatgccctgtcccgcgagggatgcgggcacttcgaggtcttcgaccggtcggacgaagacttcgagcgcgaaatcttccaggttgaggacccggtgctgaagcggtcggccggggtgctctatgataggatgtggggccctcacggtcgtgagaccgtccgggagaggtttgaccgggc

SEQ ID NO: 30764 - DNA, 331 bp, Zea Mays
caaactagcctaaaacgaaggtaagatcgcagggaatactatgaacgaggtcttaccacctatcggcacgtcggtgtcgctggccacgacgagacgcggctccgccgcggacgcgaaactccaacgaggaatttcaccgaccaccactgctcctcccgcctaaatcctccacagtcacgacacacgtagccaggagagtcgcccagaccacacgcagaccccggaatggcggtgtaggcgcgcggcaacggcggtggctcccggtggtttcggcggcgatatttttggtggccaaggtaagcagagaaggaaggaaaggagggaggagggg

SEQ ID NO: 30765 - DNA, 332 bp, Zea Mays
cagtgacacagtagaaactcccggtcacggaacagggctacccacgatggagttcggtcgacggcgagaaatcgcccacggtccgcgggtcccgccttccaattgcggtcacggacgacttcccgaggcgttggcgaccctcctcggccacaccccgagaacggaaacctagtatcgatgagaaccaccgacgacgacccaaattactccttgaccgccctccctctctcaccacaacgacgttttcagcaagatgcggatggagaagtggacgatggtcttactacggtggctggattcttatgtagggtgaaggaaaagggggaaaggaa

SEQ ID NO: 30766 - DNA, 317 bp, Zea Mays
gcaaatgcaccggggcttgcctgggattaaacactattaagtcagtgtttgttaaacgagatttgcttgtcggtcatctcccatctgggtactcgatatatccatccatctcgaacttggtccgttgacatcgtctctcgaagtaatccaccctttgcatcaccttgaggtcgactcggctctcgtcctccgcatcacgtgatcactaacgtactctgatgagatgcataatgcacatgtatgaacataaggaagaataacataagatattatgatgctacgcaatagagaattaagtacgtaatggtgaggcgttg

SEQ ID NO: 30767 - DNA, 1957 bp, Zea Mays
ctcgcaccggacctcaattaaaaaccgcagaaaaggaatcaatccgaccatccataaaaaggacggcgacgcggtcaccactgcggcaccgccgccgccgccatcctcgacccctgaagtgaagaggcaacccgaggacgcctctcccatccacgcgcgaatcctaccgccctcccactcccaaaaacctagccgcgcgcgccacctgcatcccatggcggcaaccgcggccgtggcggggaccgggtcgtccctctcctcgcgccgcagtcgcagcgttgtctcctcgtccttccgcgcagctgcctcgcgcttccgctcgccgagatgcgtgctcgggagcgagcagctgcgggtggcgcatgaagggaagcggatgagcggcgccgagtccaggaccgcgtgggcgccaaaggtgcccgcaccggagtccaggcttgccgcactgccaagggagctgcgggactccaggatgaagatcttctccggcacggctaaccgtccgctcgctcaggaaattgctgcttacctgggtatagaactcggcaagatcctgatcaagcgctttgctgatggagaaatttatgtgcaactgcaagagagcgtgagaggatgtgatgtgttcttgatccagcccacatgctctcctgtcaacgaaaacctcatggagctcttcatcatgattgatgcatgccggcgggcttcagcacggtctattaccgttgttattccatactttggttatgccagagcagacagaaaggctcaagggcgtgaacccattactgccaaacttgctgcaaatttacttactgaagctggtagtgaccgtgtcattgtatgtgatattcattctacgcaagcgttggggtacttcgatattcctgtggatcatatatatggacagtgtcatccttggtgtctgtagcctgtgattctggattacctggccagcaagacgatatctgaagatcttgtggttgtttctcctgatgtgggtggcgttgttagagcacgtgcattcgctaagaaattattgaatgcccgtttagctattgttgataaaagaagacagggtcacaacatgtcagaggtcatgaatttaattggcgacgtgaaaggaaaagtggctatcctgattgatgacatgattgatacagcagggacaatcactagcgcagcggctttgttaaagcaggagggagcagaagctgtatatgcttgttgtacacatgctgttttcagccctcccgcgattgaaaggctttctggaggcgtctttgaggaagttattgtgacaaactccatcctgctgccggaagacaaatgcttccctcagctgactgtgctttcgatggcgaaccttgtgggggagacaatttggcatgttcatcgcgatggctccgtcagcagcatcttccaatagcagaaacgagcgcgtagcatcgtcacctcgtcttgcgttcgtgtgcttggtatagagaaggcacccagtgcctgtgctgcttgcgtattttcgtagggagtcaattttggcggcaaggtataataaggttgtattgcccgatgtacggggtgataaataaggtggttattgccagtgtacgtgggataataaggttgtatgctggtgtaggtgttctgcaggctgcagcgtgttactaattaagtgcatctcttgtcctattatgtattgctgaggtagttgttgtcgagttgaagtttcagtgtctcagatacatggggatagtgatgtacccagcactcggtcactagtgaagtcctggtcattggaaatatgggagcaccaatttctgttttaaggtcggcattgtagctcaagctgttaatactcaaaattgcctgattgtctatgagcaccctgcaatatttactggtgtgatgctgcatatttgctcatatgagtgtcgtccaagattgaatatgcaaacagcgc

SEQ ID NO: 30768 - DNA, 1897 bp, Zea Mays
aaaagaaaaggcaaccaagcgaaccagaccctcccaacggtcacctcacctcgcccgccgcgccgtgtagccagatcgccttcaggttccacgacctgaccacaacccctcggcgctcatcgtcatccaccgccgcccgcgaggtccccctccagccttcactgggcgaaggagaaggagaaggtgaagggaaactccgcgcgattgccgccattaactccctccccccacccttctcgcaagcgccaccggatccggtccctccccacccgccctttctccccacctcacggaaccccgcccgcccttttaatagtttcgccccacatgcgtggcgcgagtgccgccgccttccgacgcagcagccgcggccgggatgtcgcgtatccgtagcggggtggaggtggtcgccagtagggggtgcgcgcggatggtgatccccgggatgcatcacaacccctcatccgccgcatccgtctcctcctccgcggcatcgcgcgcggcccccgccgccggttccgggccggcggcgcatgccgatgggcccttcgcaggcctcgtcatctgcgtcactgggctgtccaaagaggcgagagttcaggtgaaggaggcgacggagcggctcgggggcgagtacagcgggagcttgcaccccaagtgcacgcacctcgtggttcagagctttgccggacgcaagttcgagcatgcactgaagcatggtccgaggaatgggctattcctcgttacgctgggttggtttgtggactgcgtgaggaggaacatgaggttggatgaatccttgtatgccatcaagagcattggggagaatggtgtgccgcccggggagttcagccgccttgttggagttcctgttaacgagaagtcttgccttccaccgttgatatttcaggacaaggcatgctcagatatgacccagaagcattcgctccagactcctgggaacggtggtggtcatgatgggttggtttttatgaatgacacaatctacattgaccctgggatatctgatgagatgaggaaaaagatttctgacgctgttactagagaaggtggaaagttgctggagcactggtttattggttgccctacaacttatattgtctgtgaggatgtttgcgttaagagatatgtaggccactcagaaaacattgttactccgctttggatcttgaaaacagtgaaggaaaaaaacttgcagcgtcttgtccatttgtcttccgacctagctaggcatgttgccatggttctggaaaatgttcagacatctgaagaggaaacttggaagtgtaccttctataaacacaagctcatgtggtcgtccatcaaccaaagaggagatcaatgaagtccatcaagcgaagcaaaagtttgttgaaggagcaaagaaagaagtccgagaccgccgtgcccgtcgtatgcagtcatgtgaagtaaccattcatccaatcacaccggccacacttctggattcaatctgctggacaatctctgagccaacttcatctgcgtcaatttatatggactcttcgtggtccgatgatgccaatgagcagcaaagcaccacttactttgatgcaaatggggacgtgagggatccagatcaacctaatgacaatttttcccgtccactgaaagaaagtgagcgaagtgagctgatcttcaagaatcacttccttaccatactcttccctgttgatcgttttggagaacttggaccttcctcaaagacgttctataacaatggtggctttacgtgtatacaagtactgaatcacatttacaacttctaccaggtatataactactgcacactcatcgctcaagtttggactctttttgtcttgtaaaacattgatggcagtaaaactattctcga

SEQ ID NO: 30769 - DNA, 2888 bp, Zea Mays
actgccagtgctaggggcagtcggcaggcgcggcgcgttcccctcagtccccttccccggctggtcttgccgggagtaaggggaacgaagccaccggcgcggcatggagcccaagccgtcttcggcggcgcatgctgacgcgccagcggtcgaggccccccgccgccgtggcggcggcggcaagcgcaagtcggccgggtcctcgttcacgccgtcgaagcgtcaggccaaggagcggaacgcttccttccacgtgcccccgcatcttctgcacagcgggccgctcacccgcgccgcgcgccagtcgccgcacaagctctcgggcacgccgtcggagtcggtgccagcgtcgtcggcggccgcaactggggacggggtgagcggcgggcaggcggtggttgatgcgatccggcccgagacagaggaaacgccggccccggagctgccgctggtagacgagatgttcgaggccgtccgatcccgtggcgctggcgtccatgtggtccctacctttgctgctggagtccaaagacctggctgagttgtcaatcggggagaccgatgctcggcaggaaatcttggaattcttggatcactggggcttgataaatttccaccctttcccaccagatggacatgaggagagtaagccagaggagacccaagacaattctaatgacgagaaagcttctttgatcgagcaactgtttaagtttgaatcagttcaatcatatatgacgcctttaccaatgaaagaagatgtgagagctccgcctcctctgcctagcttgattcctgaatctgtactcattcaagatgtggttgcagcagctgagccttctgttgagtaccactgcaattcctgttcagttgattgctcacggaagcgctatcattgtcggacccaggcagattttgacctctgttgtgattgctataatgaagggaaatttgatccaggcatggccaaaaccgatttcatcctcatggattctgcaggagtttcaggtgctagtggtactagttggacagatgaggaaacattacttctattagaaggtttggaaatttttggtggaaaatgggctgagattgctgaacatgttgctactaagacaaaagcacaatgcatgttgcactttcttcaaatgcaaattgaagaccgcttccatgatggcaaagatattaatcaaaacatcccagtaagtacagatcaagccacaactgagaaagccattgctgaaacatctgagaaaatggaagttgaagataaagtggaaggaagaggtactgtggatgaaaaggcctcagagaaaacagagggaaactgtgaagaaacaaaaactgaaaatgccagtgttgttgtaaataaagatactcagaattcagatggcagagattcaggtgcatctccaagcactgaagagccaaagcaatcttctgatgagcaacctgtagtaaaggaaaattctgcagatgtagatacttctggtgaaaaactatcaaatgttgctattgatatcttaaaatctgcatttgaggctactggtcacagcccagaatatgaaggttcatttgcggatgcaggaaatccagttatggcactagcagcgtatttagctggtcttgtggaagatgataacaccaccacttcattccgtagttcactaaaatctgtatctgatgtgtctcctgcactccaattatcaagtaggcactgttttattcttgaggatccgccagatgaactcaaagacatttgtgctagtgtaagtaagaaaaatagagatggtgatcaaaaacaagatgaggatatgattcaaaattcaattgataccgagaaaaaagagatcaatgagaaagaaggcattaagagcgtctcaagtgatgattgctccttagtggagccaaaaaccaataatgctaaggagtcaggtgattcaactgctattggggacaagagtgcaaccgaaactacaaaaggtaatactgaacaagtgaatgacttgccaagtgttgaggtggaggctcctgatgattcatcttcaaaaggtaaggatgagctcaataagactaaagatgcagtggcgacaccagctaccgtacaggaacagaaacacagccaaacattgggaaatggggatagggaagaacctaacaacattgaaagtgtagttgtcggtgaagagaagggctctgtagtgactgccaaccgacctgattccatagctaggctcaaaagagcagcagctactgctgtttcagcagctgctgtgaaagctaggtttctcggtgatcaggaggaatatcaaattcgaaggctgacagcacttgtaatcgaaaagctgttccaaaaaatagaagtgaagatgtcattgttttcagagattgagcaggtggtctttcgaacgagagagtacaccgagaagaccagaaagaagctcctgaaggaacgaaatgcgattattgcagctcggatgggcgcattgccgtctaggccaaaccagacaggtgtagccggaaacaggttaccacctgggtatggcaaccctcctgtaaggcctccaaacgcaatgcctcggcccaccagctgaggaaattccggattccggacacccagtgatctataccccattcttttagaagcataccccaaagactcaaacctgccagcttgttgtagcattttttagaaagtacattgtacaattgtctgtataactgcttctatgaaaattcaccaaacctccacaactgttttaaacattccatcagataggaaaattccatttctctacaatgaacagcccacttgaccgttagcaagattatttctgctcaatttactaaaatagaatgctatatatctgctcaaagtttacttgcct

SEQ ID NO: 30770 - DNA, 1180 bp, Zea Mays
cggaatttctgctccgatcttgctgagaaggataatttatgtttatatggacttcccaatgagacatgggaagtaaacttgcctgctgaggaggttcctcctgaactcccagagccagctctcggaattaattttgctcgtgatgggatgaatgaaaaagattggctatcacttgttgcagtgcatagtgattcttggctaatgtctgttgcattttattttggagcaaggtttggattcgacaaggaatccaggaaacgtctcttcaccatgatcaataatcttcccagcatatatgaggttgtcacaggaacagccaagaaagagtccaaagaaaaaactcctaaaagcagcaacaagactaacaaatctggctcaaagccttcacgccaggtagaacccaactccagggtcccaaagatgccacctccaaaggacgaggagagtgaaggggaggaaggtgaaccacaggaagaccatgagagtgcgctgtgcggcgcatgtggcctaggttatgacgacttctggatctgttgcgacttatgcgagacatggttccacggcaagtgtgtcaagatcaccccaaataaagcggagcacatcaagcagtataagtgcccctcgtgcacaggaagcaagagggccaaggcttgattctatctatctacgatatagatatgaattgcggacaatgctccaagaaccgaggagcctttgacgagagttgtaagatgaatcttccgggtagggcagctaatagatttgaatacttcgtgtggatactgtcggcattggtgcttgagatgcctcaaaatatagtgtcagtactgatcaactgttaactgttgtagtttgtggggccctcaggcatctatgttctgtagtctactgtgtggtggtttagataccgtctatgccatttgtgatgaagcagtcgttttaaagttagatcccagtaatttccctactatacatttgtcttcgtgtaatcgtgtttaggcagaatctagcagtgaaggtcaggtcccgattgtttatgcattcgaagatgtcggttaaatatgtggagtcgtagtggttctgcttgtttgtgtgctctcctaacttgttgatgacacttacattttcttcatttggtttctagaagtccatagggtttcaacgataaaattgactaggt

SEQ ID NO: 30771 - DNA, 1122 bp, Zea Mays
aagagaacaagggtagacccggaggccaccacatgagtggggtatgggaaaggaataaactgaggatgaccccaaatctagggagctaattgctttgagggctgtgattaagtgtatcgaagagcataagcttcagaaggagtgttcacttggacctctccagaagcgtgtttctgagctgaagcccaagggtgagaaaaggccatcaagtgatgctgggcgtacttatgcaaagaagcctcgaggccctggcatttcatttcctaggagacctgccggttctgttggttcagctgctcgcaggcctccatttccgggctatacctggcagcgtgctcctgcgccgatgccctcccgtggtcctgctccagtgccctcccgtgcccctcttcctgcccctcttcctgatagatatggagctgctgaccggtaccattacacaccaccagccccagcatacgactctggtgcattttcgtcttacagtgaacctttcagtgccccaaaaccattccagtacactccagggtcagtggcagcatcatacaattcaagcccctataaagtcgcttatggtggcccaggagcaccagtcagaagcacctatccaggttatgccagcgcatctgggccggctgcttccagcagctatgcaaattatatgggatccgtatatcgccctccccagcaaccatagattcgactcctccctcaaaaaatgttgtgctggtgatgcaagacatggaaaccagtccctcccatccaactcccatggcggagatgtaaacttgagctattttcttgtttcatcgtccacaacagtggggtttggaggtgtatactgatgctctcatgtccagctacatctacaatgtaccttgcactcttgtttgcttttagctgtgcttattcctgagtcgttgaatgttttatattttctttccacaagtctgtctcatgtagggaactgtctcatctaggaatataactcctttacttgctaccgttgcgattgagttggaaacgccgattgagttggaaacgccaaaacgtggcttgagtttaacagcttgcttatccctatctcatttcatttttcactttgtaatagtcaaatagtgc

SEQ ID NO: 30772 - DNA, 2632 bp, Zea Mays
cctccccccgccccacctcaatacaatcctctgctcgcgttctctcgtcccggcggcggcgtaggcgcgcgcaccaggtgttcgacgggagttttcgccaccgcggaagatgtacgtggtcaagcgggacggccgccaggagacagtgcacttcgacaagatcacggcgcgcctcaagaagctcagctacggccttagccaggaccactgcgacccggtgctcgtcgcgcagaaggtctgcgcgggggtctacaagggcgtcaccaccagccagctcgacgagctcgccgccgagaccgcggcggccatgactgcgtcccaccccgactacgcctcgttggcggcgaggattgctgtgtctaacctgcacaagaacacaaagaagtccttctcggagacgattaaggacatgtacaggcactttaacgagaggtctgggctgatggcccctctggtcgctgaagatgtttatgaaatcatcatgaataatgctgctcgcttggacagtgaaataatttatgatagggatttcgactatgactactttggcttcaaaactctggagaggtcttacctcttgaagcttggtgggaaggtcgttgaaaggcctcagcacatgctgatgagggtttcagtgggaatacacaaggaagacattgagtctgccattaggacgtaccatctgatgtcccagcgctggtttacacatgcatcaccaacacttttcaacgctggcacaccgaggccccaattaagcagctgttttcttatatgcatgaaagatgacagcattgagggaatctatgaaaccctgaaggagtgtgctgtaataagcaaatcagctggaggaattggtgtctcagttcataatattcgtgctactgggagttacatacgaggaacaaatggaacatcaaatggaattgtgcctatgttacgagtctttaatgatactgctcgttatgttgatcagggtggtgggaaaagaaagggtgcatttgctgtatacttggagccttggcatgctgatattttcgagttccttgatctaagaaagaaccatgggaaggaggaaaatcgtgcaagggatcttttctatgcgctatgggttcctgatctattcatgcaaagagtccagagtaatggagaatggtcattgttttgccctaatgaagctccagggttggctgattgctggggtgaggagtttgataatttgtacaagaaatatgagagccaaggcaaggcaaagaaagttgttcctgcacagaccctctggtttgacattttgaaggcacaaatagagactggtacaccttatatgctttacaaggatacttgcaataggaaaagtaaccagcagaatctgggcacaattaaatcgtcaaacttgtgcactgagataattgagtttacaagccctactgaaactgctgtctgcaacctagcatctattgctttacctcgttttgttcgggaaaagggtgttccattagagtcccatccatctaagcttgtgggtagcagtgattcgaaaaatagatattttgattttgagaagctggctgaggttacctcaactgttacttacaatcttaacaaaattatcgatattaattactatcctgttgagacagcaaagagatcaaatatgcgtcacaggccaattggcataggtgttcaaggcctggccgatactttcatattattgggcatgccatttgattcactagaggctcatcagttgaataaggatatatttgaaactatctactatcatgctctgaaatcttctgctgaacttgctgttaaagaaggtccctatgaaacatatgaagggagccctgttagcaagggcattcttcaacctgacatgtggaatgtagtgccatctaccaggtggaattggccatctctaagggagaccatttctaaagctgggataagaaattctcttcttgttgctccaatgcccactgcttccactagtcagattcttggcaacaatgagtgctttgaaccctacacatctaatatttacagtcgacgggttctaagataatatatgatgatggttctgtccaaaagatagcagaaatcccagatgatctgaaagcaatctacaagactgtttgggagatcaagcagaaaactttagttgatatggcggttgaccgtggatgctatattgaccagagccagagcctcaacgtccacatggagcaagcaaactttgggaagctaacatcacttcacttccatgcttggtccaagggcctgaaaactggaatgtactatctacgcacacgagctgctgctgatgcaatcaagtttaccgtcgataccacacttctaaaggagaatgggaatgggatgaatgatggaaagcccacagaggaagacgtagaagctaaaatggcacaaatggtctgttcttttaacaaccgggaagagtgcctggcgtgtggaagctagattggagctccatctggacactgcaattatttgtgacctcaggccacagcattatatgccgccggctgatgactggagcccaataatcagaacgaaatctgatgtaggatgagacgagcaagccatagaggatccagggcttcagctggttgagact

SEQ ID NO: 30773 - DNA, 480 bp, Zea Mays
ccggccagtcactccgagctattgtgtgggggtcttctccgcgccgtgctcgcgcgcgacgttgcaaccgccaccgagaatcctggctccagctccgtaacaatcccacctccgctcccatatgaatcagaggatccgctcggccacgcccatcgcaccaaaccactgaacatccttgccttcgagagaaaccaagagtgcgggaggtggcgcatccacagaatcgggtgctcgctggcgtagcgctccagcgaagagaacttagggagtattggtctgggccgcgcgttcgtaacatagagcctagcatcgatggtggctagagcgtggggaatcgctcgccggacttgctctcgccttcatggaatctagccaccacggccaggcccgctcgctgcataatcccggtaataagcttacccccgtactcaatataccttccgcattgtgtagctaggacgaattagagaatgacaatcg

SEQ ID NO: 30774 - DNA, 795 bp, Zea Mays
ctgaaatgatagagaagattgaccacaaaaacatcattgaagtatatatatagattgtatattacgagccctgggattccaataactagagaaagcccaggtcagacggtgccattcggtcgagccagaccaggtccgggcgtctataaaagatgacccggagcgctagggttcagtttttcacgcgccaccccgattcatgagcgacagcgcccacctagtcgtgtgcgccggcggcggttgcccgagagcgcgcatgatggcggacccccggccggtggctgcggtggtcgtggttccccgacacagacgcgcagtggcggtgactccccgatcgaaagggcgagcgacggcgaggcccctgtgtgggcatgcagcgccgacccaggggccctgaggcagacgagaggcggcggcactcccaaagctggcgagcaagcgtcgccccccgatgtgcgagtagcgaaggcgccgcacgaggcgcgaggttcgagcggtgtcacgaaaggcgggaggtgcgaacaacaatggttgcgcatgacatcctctgatccgacgcaattcgtacggcccgagtgacgacatccatccgtttttgtgtccccgacgacgtcctccgtcgactacttcctccgattcgtattatgtctttcgattattgtgttttatgcctaccacatgcactatttatactaaaatatgtatgattttatgcttgaaaacagagttcatatatcattttattgcatgcatattttctgcatgtatattagaaagacaatttcttgatttatg

SEQ ID NO: 30775 - DNA, 1034 bp, Zea Mays
tcctttcccacttccccttttttgcccgcccgctacccaaccgccgccgcggttctcgctgccagcgacggacgggccacaccgcgcaggggctcagccccgccacccaccttaaccccgccgtcgggaggcgtcgtccccggcccggcccggcccggccctcgccctctactgcaactggactggcgcgtagacctgtccccgccacgagatcgttccgccctatgtcggtgaagatgctctttgcatagctcaagctgcaatctgatggaccctgatgacaagaagtttggaaatggaccaagggagctcactggtgctgttgatttgatcagccactacaaactgctgccacaccatgatttcttttgcaagaaacctttgccgctggcaatatcagatacacattatcttcacaatgttgtgggagacactgaaattcgcaaaggagaaggaatggagttagatcaacttgttcataatgcatatctgagggataaacctgcttatattcagccctttgatatggaaactctggggcaagcgttccaacttcgagaaacagctcttgtggatttgccttctactgaaaaaggtataccgactatttcgggtaaaccaaaaagtgagtccaaggacaaagagaagaagcataaaaggcacaaagacaaagacaaggaacacaagaagcacaaacatcggcataaggatcggagtaaggacaaagataaagacaaagacaaggataagaaaaaagataaaagtggccatcatgaaaagaagaggaagcatgagggaacagaagattcagtagatgtgcataagcacaagaagagtaagcacaagagctccaaaaccgatgagatggggaatggagttagttaacacttcctagctctacctccaatccttgtaatttgctgttaaaacttaaaaggagacagacggtctctgctatcaaaaccctgtgcagaatagtggttgtctttcacctggatcatgtgggagacaactgacattataaagtgttggcg

SEQ ID NO: 30776 - DNA, 1277 bp, Zea Mays
agtagtagcgggcgacgcggccgcgaggcaggcaggtagaccacgccgcacgccagccagcggccagcgcccgccccgccgcgcttcggcattttcccattttctctctctgccgccgctccctcccgcggcggactcgataccccgcctctcctctcgcgaactagggggcagcgggcaggtgccggcaggcggctcgatcccttcctcctccctcgtcgcggggactgctgctgctgctgccgtgaccgcgagcatggccaccggcgccgttacgccgccgccgctggctggcgcgcggcgattcccccgtggacgaagcttcctccaccggcgcctcgctacctcgcctatgaaagatgaatctgtgatttccacagatggtggaaatgaggagacagacactgacagcctccatgttgctagaggattgtctcatcctgggctttcgtcaagtttatccaataaggcatcagtggtcccaacccctttgcttccttctggacaatctgatctccggttcaatcgtcttcgaccctcaattgatgaaagtgattgcaaatacaaaagattatttggctgctatgttgctcgtgaggctgtgatcgatgaggaatactggatcgctgcatggttgagagcagaagatcagtatgaaaatgagtcaggcaatcgctatgttgaaagctttaaaagaaagtttgcatcaaaggaattccatgcattaaagaagagatgcaacacacaacatagagagaagtatatctgtcttgtcgcggtaaagaacgatgacatcaggcgaactgtcctgaatagtgttgttggtaccttagatgtatgtgtaaggcatcctctatatggggagaaatttcctgaggtagggtgtaattgcaccttctctatgtgtcttttttgctgttgtatttagaagttatatctagaagttattcacaggagcctggaaaaccgtctcttcactgtcgaatttatcagcctgatcagccaaaatttgggtatgtaacaaatgtatgtgttgctaaatatgcaaggcgtcaagggattgctagcaacatgctgttattggccatagatgctgcaaaacttaacggtacaaaaaaaatagagctattctagaatagcatgtcccaaatgacaatgcacgatccactgatatctgcaacccatgacaggtgctgaaaatatttacattcatgtgcataaagataacttaccagcatggaggctctatgatcagattggattcaaggatgacgaag

SEQ ID NO: 30777 - DNA, 3229 bp, Zea Mays
aaagcatcttgtaaaacaattgctgtgattgaggaattcattcatcatgtctatattccaataatattctctagtggggttgattacattgatgccccgacaccctacatgatggggcttcattctggtgttgacacatctgcagtgacaatggatggtgtagtggtggtagatctcgaatacaaccgtataacaataacggaagaaattcctccaataccagaaactgaacataactttcttcgtgttgagattttaaaattactacaacccaatgtcatgggaattgatttcatgaaaatcaatcttgccaatatgggtgacctaagggctggcacaaaatcatggagtcaggaacatgatttccaacttaggctgatatttttgagattctttgcacagatcctgagtggttatcgtaacttcattgatactacttcagcgactggtttcaattctcaagcttttcttaaaaagcgttctcgagcaactaaccagcctgtcgactccatgtcaatgattatgcagtttttggagactcaagggttcttggattatctggagagatgcaacactgcagaagaaaatgcccacaaccttctcgataagttgcaggatgcaaccggaagaggacaaaaccctctaaccatatttccttctcaagtttctgatcctgagattataacaatagccaatcctgagattgaaggttcaagactagacaatagacactgctataagaggtttccagcaaatgcaagaacagaagaacaagaagaaaaacgtaagtcgattctagcgttagctagtggggctagtaagcaagtaccgagttctccttctatccgagtaaatgggggcccaaaggcagaaagtctgagcccaagagagagggcggctgagagagaaaggatggttctggacataaaagtgaagctccagggactctggcttcgtcttctgagactaggggcaactgaggatcctctctcatcttttgaatatggcaccatcctagctttgattgagtctgacgcagaaggcatcgggggaagtggctttgttgaatgcatcagagagcatattcattcgggctggcaatgtcgcttgactgatgaacaattcattgctgtaaaagaattgcttaagatggctataactcttgcgaactctcgcaacgacctggcgaccattagagatgctcttgaagtttctgctgaaatgtacagaaaagacccaaacaatgttcaagattatgttcagcgccatctattatcattgtcagtatgggaggagcttcgcttctgggatggctacttcgaatatttgatggaaaattgttcaaataagtcagcaaattatgtaacgttagttactgcacagctcattctcatggcaactcacatggctggattgggattacctgacattgactcttggaatatgattgagaaaatagccgagagaaacaacttgggttataaacagcttatcaaacttagagcattgctcacacatctgcaacaactccggattggctattggggggttgctacagggaaaagccaaccattgcagtcatatggcatggcttcacctcatgcgatcgatgtgattgatgaaagccaacaacctgctgaagcatctgggttgggccgaagttgggtgcaaagtatgtttagcagagacagaagtttaagagccagctctttcaaccgagctagtgatggaaatgctgttgctgccacgggcaaaaccgaaatctcagctgcacaaaagaaaactcaaactaacatgaggacccttagagggcatacaggtgctattactgctcttcattgcgtaacaagaaaggaggtctgggatcttgttggtgatcgtgaagatgctggttttttcatcagcggaagcacagattgcacggtaaaaatttgggatccaagtttgcgtggttctgaacttcgagcaacacttaaagggcatactagggcaattcgaacaatcagttcagatcgtggcaaaatagtttctggagctgatgatcagtctgtcatagtatgggataagcagacttttaagcttttggaagaactgaagggccacgaggcaccggttagttctgtccggatgctctcaggagaacgtgtccttattgcatcccatgatggtactgtgaagatgtgggatgtccggactgatacttgtgttgttaccgtgggtcgttgccaaagtgctgttctctgtatggaatatgatgattccactgggattctggcggctgctggaagagatatcacggcacatgtctgggatattcgctccagcaagcagatgttcaagcttcaagggcatacaaagtggataagatcaatgaggatgaccggagagaccataataacaggtagtgatgattggactgctagagtgtggtcccttaaccggggaacatgtgatgcagtgttagcatgccatgctggtcccgtactatgtgtggaatactcaccttcagataaaggaattatcactggttcagctgatgggctcatacgattttgggaaaatgaaggaggaataaaatgcgtcaagaatcttacacttcacacagcatccgttctgtccattagtgccagtgatcactggctagcgattggtgctgctgataattctatgtctctttttcatcggccacaagaaagattcggtggcttctcaaatgcaggatcaaaagttgcaggatggcagctttacagaactccccaaaaaactgctgcagtggtgagatgtatagcatctgacctggataggaaaagaatatgtagtggtggtcgcaacggactcctgcggctttgggatgcaactacaagcatctaggactgatagatgttcatgtgaaaaggcaattgacatgatgttgcatgccattttccttttagctaggaatttatgtgctatttagaggatgcgaaaggagccggactttgttctactgtttctttatcatctaaaaaaccctgcccagttgagtatatgtttgacgtcgtgtaaaattttgtttatattttcgggttcagatagccttacgtggctacgattttgtaagaactatgagaaacttgggaagttctgtactactaccagtgcaaatgtttgttttagtacaacattattttttatgtgcatattcatcgtatgaacctgcactagtgcaaacatgactgctagcatatgc

SEQ ID NO: 30778 - DNA, 980 bp, Zea Mays
aatttgtctgcctatttcttattaacaatgccagctagttcctcctaggtaacttggggtacaatttctatggttgatgctgagaggaggttgctggcaaatgctctacaagacatggacaatcagcattttattttgctatctgatagttgtgtacctttgcacaattttgactatgtatatgactacctgatgggtgcaaatctcagttttattgactgcttttatgatcctggaccgcatggaaattttagatattcaaagaatatgttacctgaggtcacagaggctgattttaggaagggttcacagttaagcgccaacatgcgttgatgatcattgcagatagtctttactataccaagttcaagcttcattgcagacctgggatggaagatggtcgcaactgctatgctgatgaacattatttgccaacagtattccatatgatggacccagatggaattgctaattggtctgtaacccatgttgactggtctgaagggaagtggcacccgaaagcttacagggcaaaggatgtcactttcgagcttctgaagaatataacatcaattgacataagtcaccatgtcactagtgatagcaagaaagtggttacagagaaggcctgcctatggaatgaaacaaagagaccatgctacctgtttgcgagaaagttctaccctgagtccataaacaatctcttgaccttgttcgcgaattatacacttatttgagcttctaggtggcgcttagaggctacacaggaaacattttgttatacaaaaccttgtacattggatagcaacagagtaggacattaattaacagaatagcaatagctattggtgaggagaaggctttcgctgcagcaacacagtggcttcagatttatcacgacaggccattgcgttgggtggatgacgaaggctgattctcgacggcggtaacgagcacgagatgagagggaactcggccgg

SEQ ID NO: 30779 - DNA, 3477 bp, Zea Mays
attgcaggtttggcgtggaggcgaggggcaaagggagagattactgtatttgcctgttgattctaaaaactaagaagaagaagaaaatgattcaaaaattcaatttgaagaaccacaatatcagtggagcgcactcaaaactgttggatttattttggaacttaggtgaaggaggaatgggtggagggacgagcaagatggcaacgttctattgaaacaaactgcctcgattattaggctatcattactaaacaaactacctttatcgtcaacctactaacttccatattcttcacattcagctttgcaaaatttacttgactggattttttagcttaacatataactcagggagacatgcgattttgggacgatcaaactgttggtaagtaaatacttgttggcctgttgctcttcttttagctatagctgaccataatttttcttggttgaggaaactgtagttagtgatagctcaatattttgtgtgtagaaacctgtataaagtattggacatgtatttcatagtttttgtaacttataaggctatgtaagtcacagattaactcttcaaagaattatacaacaaagaaattagcgctcagaaatgggatctttgcatttttagtcttgctcattttttattattcatgtatgactcatggttttctagagaaaaatattggaccgttacaataatgctaatatggtgttaatctaggattgctcattttgagtattcttgtacgactcatggttttctagagaaaagatcttggactgtagcactacctccacttgtgagatctggacttctgtagttatatgccatagcaacactgaaagtgacaatgtttgaatggtatagttcttttccttggtcggtgatatatattcacttgatggtatagctctgccaaaagcacaacagctcgtgcttgatccacaaaaaataggatgctcatgtgattgtattttgattttttagttttatttttgttgcatgtataatccaatcgccgagatcgacctctaccgtctcgagccataggacctcccctccctcttcaacatccgcagtcacaacgccaaggggtagttcttcgcccgtgcggtcgaggcggtcccagcaacaggaccaaccacgcacacgccgatggggtactggagatccggacggagtagcattcttgctggtaaaccctagacgttgtttctcctattctccaaattgtgttttcgctacaaaaaaagtgagttttcaggcccagggtcagcccacttcttgcgcaagtttgttgttgggaaccaatggaatccgactattcatttttcttgcggatggtcgtgtcggtggggtcaagaaaattctctggaatttggcactgataagatagaaatgcatgttggggctgtacaggccaacgatcgagctcttgtagtcgatgatcttattgccacccgtgtgcagctgtcaaacttatcggagatggacgatgaagcgttggatcaaggagatggaggttggatcaaggagatggaggaggtggccgccacggccaccacttccaggtcgattatgccctttagggccatccagaagggcaagccgttgtcggtgtccttggcatcgagaagaagtccacccctaagctctagaactccaggtgctcgccgtggccacaagcgtgtagtcccccgacgcagagaagaggaagggcatgtggcgtagttagagggatctgaaccctagcggtcgtccgcccgtccagatctgtgacccgcccttctcgacgcttcggtgacatgagtgcctggaaatctagggaggcgaaaaggtcagagttcagtcatgtcatgcttgatttgagttctgtgccagatcaaagcaagtagtagtacgtgagaagttaaccatgaacagacaccctttttctctttgtgtatcacagattttgaaacttgctgagagggaaaaacaaatttatggggaaaaaatgtgacactgaaagccatttgcttccagcagcttaagaattgttgcggtagatgcaactgaagagggtcttcaagtaagtaaatcaactactacaatggctcactaaaaatggtcgacaggacagtttcggaaccttattgttgttcttcagagagaacatcgacaaaggaacttgaagctccgtaggcgaaaggatctctagaaacgactaactaaattctcctaggtactactctagggaggatgctgaagatgctgtcaaatacattagtggaacaatgcttgacgatcgtccaatccgtgttgatttcgatcggggctttgaagaaggcagacagtggggccgtggacgaagtggtgtacaagctttacaaaccatgatatatgcagacaagactgaattagttcctacttctccccatcaattagaaatggggactatagaagatgtccgaacagagcctgatgtctcacaggaacaaacaactaaagaaaatggaagccagacaacctttagctatgaacgattgatatcaaagtccactgaccctgttagtgggatagacaacaagcacagagaggcaaaattattcacaataaagagtaaataggtaagctttggaaacttattatagactttgcttcaaggtcttatttcggaggtaacctctggttactaatatcccagacttacaatttgaaaaataccagccagtcaggattgctgcaattactgttagtcatgaagaagatgaggtgtaaaaggttattttggagaagaaacaaactggcatggaaaaaggagccaagatttgatcagaatcacaaccaaatccttctcttatttgcattatgctaatttgattcaccataatgcttaccattcatactattatgcttgtttttttctctttcgtaatcatcgaaatggtccacttttcaaagttcaagcccaacttaattttttaaagcaaaaatgtagcagtacttaaggttttatctataatttatcaatggataagtgagttctattgctccagtttagagagagtctaaacaattttgagtattttgaaattctagatgagctataaatttcctacaggattattgggttagaagttcacgtgtaggcatcacatctgtgtgcttttgggttacccacttaggtggattgtctgagtcactcatgaaatattattgtgtaccatcacaacacatgatttctaagtgtgcaagcaagctaacgacgacttcgactagcttagcgccatggtcactgtgctgctcaacctcgtcaacctacccctccggtgaggtgtggggctgccagacgcctcctgtgaggctgacatagctggatacttagtagtggatcaataatgtactttgcaactgattaccttggttttgttgcatcgcgtacacctaactatcaattattatgctagcacaaaaattgaggaatgcagcaaata

SEQ ID NO: 30780 - DNA, 1639 bp, Zea Mays
gggttagcgtatcgaaatcaatcgtgttcctcgcctgcacgacgagagcccgagaccaatccagccgccgcctccgccttcgcctcgcctagtattccctccgattcagaggccgatggagtgcatcgccgagatgccccgcgcgccgctggacagcaggctgcgcaagcgtcagcgtctcggctgggacgtcggccctgccgagatgtataaggccgtgcggccgcggcacgggtgggacgtcggccccgccgagatgtatcagttagaactttgtggacaagaagttgtgaatgccatcagtgctgcagccttgggcctttcgtcgggctgtgtttcttctcaagtcaaacaagagcagcctcatgatggttcccctcctctgagagaagatgacagggatgggcattatgtttttgctgttggagataacctcacatctcgctataagatcaatgcaaaaatgggagaaggtacctttggtcaggtgttggagtgttgggacaaggaaaggaaagaaatggtggctatcaaaatcattaggggcattaaaaagtacagggatgctgcaatgatcgaaattggcatgctcgagcagcttggtaaatatgatgaaagtagatctagttgtgttcaaattcggaactggtttgactatcgtaaccatatctgtattgtctttgagaggcttggaccaagcttatatgattttctgcgggaaaacagttaccgctcattcccaattgccctagttcgggagattgccaaacaactgttggaatgtatagcatgtttcatcccgatccccaaaggagggatcctattacaagcgggtgcccaagtctagtgctatcaaggtgattgattttggtagcactacctatgatcaacaggatcagagttatgttgtgtcgacgaggcattatcgggctccagaagttatactgggacttggatggagttacccatgtgatatctggagtgttggttgtattcttgttgagctttgcacgggtgaggcgatattccagactcacgaaaacttggaacatctggctatgatggagagggttcttggacctttgccataccatatgttcaagagggcagatcggcactctgacaaatacatcagaaaaggacgcctgaattggcctgagggttgcacttcgcgtgaaagcatgaaagctgtgatgaaattgtccaggcttcagaacctggtgatgcaaaatgtggatcaagctgcaggagatttcattgaccttttgcaagggctgctgaagtatgatccatcaagccgtttaacagcacgagaggccctgaggcatcccttctttacccaagggttttggcgaagatgatgatactccttgcattctaccttgtttgtctgacttgatgtcttgcatttgacagtctgtacttttcagtggtgtatgtaggcggtagatcaatctgtataaagccgttgtagagttgtttcagtcttgtttggaacgtcgtgcagattaagttgtagcataatggaagtcaaatggatgcatttgactttaaatcctgacttgtttgaatttggaatgtcaatggaaatctggtttgaggagaaagtgaacatcatatattaaggccctgtttgatt

SEQ ID NO: 30781 - DNA, 731 bp, Zea Mays
aatctagagcattcacttgtcctacactagcttccttgtaaccaaatcacaatcatgtttcacttattaaactacgatgagtggtcagtgagtcgagtctccataaccgaggagcaacgacgattcgaaccgattatacctagctggggatccctaaccacacgacatatgtagcacttaacccttgcatatgtcaactgttcccatagatcctccacaacgtgaatcggtccgcgctacccgggagcacagtactcctccatccagcttctagccaggagggtacatgctactcccaccatctcccatgcccagtgtgcggttgtcttttcacgtatggaatagccaggttcaggcttaccggagcatgtggttagttgcaaagtctcacctcatcaggcctacatcgaacggtccttaatcgacacagacgggcgaccatgtctgctcaacgtctggtctagatgtattcgaaccattttcccatttttggtacccggcaggggtactcttttccaaatgatgaacccactccggccgaagtggaatcatcaccataagtttgctttgatttttgaaacgaaaagcccataaccaatgttccacaatcattctttttgaaaacaaatgatttttcaatttctaagcagggctaagcattatcaattctttttataaaaccgggattaaggagttgccaaggaatggtaatgcatcaattgtttatcaca

SEQ ID NO: 30782 - DNA, 3343 bp, Zea Mays
ttgcacagctgctgcgaattcagtagcactactattttggacaactgatgcattagcttctcgccagctcgcttaagatgtcgccgtgtttgaacctcagttggacctggtcaggacaaatgtgactggttgggctatatacggattgacgtacctgttgcgagttgctgctgctggactgtgattgttttgtcacgtattgaggctcatggagtcacggatggatcagtacgaaatcatggagcagattggccgtggggctttcggtgccgccatactagtcaatcacaaatctgaaaagaagaagtatgtgctgaagaaaatccgtcttgcgaggcagactgagcgctgtcggaagtctgcccatcaagagatggctctaattgctcggctgcagcacccttacattgttgaattcaaggaggcttgggttgagaagggttgttatgtctgcattgtcacgggctattgtgaaggtggagacatggatgagctgatgaagaaatcaaatggtacctactttcctgaggaggtattgcttaaatggttcgctcaattggtgttggctgtagattacttgcactcgaactatgtcttgcaccgtgatctgaaatgctccaacatatttctcaccaaagaccaggacatacgccttggagactttggcctggcgaagactttgaaggaagatgatctaacttcatcggtggtcgggacaccaaattacatgtgcccagagctgctagctgatattccctatggtttcaagatgttgtatgtatgagatggcagctcaccgccctgccttcaaggcatttgatatggctggattaataagcaagataaatcggtcttccatgggtcctttgcctgcctgttactcagtgtctatgaaaaccctaatcaaaagtatgttgaggaagagtccagagcatcgacctactgcatctgagatcctgaagaacccgtacctacaaccttatgttaatcaataccggcccctttatgattcttcaaacccaatgcggatgccagagaaacaattacatacttcacggagcagtcagagaagcatgtctgacagccaaagcagtagcatttccagtagtgacattgacagtgcccagtcaagtgacagaagcacatcaggtggaactacaagtactgacagaaagactattgatactgcaagcattcgagatgtggatcaaggtaagtcagatgaaaatggtgcaacacctgaagatgttagaggcaacaaagacaatggtagtgttcagtttaaaaggcaagattcattgaaatgcatacatgttgatcaccatcccagaccagagagcaaacaaccaaagatcattgagaagataatgacaacccttagagaggagagcaggctgagagaaatcaactgtcctgtcagaggtggtgtaaagccgaattctggccacagcaacaataatcaagtagagcaaccattacaggtttcaaggacaaacagtgatatgccatgcagcttaaaatctggcaacattctatcccatgatgaacatgtaaatgaagttgaagcatcaccacccttgaagaaactgtcacctattgttgaacatagcccaaagatgaaaaccgctgggccatcaactcctgaacctgccaaacaaatcacagaaaatggggctgcagcttcaggaagaactaagaacaagtcaccacttcctgctagacgacctagccctcagaggcaagctggagcagggacttcaagtttcccagtcacaatgacaagacgtactcataccaagttcataacagagagagagaaaactctagagggaccatcctgtagcccggataatactcttagagatcatccacaaagtttaatgatttcttcaaatccttcagaaggacagcatatgaaactggattcttcacaagcaaatccaacaaatctttgggagcttttcaccgtttcagcgaaggaacacagcagtgcttgctcaagttctacagttggttgtactgaacctatggaccagcctgaactatctgaacctaattcacctgtctgccttgtttcaccatgtacaggctgttcaccaaacacaaccgaagaggacgacaaaagcaccataccatgttcagaaattaacactgacaagaacattgcaactaaaaatggtggttcaagcctgaggtcagatttggagccatcctttctgagttctgaacaagagtttatttccaaagaagtgcagtctagcaagcatgagaagagcaacatcacattccaaagcggtgaagataagttcactgtccaggagctgctttcatcggcaccagaagttgctcctcctgtttcatcagcaccagaagctgctcattctattccagccacaaaaggaacactattggattcacccacttctcttcagtcatggaagaaacatgtagtttctcatttaaaccctccagttgatgatgctctacagactataagacacagcactttctgtctcagtgatgagcagccaacacaaggaagtgttcaaagagaagctcagagcgctgatatgatcaaactactggatgttgtaccagaagaggctgatgcaaggagcagctcgttaaacaccctgcttccagcacgatccccatcagttactgctacatcacaagtctcagaagccaatgttgctaccaaggcactagctgcctcggacaatacaaaatcatctgctgcctcatcggggaccagcaacggagtgcaggaagaggcatcccctactaaggaagtactcgatgttacatcgtttcggcagcgtgctgaggctctcgaagggcttctggagctttcggcagagctgctggagactcaaaggctggaggagctagccattgttctcaagccgtttgggaagaacaaggtgtccccacgagaaaccgctatctggctggccagaagtttcaaagggatgatgactgacgaagcaggtcgcacgtcactatgagcacgaatttttgtctgcctgtttgtttggtttcacttgagcagagttgtgctcggagtaaatcggtgccgctaggtttggtaatagcagtgctctgagttactcaaaattgattgaattgacagcagcttgtggagttgtattcttttttatttttatttttgagaagacagtttgtggtctccgttgccacttttttttcccatttccgattgctccattcttttggcgtatgttgtacatagccaagaacttagaactgtaaacagcaataaagcttgcctccggggtgtgattcaaaaaacaaaacactgttaagctaaatgaaccttgaa

SEQ ID NO: 30783 - DNA, 374 bp, Zea Mays
tttgaatataaattattaacaataataaacaaactaacatgttgttctctaacagctagtaagcagtatgcagaacacatctataacttcaaataaactgaagtataagattagatcagatgatgcgtactaatcagacatactgattgacaacgtagaagtggaagggttgacgacgtaggcggcagccgaggagaagaacgtgaggaatcatgtgaagacgcctctcaaaaaccttattcaccaactctcgatgcaggatctcaaaagcaacgggttccggagacctgctctcccgatcacatatgcatgtcagcactcgggatgaagaagactacaacggcgacacaaatgtaagtagagccaaaacctaa

SEQ ID NO: 30784 - DNA, 648 bp, Zea Mays
cttctgtcaagccgaagaacattgacagacaacatcatcgttggtgtgtcgaaaggattcgataagaagcttcagctagtgggcgtcgggtatcgtgcggcggtggagggcaacgatctcgtgatgaacctgggattctcccaccctgttcggatggccattcctgaaggcctggcggtcaaggtggaggagaacacaaggatcaccgtgagcggctatgacaagagcgcgatcggtcagtttgctgctaccataaagaagtggaggccacctgagccatacaagggaaagggtatcagatatatggatgaagttgtccgaaggaaggaaggaaaagccggaaagaagaaatagaaagtgtttttttgccctctccttacttcatttcatttttcccactgtaatgatcttcgtttgctaaggctgaacctaagaaatatattgttctgtgctgatcatggcatatagatgtatactttgagcaccccattgtttcataatttcattgtttttcaaggtatttattctgctccattgaaaaagcgaaatgaatatcagaagcactggcaccctgatgaatgtgcaagtgacaagtgcaggcaaagcaggatatggtcttattgtagcacgatacttgtaaaatgtcat

SEQ ID NO: 30785 - DNA, 1229 bp, Zea Mays
acctttttctcaaccccgtctctctcgcgtctgtctattccttggagccgtccgccgccagccgcccccgccgcccacgccaccggccacccccgccgcccccgtccgccgcggacgccccagccccttccgtcgcggccgcgaccgcccctgcctcggcccgcctaccagaggtcctcctccttcggggacgatgtcgtcgtcgtcgcataagcgcattccagaaagcacatgattgtcttctgcccatgggaattacttctaaaaatattgcccatcgatatggtgtaaccaggcaagagcaagatcagaccgcctcaagtgagtgatggtgctggagctgttcttctcatgaaaagatctgtggctcttaagaaagggctgcccattcttggtgttttcaggagctttgccgctgttggagtggatccagctgatatgggcgttggtcctgctgtggccattcctgctgctgtgaagtttgcaggccttgaaattggagacattgatttgtttgaactgaatgagccctttgcctctcagtttgtctattgctgcaacaagttgggactggaccgttctaaagtaaatgtaaatggaggcgcgattgcccttggacaccctctggatgcaacaggtgcccgatgcatggctactcttctaaatgaaatgaagcgccagggcatagactgcagatttggtgttgtcaccatgtgtatcgattagtcttacttatcagttatcacatactaacgtgtataggcaaagcatgtcaacgcatagatgtaatttgatcttctgtagttgaccatgatgcgtcgtaacaattgcaggatctggaatgggggcagcagctgtgttcgagctgtgttcagcccgactggaggtatcgaccatcacttatcaccgtaacccgatggtgatcggcgaccgtgagcttccatgttattgtgttctgatacttgagacttttattatgactatgtatgagatattgtctcttattagtactggatgatgagatgtgtcttattatgactatggatgagacttttgtgatgtaattgatgagacaatggatgggacttttgtgatgtaattgatgagactatggatttaaatattgttatgtgattgtgtgtgatatgttttatgtgaaaatatgttgtgctatatagctgttgatatatttgttatgttgtggaatgtggtgtaaaataaaaataaac

SEQ ID NO: 30786 - DNA, 1741 bp, Zea Mays
gtcatgtggagccgacagatgatggcctcggcaccggcggcgccggcgacatcgaccgatctcctcgtcgtcggccagtaacacgcattctctctccctgcccagctgctgcttgctggtgcctggtagtaaccggacacagacccaaactagaataggtgtctgttcttgtctgcggttctctgttcgagtccaaggctccaagcaagcaaagaaccgaaccaccgggagcaagaaattttcccagagtaagcaagtcccaggactcaaccaagaagagccctttgcatgcagatggagggaagggagggtattgcagttggccgcgaatccggccacggcagcatgttcagagcagcagacatcgccatggcggaggcgcaagaagcagcagcgaaaggctaccagtcctctccatcctcgccgtcgacgtcccccacgccgtcgccgccagcggctgcggctggccacgccggggacgccgccgcgactccgcttgcctggagcttgggcggcgagacgccgagtggggccgtggtggtggacaacggcacgcaaacggccgggcagagcgagcacgccagcctgagctccgggcgccgccggggccggccgcgcggttccgggaggcgccagatcctagccactctaggggaatggtacgcgctgtcagccggcgggagcttcacgcctcatgtcatcatcgtgggtactggggaggatgtggcggcgcgcatcatgtcgttttctcagaagggtccacgctcggtctgcatcctctctgccaacgggtcaatctctaatgtaacactgaggcagccggatgcatctgggagcaccttcacctacgagggccgtttcgagatcctgcagctgatgggctccttcacaatggccgaggaaggccggaggagaaccggcgggctgagcgtctctcttgctggccctgacggccgcgtagtcggcggcgtagtggctgggatgctgcgtgctgcaagtcctatacaggtgatcgtcggaagcttcctgcccaacagcctgaagcagcaccagaggaggaggatgagcatgcagcagccttcccccgttccggcgttaccagcacccgtggcacccccgccgccggtgcttaccgcggccaccccgatctcgcaggcaggtcccgggaacgggttccacgcaccgccgccgccgcactccgcagcacctccccagccccacgccaacgccatgaacctgaacgcgacgacgacgggcttcaccatggtcggctggcctgcaagctcgccgcagcccatggcgtacagggcttcacctgacatcaacgtcagcttgactccccaggagtaggatcgctgggctcgtcttcttcctttttctttcttttttttttctttccctgggctgacacgttttgggtgggagagaggaaacagagcgtggctgatgctctgaatgagattatggactaatctggtgttaattttagggtagggcgtgccaacttgtttgggttgctgctttcggccgtcatggctgtggatgttgatttagttctagttctagtcagtcagtcctattcagtttctgtctttctgcgctgcagctatttagcatgtcctgttattggtgaatcttttctgatgatagagggaggaatcatcttctgatgacagaggaatcagttctgttatttgtgaaaccgaagaagacgtgcgtcgtgaaaatgttgatttctgct

SEQ ID NO: 30787 - DNA, 903 bp, Zea Mays
ggagagtgccccaactggccaactgcttgacgaacaatcctctccgttctcgcagtggcgggtttcggcgacagcgccgcctccgatgctcggctcgagcgccgcgtacagtggagggagcggagctcgaagggcgaaggcgcaggggggctcgcgagtcgctatccagcccacgccgtcacgcactcacgcagctgcaccttgcatcccaggaagaccttgtttgcttcgtccaagatcttatcaccgtgcttgatcagtttgtttgagtaccatgtgaggaagaacttccccttgtcggtctggtatgttccgttatccgcgaagaactgggtcttctcaggagtgtcattgtacgtcccagcatcatcaggcaaatcccactcaggatgcccagcctcttctgctgctgctttgaagtctgcttgcagggagcttgagggtctatttatacagcggaggcaggggagatctggaatgcgactttgcagcgcttctccagcgatgcaaaaacctatctttccgtatagtcgcccaggaatgcgcatgtgcagggtgagctgatgattttggatatcgataccatcccgagctggcatatgtagcacagcaggttgttgccattgtgattcgcggggactgcgtcctgaagaactttggttttgacgccttgtatttgtacggcaatgattgggatgaacatggccggtgagaattttttattttacattttctgtcctcgtttgccacgtgagtgttgtctgattctgatgtaaaacagcaacgagtaaaaaaaaagtataagtggaacctgtaatgtgggattgtaacaaatatatatattgcatggcttattataacagcacacgggctgcggtaccatgtgtgtggcatgttttatac

SEQ ID NO: 30788 - DNA, 1789 bp, Zea Mays
cgttctgccgcgcgcagcccgcatcccgcccgcggccggacctcgccccgcatcccgccgccctcccgcgctccttccatcctccgccctcatcctgccgccctctccttccattttgagctttgacggcgcggatccccaacgctcgcttccatcctcgtggatccccacccacgaatcccgcgctcccttccatcctcgtggcttccttcaacagcgcggatcccccaccctcgaatcccattgccgcaatggaaggtcgtctgtaccacgccgtggatccgccacccagtaccgcgccgtggatggcagacctcccaaccctaccgtctgcggattccgatgaaggcgcgaacccgtgacatggttgtatctctgctcgccgctcgatactccggttccggtaaaacctagcagccgccacttcgtcggactcggacctcagtgacacgcgcagcgtggcgccggcgttgcgcatccggatccggccagcagccagccacgcagtgtcgcggtcgtcggtcgtcgacgcaacttctcaggcgccgatgcagcacccggcagctggctgctcgtcttgggtatgtggcctcgacccccaactaacctgattcaatgggtgctcgatctggcgctgcagtccaacggcaagcctggcggcatcttcgacaccgccgaggagcgctcccaggagggaggtcaagaatcctaagaagccgctgtcgcgcgtggcctcgcggggcgtgcttccggccgacggtgacggcagcggctcgaccaagggcagctacgttcatgatgcagtagagacaagatatctgaatgctagcattcgggagcttggtgatcattttcagacaaaacgtgatggtgaaaatggtgttgatgcatcaattgaaaagagaacacctaagctacttcagtttacttttcaagagttgaaatctgccacgcttaacttcaggccaggcaatattcttggggagggtgggttcggttatgtattcaatgggtggattgagccaaacagcactgctcctgcaaaacctggcacaggggttactgtggcagtaaaaagtttgaagccagatgcgcttcaaggtcatagagaatgggtgaagttgactttctgggacagttgcatcataaacaccttgttaagttgattggatattgtattgaggatgatcaaaggttacttgtatatgaattcatggcacggggaagtcttgaaaatcatcttttcagaagatgaagattgttctaggtgccgcgaaaggagtagccttcctccatggaggtcccaaacctgttatttacagggattttaagacatcgaatgttcttcttgatgtggagtacaacgcaaaactatccgatttcagtttagcaaaagctggtcctcagggtgataaaactcatgtatatactcgggttgttggcacctatggttatgctgcaccagagtatgtaatgacagatgcgttttttttgggaccaagccctatgggcaacaatggagatgaccagcgtcttggtttatcaagaggaagttaatccctctcaactgaaactcccatcaaatttggggcatagtgtgtcgattcaattgtaactattatatgtcattttgggttagcaaactgtatctactaatttctcagccttaagccttttgagctagaaacttgtgtaaggatttgttgcactaagtgacatgctgatatttgaactatttaggctgccaaatctgaattttttaactatcaagtatctcaacatttctctc

SEQ ID NO: 30789 - DNA, 3253 bp, Zea Mays
gccatgttggccggccggcggccaggtcttcggagttccggcgcgtggtgccgtgtcgtgccacaggcgccaattcccctccaagatccgtcttctccggccgctccacccaattcgtcgtcctccccgcctccggatctgaacatgagcgacgcgaccacggcccccgccaccggagccggggaccacgttgtcgatgccgccgcgcacaagccgccggctgccccgtcgccggacatggcaagcatcagacggggcgggagctccgtgaccgagacagtcacccaggcaacgcagcagcagcagtcgcggctggacgacgaccagctggcggagctgcgggagatattccggtccttcgaccgcaacgccgacggcagcctgacgcagctggagctgggctccttgctccggtccctgggcctgacgcccagcgccgaccagctcgacgcgctcatcacccgtgccgacaccaactccaacggcctcatcgagttctccgagtttgtggcgctcgtggcccccgacctcctccaagaccggtccccttactcggaggaccagctccgcaagctcttcgccatcttcgaccgcgacggcaacgggttcatcaccgcggccgagctggcgcactccatggccaagctcggccacgcgctcaccgtcaaggagctcacgggaatgatcaaggaggcagacaccgacggcgatggccgcatcaatttccaggagttctcgcgcgccatcaccgccgccgcatttgacaacatcttctcctgaccgaccgaccgaccgaggccgcaaacaggatgcgttgtgtcgatcatcgattcagttcttggtgattctcagttttcaatttgttcgtcttcttttggggagattaatttaggaagctatagatgaggtgaggtgttcttatgaataacagatcaaacaaaaaaggaatcaatttagggacaaattacatgcatggttgattgtgttcgtctatttccatgattgtttgcgagcccgttacatttgtgcatgccattttagtctttgtaaatatgttgggcggatcgcgaataatcgagtcaagactagaaatcatcacccttcctgtacaacaccaataaatgagacgtctctacagccgtctctatggggttttctgtaaaatttgtatccaccgggctctctgtggatagcccgtctctggtgcgttgctcgatggggaagagacggggacggctcaggctgtacatgttcgagtgtctcttccagatccgatgcggattgccagcttcattccctccaaatttctatcttcgcgcgggttttttcatttcgcgttgcgctttccttttgggcccattctgaactgaagcagtgccaggagagatcggccatgcagcagaagacgggcgccgctgcaggcatcggcttgcgacggtcgacctccactgccccgacaagccgccgctggatcccaccttcccccgctgtggcccctttgcccgcagccgccccgtccgcggttgccccatctggcccgtatgcaaccaccagcgccgcccaggcaggctccccgtcagcgtcaccagacgacgcgctgctctcccgcggcgcgcggatgggtttccgcgtcggcaccccgcccgacccgtcgtcttgtccaggcggtgcacggctctacaacgcaccaacagcggcaatgttcccctccaccaccggcccgtcgttctttgatttgcttcaaaggtgaagatgcttatgaagaagatgagatggagatggagttaggaccgtggcacgactaatctagaaacaaaaagatgggagagtgatgagtgcatggctcaaacactctgttgactcaattaggggaaacagcaaaaaatctgaacaatattggtcggatgtggcacaagagtacaacctgactactccaaagaacagacagaggactaaaaatcaggttaaggagaggtggcagtggcacaagataaataagtgggctagcatgttcaatgactgttatttgaagactaagaggaaggagacacagaaggataacaatgtagagggatgtggacttgatgatattgatcttcctcggtcaatgggacagaagaaggctaaacatgctgcatgtgaaagaaaaggaaaaacaaaagatagtgccatagacatcgatgagcttgatagatttgagaagatccagaatgatgttcgtgctaatcggcttaagctactagaaatgcaaggaaagttaaataacgacaagatggagctatcaaaaattgctctccaataagcaaaggaagggaaagatgcaaaactaattgaaaaggaaacaaagatgatggaaacttattccaccctcctcaatcaagacacttctggaatgaccgatgatatgaaagttgagcatgttgctgctctcaaatgttttaggcacaaattgccccagatttaccttaaaatgttgtaaccttactactagtcctgtccctagatttttattgtgaacctatggttacctgaacttatggttatctgaacctatggttatctaaatttgtgcctatctgattcctattgttgttctgatggtgtttatctcagatttatattatgtgaatgtgtgtttatctcagatttgtattgtgtacctatacttatcccacatttatattgtgtgaacctgattgctcttatgtgaaccggtttgcatctgtccaaggcctgtatattataaccaaaggagactctctgatcagtattgtttctgttcttccaggctacaatatttgagttgtgcgtcttttgcaatggtgttcctctctgttcactagtttctctgatcaccaaggatatcatggcttctctagtcaccaaggagcttcggcaccggaacacctttgatgcaggacaatgaaggggcgacgaagctagcttcgtcatagcaacacatggagacaatgcaaggagaaagagtcatcctgaatgctgaaagcaaaagataatgttgcccttgtattatttgtaaattctgtgtaatccttgtgggtgtacatgtaatttcgtacgaagctgtacgattccctataaatagatgaatagtgtcatgcataaagtatcttttgaagggctggacaatagctgtgtgtaatcctttctctagagcaccttcgtcttaactcactttgtgaagtcgaatgtacgattgtaaaattcattatatgaaagaggagaaatgtgatat

SEQ ID NO: 30790 - DNA, 2929 bp, Zea Mays
atcttcccccgccccgcctctccctttcttctttaccaagccccccacacccaaacccctcctcccctgctctgcctgccccatgtccccgcgcctctgaccaaccaggctgccggaaccctacccggtgccccgtgatgcccccgcggccgtcgctccactctctgctcctcatggccgcctccgccgccgcggccagcggggactcgggcccgctcctcgctgcgcgccgccgtctagctgcgacggccgccgcaggggggcaccgcatccggctgctccactccttctcgccgggacgcgtccccaggcggcctgaggtggtctgctgcgtgcgcagcgcccccgactcgcggcggtcggcccccgcccccccgtgctccaggaacgttctttcggcaaaaaactactcaactgcttctgaggagaggcttgggaagatcattcagaagttgaaaaacgaaggtattaatcccaagcagtggagacttggaaattttcagcgcatgttgtgtccacagtgcaatggtggatctagtgaggaattgagtctcagtgtctacatccgaaaggatggcataaatgcaacatggaactgttttaggtctaagtgtggctggagaggttttgtccaggctgatggagttaccaacatatcccaaggaaagagtggcatagaaagtgaaactgaccaagaggttgaagctaagaaggcagcaaataaggtttatagaaaaatcagtgacgaggacctcaatcttgagccactctgtgatgagcttgtagagtactttgctacgagaatgatttcggcggaaacacttcggaggaataaagtcatgcaacgtaactggaataataagatatccattgcttttacctatagacgtgatggagctcttgttggctgcaaatacagggcagtcgataagacattttcacaggaggcaaacacggagaaaattttttatggtctggacgatataaagcgtgcacatgatgttatcattgtggagggtgaaattgataagctgtccatggatgaagctggttatcgtaattgtgtcagtgtgccagatggtgcaccacccaaagtgtccagtaagattccagaccaagaacaggataagaagtatagctatctttggaactgcaaagactatcttgactcggtgaagattttcttcagaattcaatcataacttattttgtgaggcgtgcagatcacttcactgactttgttctggcacatgggaataggcatctaggataatattagcaaccgataatgatcgtccaggtcaggctctggctgaggaacttgctcgtcggcttggtaaagaaagatgttggagagtcaattggccgaagaagaatgatacagatacttgcaaagatgcaaatgaggtccacaagcattgagaaaggttatagaagatgcagaactgtatcctataagaggccttttttcattcgaacagttcttcccagagattgacaattactttcttggaatacatggtgatgagcttggtattcatactggatggaaatctatggatgatctttacaaggttgttcctggtgaattgactgttgttactggagtaccaaattctggtaaaagcgagtggatagatgctttattgtgcaatataaacaaacaatctgggtggaaatttgttctgtgctcaatggaaaacaaggtaaaggagcatgctaggaaactcttagagaagcacattcagaagccattctttaatgctaggtatggtgggtctgcacagcggatgactcctgatgaatttgaagcaggaaaacaatggtgtgaagatgatagccttccatctattaattgggttcttgaccttgcgaaagctgcagttctaagacatggagtgcgtggtctggtgatagatccttataatgaacttgaccatcagcgcccctcaaaccagacggaaacagaatatgtcagccagattctgaccaagattaagcgctttgctcagcaccattcatgtcatgtatggtttgttgcacatcctagacagcttcaaaactggaatggaggcccaccaaatatatacgacataagtggaagcgcacattttataaacaaatgtgataatggaattgtcatccacagaaacagggacccaaatgctggcccccttgataccgtgcaggtttgtgtgaggaaggtgcggaataaagtggttgggcaaataggagatgctttcctgacatatgaccgggttactggtgaattcaaggatgctggtaaggccactacagcacccagtgcaaaagcggcaaaacagtcacgcaaagaggcatataagatgccatttcaacatgctgctgaagacggtgagaatagtggtctgtgactgcataagaaagacatgttcctgctgatttgatgtatctgtatcattcaacgaaagtgagatttcacgattgtttctggggatggcctgctggagctcaggcagtacctcattgaactggatttgaaaccccaggatttcaccgattcctgctgcaaatgaagttgaaagctaaacttgctcagatgcgcacaagacattggcggggtggtgtatagtagtaagattaatgtaaatcaattgccacaccaggtgctaatctatgaacatttgggtgggttatatcagtagctaaactttagcagctaaggtagtacgattaatcatgcaggctttcccaaaaaattgtagcagttggaagggtttttatgttcacccttctcaacgcctgaccaggaaccaatgcctttaatgtggccgtattttttaaaaaagatgcctttaatgtgacccaactgcgaattcaggtgctcgtttgacccatgcaaagcaataccgaccatgtgccgaacattttaaattggggaccgtctccg

SEQ ID NO: 30791 - DNA, 1175 bp, Zea Mays
aacagatggaggccggcctgcgcgcgctaggccaccgctacttcggcggcggcggcggtggcctcggtgggttcgcggccgcgcgtgccacccggctccggcgccagcgccagcgccgcatggccgccttctgctccctcgctgttaatggagatgggaatggcgccgcgggtggccccgtggggagcggcgtcgaggtggcgcgcgccaggaggatgctccatgtcgtgctcgtctcgccgctgataccaggaaatacagggtccattgcaaggacatgtgcagcatctgcagttggcctgcatcttgtcgggccattaggctataaggtagacgacacgaagttgaagcgcgcgggattggattattggccatacgttgttgtcaagattcatgactcttgggaccacttctgtgattatttcatgaaacaggaaggagataaaaggctgttggcgttcaccaaaagaggcacacacatccattcagccaggggactggctagtcttcggttccgaaacaaaagggttgcctcagcaagccctcgaggattgctgcagagaaggcctaggcggcgggaccctccggattcccatggtggagacctacgtccggtgcctgaacctctccgtcagcgtcggagtcgcgctgtacgaagccgctagacagctgaactatgaacagcttcagtaccagcctgatgagctcccagaggaggcgcaggagcttttcccggcagaggacatttatgcgtgaaaacctctgcccgagaacaattacacgttacacgcattgatcacctcatttttgtgtgtgtgtgtgtgtactgtttgccgtgacacatgattgagctggagggaccacgcactgcacgattctgttgcgaattcaattccaggccgagtccttgtccagacggtgttgacatgctcattcaaaatggtgtacctgatctgcttggaagaatcgttttagtgccatgtataatttcgcagtcagaactcagaaggtgattagagtatgctgcgatggggtctcgttctgacttcttttttgtgtgtgtactggttactgaaccataagctttgttaactgcaactggacgctgcgtcctgttgcttctctgtcagtgtgtgtggtgaggaaggaaggttggtgcgggagctttactgcca

SEQ ID NO: 30792 - DNA, 5543 bp, Zea Mays
cggagggctaggccacgccagatctccaagtctccgtgtcaggtcaccgcaatccaagccacacagctttcgcctccggcgctagggtttcgcctccctccttgttcggtccgcgagtgtaccaggaccaggtgatttcttcccctttgatctgctgtgacgtgggagatgccgccgaagtctaagaggggtggcgctgccgccgcgaggaaggcgccggtgacgaggggccggatggggagggcgcaggctgcggcggaagcggcgccggttgtggaggagatggaggcgcctgctgaggaggtgaaggccgccgaggaggtcccgaaggtggtggaggcaccgaaggtggtggaggactcgaaggtggtggaggagccgaaaccctcgcctctgctgccgcaacagccggtggtggtggtggagaaagactccgatatcgcagccaacggtgccaaccagggtgaagatgacagagctgcaaaagaaatatatgaagaagaggacaaaggtgaacggctggagtttgaggatgaaccagaatatgaagaggaggctgctgtagactatgatgagaaagatttggagcagtatgaagagcaatatgaggatggtgatgaagaggtggagtatactgaagacgtggttgaagtggagacagatatggtggatgaggaacttgatgaaggtggtgatgatgtggagggggagggatacgaaaatgctgacgaagaccatcatgtggatggagatgatgaggagcataatgaaatggttaaagagcaccgtaagcggaaggagtttgaaatttttgttggtggactagataaagatgcaacagaaaatgaccttatgaaggtttttggtgaagttggtgagatcactgaagttcgtctgatgatgaaccctgtcacaaagaagaataaaggctttgccttcctgcgatatgcaactgtagagcaagcaaggcgtgctgtttcagagctaaagaatccactggtgcggggtaaacaatgtggcgttgctccaagtcatgacaatgatacactctttgttggcaatatctgtaaaacatggacaaaagaacatttgaaggataaactgaagagttatggtgtcgaaagttttgacgacttactacttgctgaggacactaacaatcctgggatgaatcgtggctatgccttgcttgagttttctactcgacctgaggcaatggatgctttcaggacattacaaaagagggatgtagtatttggagttgatcgtagcgcaaaggtttcctttgctgattcctaccctcaagtcgatgatgaaataatggcacaggtcagaactgtatttcttgatggccttcctccctcatgggatgaagaccgtgttaagaaatatctcaaaaagtatggagctattgagaaagtcgaacttgcacgaaacatgccagctgccaagagaaaggattttgggtttgttacatttgatacacatgataatgctgttgcatgtactgaagggatgagtaactctgagatcggtgaaggtgaacacaaggcaaaagtaagggctagactgtcgagaccattgcagagaccacctagaatgaaacatggattgagaggaaattttagagttgggcatggtgccccgcgaggtggccgtttaccatattctcgtgctcctccacctcgcaggcctccgccacgtcttattcggcctgctgttagccgcttaccatccatcaggagtcatccgttgaagcggcccatagatattagagataggcgtcctgctatgtcaatgccagatagagctaggcgtttccctccagagagatcttatgacaggaggcccccagctccagtttacctgaagagaagtccaaggagagaatacgggaggcgtgatgaacttcctcctccaaggagcagagctacaactgattacattaccagagttccggttgatagacgtccctctttgagggatgattattcaccccggggatcaggttattcagacctcggtcctcgtagtgctccccgtctttctgataggcgagcttatgctgatgatagttatggggagaagtttgaccggcctttagtggcctatagggagggtcgcggccgtgattatgacaccatttctggatcaaagcgtccgtatgcagatatggatgatgtgcctcggtaccaagaaatcggtgtccgtcagtctaaggcacgtttagactacgacattggtggcagcagtgctcggtatggagatacatatagtgagaggtctggacgaccacatgcgggatatagtagcagccgatctatccctgttcatgattcagcatatggcagcagccgtcatggaatgagttatggaggttctgctagcagtgctgatgctggtggtatgtacccaccgagttacagtggtagctatgggtctcgtggatctgatgttggtgggagttcatattcttcactttactcgggtcgcaatttgggtaccagcagtggtggctactatggaggtagcggttccagttcatattactaagatttggcatcacctcgtctttgtggaacagatttggcatcataggactttggtgtaggccctgcattttatggagctcctcgatttaagccacacagatctgtaaaagaagtgccaagcacccaagtgaggcaatgttttccaataagacatttcaacgaagccagaccatcgatttggttcgagcagtagttctgaggacgttctggcttgtttatgtaatgtaaggatttgctttatctggtcaagagttctgaacataacaaccagatatggtgttttaagtgtttcgacatgtttacttccagtgtttctataacattattgagacagatatggagtgtactttgaggtagtttctgcaattcaagttatttggggattacatcttgtgatgtgccggcaaaggccaggcttacaaaagaagttttggaatgagtgcttcttgtaaggctgttagtttctgaaaccctcccttcccttctgtcttctagaggatcaataatcaccaagacagaatgttgattggtcagacttaaattctggacttctatgttgcattccgggtacaaatggtttaatgggttgccaaattttgagagaaactgcttgtgtcaaaaaatttcccaagcagttactttggtttctccaaagtttaagataacagaacttgaagcaaaaggacatttgaaacattgagtatagccttgcaatactatgactatatagagcacaaggcatcatgtaaatctaacaagcagtgccagtattttacagaagggtaggcctagtgcagtggtgagaggctgagagctgactcactgagttaccaggttgcgggtttgaaacagcctctccgcatttgcaggggaaggcttgccttggctcatcctttttctagaccccattcaagttcggtttatcctttccccaggccccactcatgtgcgagccttcgacactgggtctggcctttagtgctagtattgaacaccaccctggtttgatactttgatcacccactatttacgatttttttggagtgttttgtggagtatggattactaacaattttgagcttaatgggcattggatgattgcaagctttcaagaatcttgctggaggtgtaacacactaactgatcaagctacagaaaaaagtatgatttgtctgacaccattaacttctaaccataatttcacaacatagtttgggaccaaacctttagctcaatattgtcacacttagccacttaggctttaaagccaccatatgtgtgatatatcttatcagtctagtatatgataccatgcttgtttgtgtggataatttttactaaatgataacttggccaagaatttacctttatataaaaaaaaactcggccggggagggaaaagaccaccctcccggtattccatataagaagagaccgaaacaatggtcccggccgagaaaatccccgaaccctggcccctcatcactaacgggccgacgtcaactgtccactctgcaacggcccaaccggagggtggcgcacaagacatcgtatcccgagagcggatggggcacagcgaggggttttttttttaaccaagcctgaaaattcgctcccgataggaatcgagcccaggacttggagttgctactcggaagtcctcaacctctaggctagaggccctttcgcaatttacctttatataagttgaagaaacagggtgtgctgtgttgctgtggtttgacagtgactaattctgtatggtgacctgcaaagtagctgaaagatgactagtaatatcaatgcccagctatgcaggccgcagagagcttaaatgcaagcttaacttataactgctggtgtcatcttttgagttttagcaaggaaaactcatgcactaactttggatttacttgagctagggataataacactattggatcctgagttcagactgagagacagttttgtccttgaaattgttttttggagataacctagtgatgccactgagtaggatgaaggatcaatatgtagtttcatgaagagaggctgctctgagatgtcttgcagtatgcagaaacacattttgtgtgcttattaatgtacttgagggccattatttgttacttatgtgttataataattattggagtaggacttcatgagggaaattgatgatggtattagatctagtagaactgttgattgccaattgtgcacagaagtaatgctatatgcaatgacaccaatgagtttggttactgggagccagtatatgtgggaatcagcacctggtggtgcccatttgaaaaaacaagttgaaggggattatttttcttttgcgtggcaacgatgatagatctgaaagcagaaataatttcttgaaaaacagtagccatagaattaagtacaagaatgctctattcaaattctgagttgaaggctgttgaatttttctccccagttgctggagcaaactcaaggatctagcacatttaagtttaactatctagtcaagtattcaacataaagatacttcagaatcacaaattgtagccaccagcatgcctctccaaagacgtgcatggagattcaaaccggtatcttgcttgctgtcaaaagcaaccagatttgtgaactcgtcatgtgtgaattgtgatgttgtattgctctctagtttaccaatttgagcttgtaaagaacactgtagggatgaaaggaaccaaatgtacaaaaacagagtatgctgacgtttgtcacgcgcgtctgaatctgttccccgtttgagcttgtaaagcacactgcaggcgtggaagtgcttatatggaatatcatatggagacgttagtcacgtgcatatgaatatggtagttttagggccggtttgatttcccgtctaaggagccacaacttatctaataccctgcttgaatttggagcatggaattggtaattggaataaacttttctgaattctgttgtttggtt

SEQ ID NO: 30793 - DNA, 677 bp, Zea Mays
ccatctggtccgcggtcatctgtcagtttgtttgcgcgaaaaaggataggaatcctcttgtgtcctggccgtcggccgtcgctgcgtcgttccagatttggggaaggaaatccggcaccgagattcgagtcgaaaagtcttttgtgtaggacatcatttgctagatggcgcgtaccaagcagaccgctcgcaagtccactggaggaaaggctcctaggaagcaactcgctacaaaggcagcccggaagtctgcacccacaactggaggagtgaagaagcctcaccgttaccgcccagggactgttgctcttcgtgagatccgcaagtaccagaagagcactgagttgctgattaggaagctgccgttccagaggcttgtgagggagattgctcaggatttcaagacggatctgcgcttccagagccatgccgtgcttgctctgcaggaggcagcagaggcctacctggttggtctcttcgaagataccaatctgtgcgcgatccatgccaagcgcgtgaccatcatgcccaaggacattcagctggcaagaaggatccgtggcgagagggcttgcattcgagctagtttatcgtgttccaacttccaaccgtggcaggtggaaggggtgatgcgagcgagcacatcgagtggtccgcgggccattcagtggaaggat

SEQ ID NO: 30794 - DNA, 1909 bp, Zea Mays
gggtggagtgtcgagttcatcttcatgaattcatgacttgtatggccctaggtgcaaaatccagcaactggtgaggtccttgcaaacgtgtcctttatgggcagcagagaaacatctgatgctattgcttctgctcacagtacattctattcttggagtaaactcactgcaagtgagagaggcaaggcactaagaaaatggtacgatctaattatttcacacaaggaagagcttgcacttctcatgacactggagcaggggaaacctatgaaagaagcccttggtgaggtcaattatggtgcaagtttcatagaatattttgcagaggaagcaaagcgcatatatggtgatataattcctccaactttatctgatcgtagattgttggttctgaagcagcctgttggggtagttggagctattacaccatggaattttccattagcaatgataacccgaaaggttggaccagctttggcctgtggctgcactgttgttgtcaagccatcagagttcacacctctgacatcattagctgcagcagatcttgctcttcaagctggaataccagcgggtgcactaaatgttgtgatgggcaatgctcctgagataggtgatgcattactgcagagtacacaggtcagaaagattacgttcactggatcaacagctgttggcaaaaaactgatggctgaatctgcaaatactgtgaaaaaggtctctttggaacttggtgggaatgcaccttgcattgtttttgatgatgcagacattgatgttgctgttaaaggcagtcttgctgccaagttccgtaacagtggacagacatgtgtttgtgcaaacaggatattggtgcaagaaggtatctacgagaagtttgcatctgcattcatcaaggctgttcagagtttgaaggttgggaatgggctagaagagagtacatctcagggtcctctgattaacgaagctgctgttcaaaaggtggagaagttcataaatgacgcgacttcaaagggagcaaatgtcatgctaggtggtaaaagacacagcctggggatgtcattttatgagccaactgtagtagggaatgtcagcaatgatatgcttcttttcagagaagaagtttttggtccagttgcaccccttataccattcaaaactgaggaagaagcagtccatatggccaacgatacaaacgcaggcttagctgcatacatatttaccaagagcatacctcgttcatggcgtgtatccgaatctcttgaatacggcttagttggggtaaacgaggggattatttcaacagaggtggcaccatttggcggagtaaagcagtctggtcttgggagagaaggatcgaagtacggcgtcgacgaatacttggagctcaagtacatctgcatgggcaacttgggttgagtcatgaaatcggcctcaggctagaaacgcatggaagagatgatgaaccgagagaccaagaaggcaggcgtctagctacaagaccggaggaacatggctgaaaggggccggccactggttgtgggggagcagttttcgaataaagcgaataagccgcggaacatgaacaaaagaagccgaaatgagttgtaaatgacgtgaactataaagtatggcttcgcctccggacttttgtatacgtaatcatggcactacttgtctatagtgtctccaaagacgtccatgttacagaataaaagcgtatagggtggatgctacgttacaggctgtcggtggtatgtacacctcgcctgattcctgacgaaataaagctggatactgcattcttgcggctcttgcctgcaggggtaacatggtggttctagtagcttcgccgatctttcaatcaggctgctggtatattgaatgttaccatgcatagttaccagat

SEQ ID NO: 30795 - DNA, 2308 bp, Zea Mays
gccttctcgtcctcgcggacttgtgacttgtgactccagtcccttccaatcaacaagttgctatagtagtcccttccaaaatccacactggaaccggaacctccatctccaatccaatccaactccagatccgcctccctgctgcatccccatcccgcacgagcaccaccccttgtcctctccgcctctacatctcatcggctggtgcacctcctccctcctctgctcggcccctccctcccttctcgtgctacggcagcgtggatgcacgagactacagctgtggcaaagcggagatccggcgggagtgcagcggccggcgtgcctctacgtggtatggtgacatgaagatgcgaggcgaggcgagcaaggccagctccggctccggctctggctccagcgaggatggtgagcgaaccggccccgtgccttcccccgctcgtcgcgcgccgcccatccgcatcgacgtcgccatgggctccttctccgcatgtcgccgccacgagatctgcccgcgcgtctccttcggcagccgatgcccgacggccgtccgacctccgacgcatcgtcgccggtccggtcctcttcgccccctctccgctgcgtggcgccacccgtcgtcacctccgcccccttcaccgacctctcctgggtcctccacacactgctcgtcaccatcgtcatgcgcgaggcgctcaaggactggtgattgcggtgtgttggttgaggatgccagagatgagctgaagcttctagcattatgtacaaaaggtatttgtcgaattacctggatgggattttgctatacttcacttgatttatcatatttcctttgctcatcagttctgaacaagtgaccacgtctaactcacaactctcccatttctggttgcgcgaatttcttcaattctttcagaaatcagaattgcatgacttttatcttaacataagttagagtagctgtgcataaatgtggagaatattgatcagagtttatgatttgttcaaactgaaactcactaaattcttgcaattaaggactatcggatggtcagcatccaatttatctatgttcagcataatggcatcaagtttttgctaatatgactgtagagtcttaagacttcaattaatttttgcaggggattgacatgctatcatttgtatcaattaaaactagagctgttctcttgatataagggttttctccatatttgagatggattgaacactgtatcctttacctgcagcattttttctgtatctcgtgataatttttcagtcactctaatctctctctccatgcagctgataggttttctccatatgttgcttgggaatgcttgattttttttctagctgcataaagctttgtatcatcaaacaattcataaaagaggctgacctgttctagttattggtgtcagatttgactgcagtcccatgattttttgcttcagatgggactggactttggtaatccatttcacaattattttccaatgctgttagtatttcctttccttttgttctcaagtctttctaagaatgtcactcataactagtaatagtatttcttttccttttgttctcaagtctttctaagaatgtcactcataattggtaatagtatttcctttccttttgttcataagtcttctaagaatgtcagtcatagctggtaatggtaatcatggttgtaacctgatttgtagtgagagaccagtaaccatataatgagctatgttcttatgagataaaagctggagacttttttttgacatggttcttccttttagaatgataagaaaataatcttgatgtctatatgcacttattgagaccatgtaaagagaatataatgcaacatttgatatgtttgaaatatctctctgcctatattctaagctagaacaatccatactccatatgcttgaattatcctttcttagatgattgactcagattcgtctttgtacttgtattataaatataaacgaacttcttatttttcttcccttccaggttcagagtttgagataatcaatctgtagtctaaaaattgtatgtgtttgtagttgatgggagcacctctcaggagttaccttagtgctttagatgtaataattgttctgtaactgaataaacatttgcatttgtgatgcattttgactatatatgtgagatgtttataaaaacacgtgcaatatatataatattggctttcctccatgtttttttccagtttttcatttagtgacgcgtctcggcgagacacgccactgatttggggcgctagtgacgcgtc

SEQ ID NO: 30796 - DNA, 2144 bp, Zea Mays
gtgctttacttcgcgcgagcaaagaggggagctggggagggcaaacacgcactagacccaaatcctcgtagctccagacatccagaacggcagaaccttctagaccaaaccttcgacccatcacctcgagctccagccatgtcgctctcgtcggcgcgccagcgccgggccactgcagcgtcgccaccgacagatgatgggtacgccaaggacgccaaggacaggaggcggcggcccggcggagacggggacagcgaggacgagggtatcaagtggttcctcccgttcctggcgctcgggctcctccgccacatgagcgcgtcctccaacctgatccacgactgcgacgaggtcttcaactactgggagcccctccacttcctcctctaccgctccggcttccagacatgggagtacagctgggcctgcttcattgatctttggtgagcataaggttcgtgtgttctactcagtgagaatctttcttggtctcatttcaactattaccgaaactgttctggtggttgctctttcaagaagatatgggaagcggcttgcttgttatgttcttgcaatgctatgcttatccagcggttgcttctttgctagtaccagtttcttgccaagttcattctccatgtatgcagtaacactttcgtctgcactcttccttcttgagaaatatgctggtgcagtctcagttgcagctgctggagtgatccttggttggcctttctcaattttggtcttcctccctgttaccgtttattctctaattagaggatcttttagaagggtttttctatctggatttgtgacttcactgtgctttcttgttctttcgtttgttgctgattattactgctatggtcgattgacattctcggtgttcaatcttctgaaatataacgttattggtggcggcgaaagtcacttgtatggaaccgaggggttttcattttacttcaggaatggattcaataatttcaattttgccttcatcctggctcttcttttcttgggggttgtaccatttgcaagaaagaaatatgctcctgatctcctgatagttgtctctcctgtctatatctggttggctttcatgtctttgcaggcacacaaagaagaaaggtttctctatccaatttattcattgatatgtgttgcagctgcagctgttattgacagtttacctgattttttccatgacaaatattcatctgatcagtctatttttgaaaagatagcgaagggtctgcgtcctttgatacttggttttattctgtgtgcttcccacagccgaacattttccatgttaaatggatatggtgctcccctgcagatctatcagcatctagaacatcatgatgacactggacccgggtctattctgtgtgttggaagtgagtggcatcgctatccatcatcgttcttcataccctcttatatcagtgaagtccggtggatagatgatggcttccgtgggttacttccatttcccttcaacgagacactgggtgggaccactgcagctccgtcctacttcaataacaagaacaaggcggctgaagggcaatatctgaaagacattggagcatgtaacttactggtggaacttgatctaagacggccttacccctcgcgcgggagtgacttgtcgacatgggaggcattggccgcactgccgttcctggacagagagctttcccctgcattatatcggtccttcttcataccataccgatggcaacaaaacaatgtgttcggcctgtacaagctactgaggaggttgcatcctgaccatgcgtaatcaagggaaatgtggggtttgcttcaatgagcttaatcacgtgatttcttttaacaaacagcttgcagatttttactgccatagattttctgatcccaatgtgtaatggcgtacctatttttgtcccactgatccttccatcatacaaattcatcacgagatgacgaggatgagagtgctcaactgctgatgtagggagggatgttcgaggagaatcatgttgtgaaacggctgcttcgccagttgttacctttttggattgtttgttgaatattagccaatgacagactgatagatctatacctttttatgttgagcatttttttcctcctgc

SEQ ID NO: 30797 - DNA, 3186 bp, Zea Mays
cccatctagagctctactgcttggtcggcctactcaccacgctagccgttcgatcccctcccctcgccgcctgccctcgttgtcggccgcctgccgccgccatctcacggcctcctaccttccctcgtggtgggctccaccgcggtctggttcgtcttcgatcgtgtgggatacagcttcctctccgtcctcttgaaagctatcagagcaagcaagccagccactttacctagctagtgttccggctgattccactggcgacgattcgagtttgagaagcacgtgggggcggagtcgaagaaccagaacggtaacatcctcctcatcaacgacaagttgctctacgacctgttccacgagctcagaaattggcccccttgtgcggaggagttttgggcgaccgccggggtactcatgactgtgcctgccaccgaagcctcatctgcgccgcaggggcagcaagcaggcgcgcccgctagctgggaacccaacggggttcaggttgacggcgtgacggtggatccccctttgcctggacggggagccatggtgatgctgaccgaggaggagaaagccagcttgtgtctgcttggtttgaagcaaagcagttccacggctgagttggacactatatgcggcattgaagggcctgctgcggaacagatcaaagatgaagcaggtggtgaccatgtgatgcacgatgctctagtgggagtgacagaaacagagtatcagctagacagtgaccttagagatgttagaggactgctgtccactggacttcttgaaggtttcagggtgacctacatgaaggatgaggtggaggaggttggacggataaatggacagggttattcttgtggctgctcaaagtgtaattacaatagtaatattatgaatgcgtgcgagtttgaggagcattatggtcagtcatttgacaaccagattgatcacatcttcttggataccgggatttctctattcagggtggtggaagcactgaaaccttgtaagcttaacatgcttggggatttcattgaagagaagattggtttccctcctaatttggatgagtataacaagtggaaagcttcatttcagaagagaaaagattatttagatgctgtggcttcagatggttgtttgactcagagttcacaggggttggctgcaggggagatgatttacagtttgagagattacttgaaagattctgtcagcaatagcatctcaaaccttaactggagtgcatctaaaaggcggtctgggagacggtttagacaaggagacactgggacttcaactccaacctttagcggaagcccaggcaaagggggttttggccactctactgacacctcagagaagaaaggcactgaagaaactcacagtgagaacacaggagaccctctcagcatcgatggtgttaagtctgattctccattacctactgcagtaaccactaaccactctaaacacgattcaacaaatttagggctttctttatcaagtccagtaaaaatcacgcaaaggccactccgaaactgcagcatagactcaaagtcaaaagaatcaaaaacaaggaggatggccttgcagataatactttgttgacttacaagttaaagaatggagaggtgctctggatatttatgtgaactatattggcccccttttccgcaatcacctgaatatgtagcactcttaagaggactcacgcttcactgtttttaggctctaaagcaagggtataaacggggaacatgcatcatctgtaactgttgcaatcaagagttttctccttcccactttgaagaacatgctggcatggggagaagacggcaaccgtatcacaacatttatacattagaaggattatcacttcataagctagctctgcaactgcaagatcatttgaatccaaatggattcgacaatgctagtgtttccagcgtcagtgactaccataaccttacttcttcaggttgtggcagagaaccttctactaccagtggacctattgttcctctgaaacggactttacaagaaagagtggtagaaacagagagttgctatttctgtgggtatggccacacaacgattggaaatatcaatccagacacgattattttctgtaaccagtgcgagagaccatgccacatcaaatgttacaacaatagagttgtaaaaaagaaggtgcctctggaaattttgaaagaatacatgtgttttcacttcttgtgctgccaagaatgtcaatcactccgtgcccgtctagaagaaggactggaaaagtgtgtagggattaccttccttagacggataagatctaatatttgttggcgacttttaagtggaatggatgcaagtagggatgtcaaactctacatgcctcaggtcattgatatcttcaaagatgcatttatggattctactgatgagcacagtgacatcatctcagacatggttaatggcaaaaatggagaccaagagaaggattttcgaggaatgtattgtgcactgttaactgcaagcacacatgttgtctctgctgcgattctgaaagtgcgcatcgaacaaatcgcagaacttgtcctcattgctactcgtagcgagtgcagaaaaaagggttacttcatacttctcctaaagtcgatcgaggcaaatttgagagcctggaatgtaagccttcttactgcgcctgttgaccctgaaatggcacaaatctggtcagagaagctcgggttcaccattttatcagctgaagagaaggagtcaatgctggagtcgcaccccttggtgatgttcaagaacctagtcttggtgcagaaatcacttgcttgagcaaatctgatctatgtttgtttgtactactttagaaatgaaaacccggtttcgagagcttagacagtacggggttaggccgtgttaagtcattttgtttattatttagatttaaaatatttttaaactatttaaatatatattataaattatatctctacgcttgagcgggaaactggaacagtcccaaacactcccatagagtttagacggactagatgttcgtgtattgttacggttttatgtcacatggacacagatagattttgttttaataaataaaatatatgtgctctaatggttaggtggatgtagatgtgaaatcaataactaaggtgtgga

SEQ ID NO: 30798 - DNA, 884 bp, Zea Mays
ggacggctgccaccgcggcccggatgtttccctgccaccataaatgcgccgcggccgtcctcgctgcccaacccttcgctgcgccgccgcctccgacatcgtctcttcgtccccacgagcaaccgataatccgccggcgctgagatgttggtttatcaagacctcctatctgtgggtcacccaaggtcctgttgatgtagacattggtgccaatccatccgccgagggtggtgaggatgaaagcgttgatgacacagccgtgaaggtggttgatattgttgacacattccgtctacgagcaacctccttttgacaagaaatcatttgtctcttacataaaaaaatacatcaagaatctcactgctgtgttggagccagagaaagcggatgagttcaaaaagggtgtcgagggtgcaaccaagtttctccttagcaagctgaaggaccttcaattttttgttggtgagagcatgaaggacgaagcgtccgtggtattcgcctattacaaggatggtgccactaatccgacattcctctatttctctcatggtcttaaggagatcaagtgctagattagttacccatgttgggtactatatatgttctattgttatagccacaactatagctgccctgcctgaactgaactcaggttttttttaagaaaaaactgtccaagattggattgcttgttaaagctaaatattgttattgacgtgttattgcttagttgtcattgtctttcagctagtcattttatatttttgttttttatctcttcgttaaaatcttatacttatttttgacgaaagtagatgtgagttaattattagtatttctatttggactaaagaattagatttgagttaattgttaatagataa

SEQ ID NO: 30799 - DNA, 1914 bp, Zea Mays
tttaacctcgtcccccacccccaccctctcctagaatttactgagtaccaaaaggcgtagagtagaggaacaatgccaagatcaaggaacatcagttaggcctgacaaaatccccactggcgcatctaaaattgttcaggttgaggcatgtccacatcctggacattttggtggactttgcattatctgtggcaagccacaagacgaggaagatgtttcaggagttgcttttggttacatccacaagggcttgaggctaggtacctcagaaattgacagactacgtggtgctgatttgaagaatctgttgcgtgaaagaaaattagtactcattttggacctggatcacacattgatcaactccaccaaactccaagacatttcttctgccgaaaaagatttgggtattcagtctgctgcttcaaaagatgatccaaatagaagcatcttcgcactagatttaatgccgatgctcacaaagttgagaccatttgtccgagaatttctgaaagaagcaagcaatatgtttgagatgtatatatacacgatgggtgacaaagcctatgcaattgaaattgcaaagcttcttgaccctagtaacatatattttccttcaaaagtgatttcaaactcagattgcactcagcgacatcagaaaggtcttgatgtgattcttggagctgaaagtgttgcagtgattcttgatgacactgagtatgtatggcagaagcataaagagaacctgattctgatggagagatatcatttctttgcttcaagctgccgccaatttggttttggtgttaggtctttgtcagaatcgttgcaagatgaaagggagagtgatggtgctttggctaccgttttagatgtcttgaagcgcatacacgctactttctttgacatggctgctgaaactgatctttcttcacgggatataagacaggtgatcaagacgttacggaaggaaatactgcaaggatgcaaaatagtcttcagtcgggtgttcccaaacaatacacgcccacaggagcagatggtctggaagatggccgagtatctgggtgccgtttgcgttaaagatgtggatcccagtgtcacccatgttgtaactgtggatctgggaacagagaaggcccgctggggtcttaacaacaagaagttcttggtccacccacgctggattgaagcagcaaatttccggtggcataggcaaccggaggaagattttcctgtcactgcccctaaggaaaagagcaaagagaaagatagtgataatgatgtggctggcaagaaggaaacgagcgaggataaagagaatactgcagctggcatgaaggaaacgaggaacgatgaaggaaatgtaaccggtaaagacaaagctgatgccaaagaaaacgttgtgaccacatctgctacgtgtcctgcagactcgtagtctgtgttgggctccaaaggctttagatctgtccataaaaaaaagacgttacatctgctccattgcaaattttgctgctgacctgaagctgattgggcctccggccatataacttacgctacgatgaaactataggagttgaagcaaactgatgtctttatgggacaatttttggtgaatccgtgcgactatgtgcgcagatgtacttaagtttgtgcctgcttcggtaggtactgccccctgatgtaagcattcgtgatcgctagtggaactacgttattctagttgaaaaaaaatgttccacacattaattcttgcactggaaaaggcataggcaaggtcgctatgatgttgccatacattgagtacgaagtgatatgttttccggcggagctgtaggggttttcgttatagtgatgaattgatgatgacaaaaataaattccgtcatttcttttatcgtcgaagaagcaggaa

SEQ ID NO: 30800 - DNA, 1740 bp, Zea Mays
gcactcgaaaaccccaaacccaaaggcatctcccagtcggagtcgccccatggccccacccacctattctccctgccggcggcagccttaaccctaatctcatcgcctcctcttccttctccagttcctcgaaggcccagcagacaacagcccctctttcttctcagccatgtcggaggacgaagcgaacgctgctgctgcgccggcagagggaaagaactggcggcggaaggggaagcacgacaagcccaagccgtgggacgaggaccccaacatcgaccgctggaagatcgacaagttcgaccctgcctggaacgagggcggcatgctcgaagtcagctccttctccaccctctttccccagtaccgagagaagtacctacaggaggcgtggccggtcgtgaagggcgcattgaaggagtacgggatctcgtgcgagctcaatttggtggagggatccatgactgtgtcgacgaccagaaagacaagggatcccttcgctattatcaaggccagggaactaattaagcttttgtccaggagcgtccctgcacctcaggcaatcaaaattcttgatgatgagatgaactgcgatattattaagattggtggtcttgtgagaaataaggagcggtttgttaaaaggagggaacggcttttaggccctaacttgtctacactcaagggaaatactgttgcagccatgggcaactataggggaaggggactgaaacaagtgagaaggattgtagaggattgcatgaagaatgtaaagcatccagtgtaccacatcaaggaactactaatcaaacgtgagctagcaaaaaatcctgctctagccaatgaaaattgggacagatttctcccgaagttcaagaagaagaatgtcaagcagaagaagcctcaaactaaggagaagaaaccgtacacaccctttccaccgcctcaacagcctagcaagattgatcttgaacttgagaacggtgagtatttcatgagtgacaaaaagaaatcagcaaagaaatggcaagagaagctggacaagcaatctgggagagctgaagaaaataaaagaaaaagagaggctgcatttgttcctccaaaggagaacactgcaggtccatccaaatctgacaagaatgccagtgacaacagtgagatagccgatatagcgaagtcattaaagagaaaggcgaaggaatttagaaagaacgaggcccaggagagtgtcatagctgaatcatatatcgcaagtaatgatgaattgcggcaaaaaaagaaaaagaaatcaactaagtccaagtagccctaatcctcatgcataatgacactggcaattgagaaggattgcatgagccatccctataattatgtcattcatgctgtgatcgtattagatgatgaaacaaaattcgaaccttccgctggtctgttgttgcaacagttcatatgcaataggtttttaatgggtaactgccatgataaccaaggaacagaaagagccctcaagcttatcattctccaaagatatatattttcatcctataggttgtgttggttggtagagcctggctggtctaggcctgttgtatcatagtacgttatatgcaggcctcggcatttggtagaatcggtcaagctgcagagttttggttttggcaaaatgttagtcgaatttactgttaaaaaaagctcaacatattttcataaaagaatatccaagcaagggtgagagtgcat

SEQ ID NO: 30801 - DNA, 1631 bp, Zea Mays
acggcccacaacgcccagaaataaaaaggaaaaatccgggagaggataacaaaaaagaaaaaaaccacaaagagattcctctcaccaccaccaaccctagacgatcctcctccgccatgatgcgggacggcggcagcggcggcagggaggaagggtacggctccgacggggagcgcccgcacaagaagcgaggtgaggcatggactgaagaggagcacaagaagtttctgcttgggttgaataagctagggaaaggcgattggcgtggtatatcccgtaaatatgttgtttcaaggacacctactcaagtggctagccatgcgcaaaagtatttcaatcgccaaacaaatgtgcatagaagaaagagaagatcaagcctattcgatatggtgattgatgacccgtctgatcaacttccgctctcgcgttcatcttcacaagaaatggagcagcaacatttagatgatccacagcctgttgcagccctgcctgcacctgtggtctctccagctactgtgcctatggaacaggactcagataccacaagttcaattgctggagaggcaggaacggtgatgccaggagccatgcccccctatctttatccaatgatgattcctcctccatactaccatactgcttttgtaccaatgccctgctacggttatgttcctttttactgtgagccacaaggtgctgcacaggctccgcatgaggttgtcaagccagtggctgttcattcaacgcctccactgaatgccaaagacctttacaacatgtctgaattgagcctgaagggcgactcgaatgcaaacggtggtgtgcctgcttcccccttgcctccgaagccgatcggtagaccagagaggcaatctgctttccatggcaaaggacctacacctaccggtggctcgtcaggtggactgattcctgcagtcaagtgaattcgattatgctcctaaacatgccttcatgtgtatgtaatactagaaatagccaaatcgtaatagccgcctgtgctgctaaaatggtggtgtgttttctagcaaaatatctatactgctcattttagccttcaccagtttggaagtcatgatccgagggtaaatatattgttagcttgttgtttttgcaatagtcttctttttttccccatcaatttgccccaattttcttcatcaatccttaaagttatcaattattatttgttttgccttctgttctcatcaatttgctccggttttcatctacccccaacattatcaatcgtgtatcatttcctcgctttctttctgcacataattttgttgaattctttgtagttggcacttgttacaattagttactagtcagtagctttgttcttgaaagaacttaccattgcacatgttgtgtatcccttgattttctaacacctgaatgtacatattgtttcttttgcaatggctactaggaacccaatcttcctttactaatcagatgacaataccatagtgcaaagcataacaacgtcccaattaatctactattgagtgtagacaatttgtctcgctttgctgtacattacacacaactgctacttgattttgtgctcctggtgtctccaattccccaattgtctacaaaattgg

SEQ ID NO: 30802 - DNA, 1594 bp, Zea Mays
ctgaagttgaactgggcaattccatagttggaggttaattcctttggcaatattgtatatgatgaatatgttcgcgccgtggagcgaattgtggactaccggacatggattagtgggattagacctaagcacatgaacaaagccaaagaattctgggctgtgcagaaggaagtagctgagctgattaaaggaagaattcttgttggtcatgcactgcacaatgacctcaaggtgctgctactaagccacccaaagaaggacatcagggatacatcagaatatgaggttttcagaagggagagaaagaggcgatcattgaaggatcttgctgctgaagtccttggtgctaaaatacaacagaatgaacactgccccatcgaggatgcgagagctgcgatgctcatttacaacaagcacaagaaagcatgggagaagaacatgaaggaacagttcagattcaaaaagaagctcaagaagcgaggcaagaagaaaactactgagtccaatgggaatgatcccaatgtccccactgttcttctatgaagataaagaagtaacaaagggagaacttgtcctagttttggaaacaatatctgtaatgaaatttttgtagttcaacattaatgaaaattcaggttctgcaatgattgtctcaagtgaaaaaggtaacaggtgacaagaccgggttgctgagcattgggttctgcggactggtctgctgtctcgtagtcgtggcgatggttggcgtgagagcttgccgtttcctaactgtgaattggtgttggtgcaggggcagggagttggtgtccagcatgtgcaggatgagcaccatgagcacggagcaggcgaacatgggtatgggcccgaagacccacatgagcagcgtggtggccaggtagagcgcccggaggcccatggaccagaagttgccgccccggatgacggcgtgctgcacgtaggtcgccggcacgtcggagtcgagggtggtgacgaggaagctggcctgcacgtagtacctggcggagtggatgaagcaggtgaaggaggcgaggaagcagacgaggagggagatgtacttgacggtggccgtggactggctgcggtcgccgtagacgagctccgtcatgaacatcttggtggtgctgctgacccaggcgccgatgagggagcccagcgcgatggacagcgacgccaggttggtggacgccgagatgttgctggagatgacgctcagcgccagccccgtctcgtcgggggtcgcctgcaccatgcgccgcacccaggcgagcttgttgtggttctcgtagccgatcacggtcgtggcgggatgccggagaatgcggtagaggagtaggaggtggtagctcagcatcaccaccagcccgcatggcaccagcaccaggtccagggaccccttctccagctgcatcgtctcgtctcgtctctcttcaggctttctgctccctagctactaggcttcatttgctattgctttagcatttcgatgctatttcttggttggagttggagttgatctgtgcagactgaactgccctcatggcttgtggcttgcgctttcatttggattgctagt

SEQ ID NO: 30803 - DNA, 1272 bp, Zea Mays
ctcctctctcttaattacgatggttccggtctctctccttttcctgaaattgcatcgtcctcgtgcatttcccccctccttggtaacacaacaaagcttcagtcaatgcacgcaatcacagctgcaggaacaaggaaaaatgagtccacctttggcgatcttcacactcaaattaagaacaataaattgacggtcgatgtcaaagcgaactcagaatcagatcttttgacaacaatcactgttgatgagattggtactccagggctcaaatcaattctcactttggttgttccggaccagaggtcagggaagcttgaacttcagtacctacatgaatatactggtgtgaatgcaagcatcgggcttaattccaaccctatggttaacctttctggtgcctttggaagcaaagcactctcagttggcgttgatgtttcatttgatacggagactagcaatttcactaagtacaatgctgccctgagcctcgccaatccagatcttattgcttcccttcatttgaataaccacggtgataccctggttgcgtcttactaccacctggtaaagcatcattcaggcactgctgttggagctgagctgtctcacagcatctcaagaaatgagagcacactaatatttgggtctcaacactcactggatccccacacgactgtcaaggcacgtttcaacaactatggcatggccagtgcccttgtccagcatgaatggcgtcccaagtcattcatcaccgtctccggtgaggtcgacaccagggcaattgagaagagtacgaaagttggcctgtccttggtgctcaagcactgaaatgctgagtgtttggggctctaggattttattttcgattcggatggattggaataagcatggcctggtgtcatctttgcggcaccgtttggatcttgaattacatattcctctccatgatcaatttcataggaaaatattaggattgattttatgctttaattcccagcgccctgttaataattctggtgattgagacctattgttaagcttgccaaatatgatggtggttattttgtgttcacttctatgtccattccttagtctgtcatgcgtttggatgtctggataatagtgggattgtttattgtggaatacatatattatgtaattatatattccagcttttattgggggtaatgacaagaaaaaccaacgttgagtccttggtttcagaactacagttagtcactttttttcttcttaaaagactgcctttgcgat

SEQ ID NO: 30804 - DNA, 1537 bp, Zea Mays
ccgatccttcctttcccacttccccttttttgcccgcccgctacccaaccgccgccgcggttctcgctgccagcgacggacgggccacaccgcgcaggggctcagccccgccacccaccttaaccccgccgtcgggaggcgtcgtccccggcccggcccggcccggccctcgccctctactgcaactggactggcgcgtagacctgtccccgccacgagatcgttccgccctatgtcggtgaagatgctctttgcatagctcaagctgcaatctgatggaccctgatgacaagaagtttggaaatggaccaagggagctcactggtgctgttgatttgatcagccactacaaactgctgccacaccatgatttcttttgcaagaaacctttgccgctggcaatatcagatacacattatcttcacaatgttgtgggagacactgaaattcgcaaaggagaaggaatggagttagatcaacttgttcataatgcatatctgagggataaacctgcttatattcagccctttgatatggaaactctggggcaagcgttccaacttcgagaaacagctcttgtggatttgccttctactgaaaaaggtataccgactatttcgggtaaaccaaaaagtgagtccaaggacaaagagaagaagcataaaaggcacaaagacaaagacaaggaacacaagaagcacaaacatcggcataaggatcggagtaaggacaaagataaagacaaagacaaggataagaaaaaagataaaagtggccatcatgaaaagaagaggaagcatgagggaacagaagattcagtagatgtgcataagcacaagaagagtaagcacaagagctccaaaaccgatgagatggggaatggagttagttaacacttcctagctctacctccaatccttgtaatttgctgttaaaacttaaaaggagacagacggtctctgctatcaaaaccctgtgcagaatagtgggtatcatgaatgggagctcttatttttgcagagtccattgtgaagagaattgaatttgttaatataggtctaatccttccaactgtgcaaatcaactgtgttcctccctgaagcattggttgtagggtgcgcttgaaaggatgtgcaatgagattgtttcgatgtagcgtgcatgagtaccctgagtagctgtggatggttatacagtttgtggtctagggatgtgcagtgagggcagggaattgggaataatttcgtgcccccatcgaccttgatttgtagggtaggatgatttactgtttaaccactagcaaatgttagtagccagttccatgttcatttactccacggcaactgtgctttcgtgtgccaataaccggagttgatccacatgtaatgaattggtgtcaaattgacgatcctgtgtttcaaagtatggttattggatcgtgttgccagcttttgcgtgatttgtcacacgtataatcactatagctgacttgctggtacaaatagcaatgggtaaaaatagggtgggtatatgcctg

SEQ ID NO: 30805 - DNA, 1785 bp, Zea Mays
caccagcagctataggtacgtgcacgcagtgcatggcgcaggagggctccgaggcctccgtcgccagctccccgccgccgccggcctcctcgtcctcctcctcgtggtggcgcgacatgcacccggcggcggctgcctacggcggcgcgtggccgccgcccccgcccaccgcggcgaggtggcccccgatggcggcctcgtcgtcgcgccaccagcagcagcagcagcaacacggcggcggccgcacgacgtcctccggcggcggcgccgacgacgacctctcggcctccaacgccaccatgacgtcgtcgtccttcaccaacacctccgccaccaaccgatccggcctcagcatggacgacgactccggcggtggcggacctgctgaggcggccgccgccgccgccgcagagagccaccacctctggaaccaagtcctcatcatgggcggcggcggcggcgaggttgggaggagcatgcacgacgcccacgacgacagcgagaacttcctcgagctgctcaactcgaggacgctcgtgccggagctcttcgccgaccctccggcctgcgactacctcaagaagatggagtacggcagcagccacggcggcggcgggtggccggaccaccaccagttcacgacagcagccgcgctggagaagcacctgagctccggctacggcggcggcgcgctcgcgcaccagcaccagcacgcggcggccggaggcgcgccggagcggctcacggcgaacctgtccgacctcgtgagcaactggtccatcgcgccgccgaacccgtgcctcggcgacgcgcaccaccaccaccgcaccggcgtcgtcgccgcggcatgcgataacgacaacgccaaggccggcatgttcctgggctccggcggcggcgtctgcaatcacgagataggcggacacggcgcgatgctggagggagcggcgacgggcggcggcggcggcggcggccaggagtttctccggcccgccgcaggcgcagggtacagctccatgctcgggctcagcaggaacaacaggacgatgtatatggaggcgccgtggggaagcaatgccgccggcgcgacgaggagcctgtcggacctgatatctttcggcggagctccgctgggaaaagcagaggaaccggcgccgcccacgtcaacgaaggcgctggcggagtacaagaagcaagggcacgacatcccttcgccggcgaagacgagtagcggaggtggaagcaaggggagctcggaggggaagaagaagagatcagagcagcaagggtcgtcggaagggaacaccaagaagtccaagagtgaggtctcctcgcccacgtcgtctctcaaggtgcctaaagtgaagttaggagacaagatcactgcactgcaacagatcgtttcaccatttggaaagaccgatacggcatcagttctgtatgaggcgataaattacatcaagtggttgcacgaacaagttcagttgctgagtgatccatacatgaagactagtagcaaggactacaactacaacgcatggggaaggttagaagataaggagggcgccgagatggtggacctgcgaagtagaggcctgtgcttggtgcccgtctcatgcacgcctcaggcgtacagggacagcaacgacggcccagactactggacgcccccatataggagctgcttgtaccgatgatgaactgattcaattcctgctgccgtgcatgcgtacgtgtaatacgtagctgtttattccatccattggttatataccttactcagtg

SEQ ID NO: 30806 - DNA, 1692 bp, Zea Mays
gttgaagtgcctaactgcctatagtcatgggggtgattcatgttactactgtttagtctgcagcaggccagcagcggaggtgaagacgcgtgtttgctgtcgagggtcgagaataagaagccatttgctcctccaagggaggtacatgtccaggttacacattcaatgccacctcacaagattgaaattttcaagtcacttgatgattgggctagagataatatcttgacacatctcaagccagtcgagaagtgttggcagccacaggatttcctccctgacccagcatctgaaggatttcatgatgaagttaaggagctcagagaacgtgccaaggaaatccctgatgattattttgtttgtttggtgggagacatgattaccgaggaagctctaccaacataccagactatgcttaacaccctcgatggtgtcagagatgagacaggtgcaagccccactgcctgggctgtttggacgagggcatggactgctgaggagaacaggcatggtgatctgctcaacaagtatatgtacctcactgggagggtggatatgaggcagattgagaagacaattcagtatcttattggctctggaatggatcctaggactgagaataatccttatcttggtttcatctacacctccttccaagagcgggcgaccttcatctcacacgggaacactgctcgtcacgccaaggactttggcgacttaaagcttgcacaaatctgcggcatcattgcctcggatgagaagcgacatgaaactgcgtacaccaagatcgtggagaagctgtttgagatcgaccctgatggtaccgtggtcgctctggctgacatgatgaggaagaagatctcaatgcctgcccacctgatgtttgacgggcaggacgacaagctgttcgagcacttctccatggtcgcgcagaggcttggcgtttacactgccagggactacgccgacatcctcgagttcctcgtcgacaggtggaaggtggtgaacctgactggtctgtcgggtgaagggaacaaggcgcaggactacctttgcacccttgcttcaaggatcaggaggctggaggagagggcccagagcagagccaagaaagcaggcacgctgcctttcagctgggtatacggtagggacgtccaactgtgagatcggaaacctgctgcggactgcttagacaagacctgctgtgtctgcgttacatagttctccaggttttgaccagatggtcccgtgtcgtcttatagagcgataggagaacgtgttggtctgtggtgtagctttgttttttatttttatttttctgttttgatgtacaacctgtggccgcatgaactggggcgtggagatgggagcgaccatgccgttctttgtctgtcgctggcggtgtgtttcggtatgttatttcagtcgttcagatctgttaaaaattttgtgagctatgcagttcagttcagctctgttctgttcgttagataccctaggtttctccgtggcctgaattctgcagtgtcgaaaacaaagcagagctccaactgaagtgtagctgactacttgacacatccagcatatatgtcttccaaaaaggtcgacacatcttgcagacaatgagctccaaccgacgaaagagcagctacctttctgcttgcactgcagataagcggcatacgattcatc

SEQ ID NO: 30807 - DNA, 2290 bp, Zea Mays
aagaccgccttgttgtttttgtgcctcgctagatcgttccgtaagggcacccatcgtcatagatacgattcatagcttctgccactacttgtgcgcgaagagccaagaaatgcgtcaggggttgtgaagggaaggagtgccgatggccggtggccacccggcgccgctgcggccggtggtggttgcgatgaaaggccacccagggtctggcaagtccacggcggcgcgcgccatcgcgaccgcgctttgctgtccgctcctggacaaggacgatgtgagggactgcatgttgcccctagagggcttggctgctgctgggatgctcaacgacctctcctacgccgtgctgtggcggatggctgagcgccagtgtcgccctggtgataacgaggaatggcgccggaggctggagagccgtgggtcggctgttgccaatggtggcggtggtgatggatggcataagccaaagacatgggctgagctggagaggcttctggaagggtaccaaggttgcacagactatgaaattggggatgtaccgaggattgtagtggatacaactgatccgacagttgatgcacaggtggcagctgaaaaggttgtggttttcattagatcccatcttgcttgtagccaaccatcttgtgggagacaggattcacctgtttgccattagaaaccaaaatgtacactagcttaagcattaggtaaagtttcgttgcaaaaggttgatctgttgtactgcaatgctcaaagttcttttttttatgggtgtaacctaaaggttctgttactgttgggacttcaaagggattttgttgttgttgttgtgtgatctagaggtttcgtaaaaagatgttcttttttctggggttgttcctcaatctcctatctccattacatctttcacattccaatgaaatggaatatgacttttcagcatccatgtttaggacggaaagggcttcaacaagtgtgctaccaactgtccaactaccaagataagcatgcattgctgttttttctgtagtgatagatgcttttatgccaccatttggttcattttcacatgttttctttagcagaatcagtatggaaatactgctctttttttgctgtctttgttccattttctgtactatcttctccttttcatgatctttgttttggaaattgcgacatcaaatcccagtcaatctaaactttgtatgcttgcttggtttatctagtcatgtattaatactcatcacatttcagtgtctgctttgcaaaccaaattgatggttaagtgcttgcctatttgttctgcctgatttcatcgcagctcagttgtatgattgctgggtttcctacttttcagcttttgttttccgtttcatgttgtagtgttgctgtgtttcatgttttgatgagttttgttcatttatttgtagaacaacactctgtgttggtgtcaagatctatagagcaggcatttctatgggcagtgcatcaggactcgaaggaagcatagcatcatcggtttttgtgtttcattaattctcatttcaagatggcatctgctggcctaaagccaggggtgcctgttattctacgggagctggagccatcctcagagatgttcaagcaaggagcgtcccttcgagtcacaggaagtctccagtcattcgatgtggagtccgcgactgccaccattcaagacggcagcgtaagtctgaaggttgacacccagcatctgagggatgtcagtttccgcacgaactcggtgtaccaattcattggtgaacttcagatccgtgaagttgatgatgcgattctactcgcgcgcatcggaaggaacgtcgatggcctcgacatgaacctttaccagcaggctctactcatccgacggcagcacgaagcaaagctgctgagctccaggagagcatgatctgcttgctatcttggagcaggaggcgcatggtggttgtagttattaggtttctttgtttctcaacagtgcaattgcatatgtaaacgtgaagagaactggaccaagaactggttaattgagagggtctgctgcatatgatttgcgatctctcttgccctccaaagggctgccatggcatgtgtagatgtgactgccaatttgtgatcatcttacttgcagcagaatgctggttttattttattgacatgagaacagccttgtggatcatgtttactgggatgctttgttgtgttaaaagttgggtcatgttcttttgttgtaaaggtataaataatggaggaggtcatggtgtgaaga

SEQ ID NO: 30808 - DNA, 1204 bp, Zea Mays
ccagatattcttagtggtagatgatgccaaaacacgagttgggtttgtgtatatctggaactattctatttgccatttgaagcgcaggcctggtgcgtggtggaagctattttactgagtcacaggtcgctggtttaaagcagcctcttggatctgcctttctattctatttgcctttaatttcttgtttcatgtgagggaatgaagctccttcttcggctcaggatggtagagaactatgcgtgctatgcttaagtcatgttacatgttaattttttccattgcctgctattgttagcagttgccaacttggcagtgctgattttatttggaccaacctcatgatgttattcatagagaacagctagacttcacaatggcgctacaagcagatagttcataaagagaataaaatcgcagcaaaccatgttcctgctcgcagcaacatatttggaagcatgttgtcacaaagcacatgaattcgacttttgaccctgcatcttatgggaagtgatgaacctctggagctcttcactaatgtttgcttatgacaatggagtcacctacaactgccgctggtggtgaactggagagctacttctccttgggtttgacagtatcccactcacagaaagataatgctgaatttccaaaggtttttcaataatgcatactacgggagagttggaggaattagcacaagagagatgaatatgcttgaactggatttattgttcggtctggacttcaggctcaaagtggatatagagactttcgaaagctactgcttacagttggaggaagcactggttcttgttttggagagaccaattcaggtccaagaggccaacgtaactaaacacttgatttgtaacagcagcgccgatgagacttgcaaacacgagctcgggcttgaaaggtacagcagtcaggctgtccaagggtgtagttggtaaatgtgattgggcagatagttttgaaaaaagtgtatgggtccgagtattggtaattcttttatttgacatttaagttgttcagttggccttgtttagtagggccgttattctacttctctacaacactagtgcttgtgagccacgccgttcagtttttttgcggagtgagtttgaaaacattactggagtccggccacgttcaagtatcatttcattaattatatttttactaggtgaacgtgtgcatt

SEQ ID NO: 30809 - DNA, 1742 bp, Zea Mays
cgctctcgcaaaagctccgctctgcttgtcgcagtgtcccttgtctgtttcccctcgccggctcgccgccaccgccgcatccacttctgcgccgcggccgcccatattcctccgagcgcatcttctcctcgcattacagcaccgtaaagccgcatcatttccggatccctacctaggccgaagccgcagctcccaatggcggccgcctcgtcgttgcgtgtcacgtctttcgccgccacatgccctagagcgcgggtgggatctgccggcctcggatctgcctgatgcacggctggagctttgaagctttgctgacattggcggtggttttccctttcttcagcgcccgggggccttgctcgttgctgcggcggggcggacaggtctggtgttatgcattcatctcattcagtgattactgcctcatttctaaggtcctttttagacgcacatgtatccacgccaatatgtctgtgttgaaatggacacgcatatattgagtttagagcaactcgaaggaactctttatattctgactaatttataggaatagagatttcggtgaaaaagtattctccaacagcttctttaacttaatctccaaatataaatatcttctgttgcagccaaagatgaagagggaggatagctctctagaatgtattttgaattctttataccttatctaaacctgagttcaagctaagatcactaactcattgttatgctgaatatgtgcatactgtttgaatttataagataaaaattgattaggcgtacctctctttttataaaccatggtatgcaaatggcgcttcaacctgtgggattaaagaagaaaatactgcttaatggtcttttcttttctgtttataacatctagctttctgtttataactcgagttgaggaagtcatactataaaaatctgaggacatgcggaatagaaacacattagaataaagaagcgactaacgttaattcatgatacttcatctgaatctggttaaagctgtgaaggtagaagtgattgttcatagagtaaaaactagaaattaatgatctcacagaggtttgctgtattaattcataatcctgtcatattatcttggatgctgttaggtatctttgaataagatcctttgcagactgtactcatacttccatcataatgaaatatcacaacataggatttgttgttgtgcattggcttctactccgtaagatcttaatatcattttttggttgcatgccttttgtgttatatcatcatctttgtttggatgtgcatctatctcactagctacttaagggtgtgtttggtttggctttggcttttgctccctaaaagccaaaccaaaggttggattcagaaagcagctttttctaaaagccgactttctcgcagtgtaaaactgaaagcacatctggacctgcgttttgtgacttttagatggaactgtgaaaatatatatggaagaatttttagcggcttttagtggttttcaccaaacggtttttagatttttagcagtttatagttcacaataacttttttcacagctcacagcccacaacagctttttttacagccacgccccaacctaacaaaccctaatacctgtttggctgtcccaaattttctccatttagcctttgattatgggtttattatttttgttaacgatgaaccatgaatttcttgctataatagaaaacagaaaactgcaatgtgaagtacag
